United States Patent Application Publication US 2026/0337666 A1 - sequence listing, part 10

SEQ ID NO: 13683 - DNA, 8436 bp, Homo sapiens
  source 1..8436: mol_type = unassigned DNA
attttgaccgctatttagaagagtgacctcataaatcttttagcaaagtagacacacatacctaccacatttcttaaaagtagattcgtattttgatttgagattgttgaaaagcatggtatgtttggagtgcacttagttatgtcccatctcataaagactgttgagctctctgcactgctgatgatgaagcattgcatgaacccagaaaacggggatgccaaagcacagggcttaggtgctgttccttgcgtcatcagcagaggtctgtccactttgtagaagggagagtcccgtattctcagagtaaaagttgtttctggaattgatctcgccaaaaaggacatctttggagccagtgatccgtatgtgaaactttcattgtacgtagcggatgagaatagagaacttgctttggtccagacaaaaacaattaaaaagacactgaacccaaaatggaatgaagaattttatttcagggtaaacccatctaatcacagactcctatttgaagtatttgacgaaaatagactgacacgagacgacttcctgggccaggtggacgtgccccttagtcaccttccgacagaagatccaaccatggagcgaccctatacatttaaggactttctcctcagaccaagaagtcataagtctcgagttaagggatttttgcgattgaaaatggcctatatgccaaaaaatggaggtcaagatgaagaaaacagtgaccagagggatgacatggagcatggatgggaagttgttgactcaaatgactcggcttctcagcaccaagaggaacttcctcctcctcctctgcctcccgggtgggaagaaaaagtggacaatttaggccgaacttactatgtcaaccacaacaaccggaccactcagtggcacagaccaagcctgatggacgtgtcctcggagtcggacaataacatcagacagatcaaccaggaggcagcacaccggcgcttccgctcccgcaggcacatcagcgaagacttggagcccgagccctcggagggcggggatgtccccgagccttgggagaccatttcagaggaagtgaatatcgctggagactctctcggtctggctctgcccccaccaccggcctccccaggatctcggaccagccctcaggagctgtcagaggaactaagcagaaggcttcagatcactccagactccaatggggaacagttcagctctttgattcaaagagaaccctcctcaaggttgaggtcatgcagtgtcaccgacgcagttgcagaacagggccatctaccaccgcccagtgccccagctgggagagcgcgttcatcaactgtcacgggtggtgaggaaccaacgccatcagtggcctatgtacataccacgccgggtctgccttcaggctgggaagaaagaaaagatgctaaggggcgcacatactatgtcaatcataacaatcgaaccacaacttggactcgacctatcatgcagcttgcagaagatggtgcgtccggatcagccacaaacagtaacaaccatctaatcgagcctcagatccgccggcctcgtagcctcagctcgccaacagtaactttatctgccccgctggagggtgccaaggactcacccgtacgtcgggctgtgaaagacaccctttccaacccacagtccccacagccatcaccttacaactcccccaaaccacaacacaaagtcacacagagcttcttgccacccggctgggaaatgaggatagcgccaaacggccggcccttcttcattgatcataacacaaagactacaacctgggaagatccacgtttgaaatttccagtacatatgcggtcaaagacatctttaaaccccaatgaccttggcccccttcctcctggctgggaagaaagaattcacttggatggccgaacgttttatattgatcataatagcaaaattactcagtgggaagacccaagactgcagaacccagctattactggtccggctgtcccttactccagagaatttaagcagaaatatgactacttcaggaagaaattaaagaaacctgctgatatccccaataggtttgaaatgaaacttcacagaaataacatatttgaagagtcctatcggagaattatgtccgtgaaaagaccagatgtcctaaaagctagactgtggattgagtttgaatcagagaaaggtcttgactatgggggtgtggccagagaatggttcttcttactgtccaaagagatgttcaacccctactacggcctctttgagtactctgccacggacaactacacccttcagatcaaccctaattcaggcctctgtaatgaggatcatttgtcctacttcacttttattggaagagttgctggtctggccgtatttcatgggaagctcttagatggtttcttcattagaccattttacaagatgatgttgggaaagcagataaccctgaatgacatggaatctgtggatagtgaatattacaactctttgaaatggatcctggagaatgaccctactgagctggacctcatgttctgcatagacgaagaaaactttggacagacatatcaagtggatttgaagcccaatgggtcagaaataatggtcacaaatgaaaacaaaagggaatatatcgacttagtcatccagtggagatttgtgaacagggtccagaagcagatgaacgccttcttggagggattcacagaactacttcctattgatttgattaaaatttttgatgaaaatgagctggagttgctcatgtgcggcctcggtgatgtggatgtgaatgactggagacagcattctatttacaagaacggctactgcccaaaccaccccgtcattcagtggttctggaaggctgtgctactcatggacgccgaaaagcgtatccggttactgcagtttgtcacagggacatcgcgagtacctatgaatggatttgccgaactttatggttccaatggtcctcagctgtttacaatagagcaatggggcagtcctgagaaactgcccagagctcacacatgctttaatcgccttgacttacctccatatgaaacctttgaagatttacgagagaaacttctcatggccgtggaaaatgctcaaggatttgaaggggtggattaagcaccctgtgcctcgggggtggttgttcttcaagcaagttctgcttgcacttttgcatttgcctaacagacttttgcagaggcgatggcagagagcagctgcaggcatggtccctggagccgagccttcaccacgcactcgtccaagttcggatgcgggaacctggtcccagcttgagttcctgcctttcccaccacaaattatcaactggttgatgtgtacactaattacatttcaggaggacttaatgctatttatgttgtgcctctgcaggcaaagcccttaataaatattttacatcctttctaatgacaatgaatggaattaatcactcaacaggtatagtattacgactcatgtttactttttaaaatgatttagaccgattttcagattttatttcgttatgattaaagatgtctcatgtacttggaaaagtgagcattttttttttttttgtatttcactttcataccaggcttaatgtcaatgacatttttatttttgaagtactctgacacctccaccctctactttattagaattggaaggcaaatttttgtccaaaaacctacagacaagtactttgagagaatttccaatataatattagacataatgataattttttccatactcagaatgaaaaactggatattacgtttttgttttggggtttttttgtacaaatttagctaatagctacaggctgagagaattgtaacatagcatgacaaattttgtgttgacttgaaaggaatcacaccattattccttagaagtaattacatgtgttctaacacatttgagacagggttggactcccatttctcatccgagaaattacttaacccttcctggcgctgtacagtcatcttttattctatttcctctttgctgtttgtagtagagacattttgaatgaaacttggcactgcttgattcaaaactgtggaaaccagatctgtttagtctcctgtttgtatgcgtttgctaatggtagctaaataaccagtttttgttgtaaatgcaccaattctgaaggcactttatgtactacatggaggtcatatctggttttgtttttatttttttatcatgaacattaaatgtgatgatgatttcttttccctgcacacatctttccggtgcaatatctatcaattgtgaatctggctgctggtgtataaaaacctggatgtaaagctgagcctacagacctgtcctcaccaactgttttgtgatttctactcaactacaaagatttatttaatgtactcttaatctaactgagttttgttaccaatgacctgttgcatgcttcaataccgtgtactgcctgagttgtgcctcttgtgtgctagattaaaagtgagacagagacttgacttgatcctctgagctcaagctattgagctggtagtggcagaggactgagggtacctgcacagtttgattcttttccacgtgtaagtctccattgcagaattgtcgtgctttgagaaaacacctgaggcagtgtgggagttgaacgaccctgctgtcctttttaacctgtgttgtcctagaccctgtcggggcagtcaggggacactagagatttgatctcatgcgagtcatcaataggacaaaaaagttgtggtttggggaggtctgtttgttacataaaaaggacctttcggtgtaagaaattgccgtttttaccctgccctggctggcatgtgagaagccatggaaggttgtggttgtaaatgagttgtctaaaggggtgcagaggcctgaggtttctaaaagaaggtagatttctacagagctgagtgttggttcctttttcttattggttgaaaattacctggtagtgatcagaaaacttagatgctatgtaactaaaaaaaaaaaaaaaaaaaaaaaaaaaaaaaaaaaaattcccgctcatgagttttgactattggtgagatgttttccgctacagttaacatgacaaatgtctcagtggcaaaaatcccctttttgtaagcccccatagtctagaggcagttttctttttaagaatcatgccagagcctgagtcgagcagtatgctttcttggtttttgagagtaattgtgtaattgtagagggagaaatccaattctaacctaagaactgggattcttctgtcatcttgtaaaccgtatattgaaaaaaacagaatgtcactaaatgcatattaagtcaagtattggaaagtataaaagaaaaatcattctgacaatttctaagccagaagcaaacaagaattactgaaatctaccccatgaatacttggaaggcagtaattgtgagtgacacctcagttcatcaaccccttaataatatcagcttaattttaatgacaactaaatatgctgaagtgaggatttagtattttttaaaaaagcaaaacaaggttcagtagtcctcagcaattctccaagtttctctctttgcctaaaatggtcatagatcttgatttctctgaatcgtgatgaccacacccagtcatcttcacagcataattgcaggtggcagtaaagagagtgtgctgggtaaggagcagttgctgggtcattccttgggccccgacctgcccggggagtagccctgggggagagagggcagtgttgcctatcccagaggtcccagcagtcacactgctctgcaggccgggctctctttatagccagagaaatcaccttaatgcagtctctttagttgtctgctgaagctgtagttattatgggccacttacatgaggctgagaagtacgtgccggagctcacacactgcctgttgcggttctcttaacatcagttatcacagctgcctgtgggtcccgggtatttccattcctgccccttgttggcccgaggaaggatgtggaaagagcacctggtgggatgaaggtccaacagcctgtgcctctccactgctggccctggagccggcagcagtgaggcattcattgtctgtgttgcggtgtattcccagcttcagtgctcttttcctttttgcctgaaatgtttatgcttctctgcagccagtcctctaacaaatctcaagaacaaaggtaagacacttggtttttgtttccaggacccttcagaaggtgacatcagatattccctaaattcagacaatgagggatacagagcgacttggcatgtattatttctcccatgtaaggacaaagggacagattattattgttatttctgagacagagtcttgctctgtagctcaggctggagtgcagtggctcaatctcagctcaccacaacctctgcctcctggcttcaagcgattcttctgcctcagcctccccgaatagttgggattacaggcacccaccaccacgcctggctaatttttgtatttttagtagagatggtttcaccatgctggccaggctggtcttgaactcctgacctcaggtgatcctcccgcctcagccttccaaagtgctgggattacaagcatgagccaccgcacccggcctcacagtgacagattctgagaaacagcatgcaaaacatttgaaccattttctacatctcccattgttgcatagagagtgtgcaccgctgctatcttgccagatccacactggtcctcccgaaagccaggttcatacacagcaactttttaattattctaacagttacccattaacagtcgactcctgtatttctgagagtcttgtactcacctctgaaatttaaaaacgtataaagagagcctgggttaatcagttctgcagcccctacgtgacactgtgctagttctccttcttctgtctcctccttaccctggccctgcacccctgtacttaagagggagaggtgggaggtgctgtctggtatcatttgctgcctcgccagtagagggtgccgctgtgcagggtaactgcccgcctgctcccttcctgacctcccctgaccccgaagatcactacctctgtcattcaggcattggggtacatcctgataagtcgtgtcagaactgccaatttcaggactgagatgtgtttttaaaaaacaaatccttataaactccactttgtactttagattttaaaactggggaaaaatgtgatattctttggaccacttttttaatttatataagccttaatgaacagtgtctatacatttgcatacacacacccccaccccagagtgttctcagtatgtcagagaaagtgccacagcattaggacgggagcttggagaacgttttctagaaaagggttagcttcctgttggcatgaaattttccaagcaaacctcattaaacatctgttgtttgttaaagatgttccactgaaagcaacgcatgtttcaaaggcacgtctttccgttcgttggttttctgtgtgtaaggagtagcattgctgttggcgcctaacctcgcgtgcactgcattctcaaccccgtaccagtgcatcatcagaagccttcctcgtgaccataactctgtgtctgcagatatgtgttcccgtgtaagccagttttccccttttactcagactgatttcacctagattgtcacggtttccttcatgttaactttgcgtgactttgttcttcctttactactctgtatgtaatatatatacatatatacgtacatatgctgtccaaatatatttgtatatatttgtatagcatttttacacctttattgagtaatctggtttcgaaaggaggtgagagtttagtcccttctgcagttttctccaagctgtgtcctgtgaatttcaacccttggagcctaagaaaaccctaggaagatgatgttaatttgctgtcatttcctaattcaggatctatcatcaaatgaaacatgaaaaaaacagtgacttttaaggtgaaaagagtttcaagcattccaaataaattatcaatgtttcataactttttattataaacccacctcctaataggaagccaagtactatttgatacagtggtaaaaaccaaactaccttgaatttttttaaggcaacttatgaataatgctcattttcacagtcagaatagctttaaaatatggttgaatttgatacacacaggaagttttcttgaagaacaatcctttcgcttttcttttttcttgagagatctaaagagaaactgtagattgttttcctgacagcaaaagactaatgtgacaaaatgaagtcattgtaaagaagcgatgcaacttgtcaaatatttaataaagaattatggaagctggaacattttctac

SEQ ID NO: 13684 - DNA, 3783 bp, Homo sapiens
  source 1..3783: mol_type = unassigned DNA
gccccgtcccggcctcgcgcacctgctcaggccatgatgagcttcggcggcgcggacgcgctgctgggcgccccgttcgcgccgctgcatggcggcggcagcctccactacgcgctagcccgaaagggtggcgcaggcgggacgcgctccgccgctggctcctccagcggcttccactcgtggacacggacgtccgtgagctccgtgtccgcctcgcccagccgcttccgtggcgcaggcgccgcctcaagcaccgactcgctggacacgctgagcaacgggccggagggctgcatggtggcggtggccacctcacgcagtgagaaggagcagctgcaggcgctgaacgaccgcttcgccgggtacatcgacaaggtgcggcagctggaggcgcacaaccgcagcctggagggcgaggctgcggcgctgcggcagcagcaggcgggccgctccgctatgggcgagctgtacgagcgcgaggtccgcgagatgcgcggcgcggtgctgcgcctgggcgcggcgcgcggtcagctacgcctggagcaggagcacctgctcgaggacatcgcgcacgtgcgccagcgcctagacgacgaggcccggcagcgagaggaggccgaggcggcggcccgcgcgctggcgcgcttcgcgcaggaggccgaggcggcgcgcgtggacctgcagaagaaggcgcaggcgctgcaggaggagtgcggctacctgcggcgccaccaccaggaagaggtgggcgagctgctcggccagatccagggctccggcgccgcgcaggcgcagatgcaggccgagacgcgcgacgccctgaagtgcgacgtgacgtcggcgctgcgcgagattcgcgcgcagcttgaaggccacgcggtgcagagcacgctgcagtccgaggagtggttccgagtgaggctggaccgactgtcggaggcagccaaggtgaacacagacgctatgcgctcagcgcaggaggagataactgagtaccggcgtcagctgcaggccaggaccacagagctggaggcactgaaaagcaccaaggactcactggagaggcagcgctctgagctggaggaccgtcatcaggccgacattgcctcctaccaggaagccattcagcagctggacgctgagctgaggaacaccaagtgggagatggccgcccagctgcgagaataccaggacctgctcaatgtcaagatggctctggatatagagatagccgcttacagaaaactcctggaaggtgaagagtgtcggattggctttggcccaattcctttctcgcttccagaaggactccccaaaattccctctgtgtccactcacataaaggtgaaaagcgaagagaagatcaaagtggtggagaagtctgagaaagaaactgtgattgtggaggaacagacagaggagacccaagtgactgaagaagtgactgaagaagaggagaaagaggccaaagaggaggagggcaaggaggaagaagggggtgaagaagaggaggcagaagggggagaagaagaaacaaagtctcccccagcagaagaggctgcatccccagagaaggaagccaagtcaccagtaaaggaagaggcaaagtcaccggctgaggccaagtccccagagaaggaggaagcaaaatccccagccgaagtcaagtcccctgagaaggccaagtctccagcaaaggaagaggcaaagtcaccgcctgaggccaagtccccagagaaggaggaagcaaaatctccagctgaggtcaagtcccccgagaaggccaagtccccagcaaaggaagaggcaaagtcaccggctgaggccaagtctccagagaaggccaagtccccagtgaaggaagaagcaaagtcaccggctgaggccaagtccccagtgaaggaagaagcaaaatctccagctgaggtcaagtccccggaaaaggccaagtctccaacgaaggaggaagcaaagtcccctgagaaggccaagtccccagagaaggaagaggccaagtcccctgagaaggccaagtccccagtgaaggcagaagcaaagtcccctgagaaggccaagtccccagtgaaggcagaagcaaagtcccctgagaaggccaagtccccagtgaaggaagaagcaaagtcccctgagaaggccaagtccccagtgaaggaagaagcaaagtcccctgagaaggccaagtccccagtgaaggaagaagcaaagacccccgagaaggccaagtccccagtgaaggaagaagctaagtccccagagaaggccaagtccccagagaaggccaagactcttgatgtgaagtctccagaagccaagactccagcgaaggaggaagcaaggtcccctgcagacaaattccctgaaaaggccaaaagccctgtcaaggaggaggtcaagtccccagagaaggcgaaatctcccctgaaggaggatgccaaggcccctgagaaggagatcccaaaaaaggaagaggtgaagtccccagtgaaggaggaggagaagccccaggaggtgaaagtcaaagagcccccaaagaaggcagaggaagagaaagcccctgccacaccaaaaacagaggagaagaaggacagcaagaaagaggaggcacccaagaaggaggctccaaagcccaaggtggaggagaagaaggaacctgctgtcgaaaagcccaaagaatccaaagttgaagccaagaaggaagaggctgaagataagaaaaaagtccccaccccagagaaggaggctcctgccaaggtggaggtgaaggaagacgctaaacccaaagaaaagacagaggtagccaagaaggaaccagatgatgccaaggccaaggaacccagcaaaccagcagagaagaaggaggcagcaccggagaaaaaagacaccaaggaggagaaggccaagaagcctgaggagaaacccaagacagaggccaaagccaaggaagatgacaagaccctctcaaaagagcctagcaagcctaaggcagaaaaggctgaaaaatcctccagcacagaccaaaaagacagcaagcctccagagaaggccacagaagacaaggccgccaaggggaagtaaggcagggagaaaggaacatccggaacagccaaagaaactcagaagagtcccggagctcaaggatcagagtaacacaattttcactttttctgtctttatgtaagaagaaactgcttagatgacggggcctccttcttcaaacaggaatttctgttagcaatatgttagcaagagagggcactcccaggcccctgcccccaggccctccccaggcgatggacaattatgatagcttatgtagctgaatgtgatacatgccgaatgccacacgtaaacacttgactataaaaactgcccccctcctttccaaataagtgcatttattgcctctatgtgcaactgacagatgaccgcaataatgaatgagcagttagaaatacattatgcttgagatgtcttaacctattcccaaatgccttctgttttccaaaggagtggtcaagcccttgcccagagctctctattctggaagagcggtccaggtggggccggggactggccactgaattatgccagggcgcactttccactggagttcactttcaattgcttctgtgcaataaaaccaagtgcttataaaatgaaaatgttgctgctgttattctctttccctgggaaggctgggggcagggcaggggaggtctggatgtgacaccccagactgcatgggactgagcaagcatcagt

SEQ ID NO: 13685 - DNA, 4082 bp, Homo sapiens
  source 1..4082: mol_type = unassigned DNA
tacacataacctagcctatttatttgtatctaaaattccctagccgcaccatcaccgtaaacaccaagggaaaaaattaaggaggttcctggtgggaaaagggcgagttggggggacagggtgtctgcgaggtgacgggatacagaaaactagggtgtcaaaagggagcaagaacctgttttgggggcaacttaaggatccaagtgtcacggggtctgggcaatgcaggacgggaggggctgcgtgagtgagtacagaagggaaatgagtgagggggcatgggatctcagagaaaatcagggccctctgagcaaagtggaaaggacgaccgccgcagctcctcgggccgtagctcgaccccgccttcccttttgcgcagaatcctcgccttggctgcagcagcgcgctgcccccactggccggcgtgccgtgatcgatcgcaggctgcgtcaggagcctcccggcgtataaataggggtggcagaacggcgccgagccgcacacagccatccatcctcccccttccctctctcccctgtcctctctctccgggctcccaccgccgccgcgggccggggagccaccggccgccaccatgagttccttcagctacgagccgtactactcgacctcctacaagcggcgctacgtggagacgccccgggtgcacatctccagcgtgcgcagcggctacagcaccgcacgctcagcttactccagctactcggcgccggtgtcttcctcgctgtccgtgcgccgcagctactcctccagctctggatcgttgatgcccagtctggagaacctcgacctgagccaggtagccgccatcagcaacgacctcaagtccatccgcacgcaggagaaggcgcagctccaggacctcaatgaccgcttcgccagcttcatcgagcgcgtgcacgagctggagcagcagaacaaggtcctggaagccgagctgctggtgctgcgccagaagcactccgagccatcccgcttccgggcgctgtacgagcaggagatccgcgacctgcgcctggcggcggaagatgccaccaacgagaagcaggcgctccagggcgagcgcgaagggctggaggagaccctgcgcaacctgcaggcgcgctatgaagaggaggtgctgagccgcgaggacgccgagggccggctgatggaagcgcgcaaaggcgccgacgaggcggcgctcgctcgcgccgagctcgagaagcgcatcgacagcttgatggacgaaatctcttttctgaagaaagtgcacgaagaggagatcgccgaactgcaggcgcagatccagtacgcgcagatctccgtggagatggacgtgaccaagcccgacctttccgccgcgctcaaggacatccgcgcgcagtacgagaagctggccgccaagaacatgcagaacgctgaggaatggttcaagagccgcttcaccgtgctgaccgagagcgccgccaagaacaccgacgccgtgcgcgccgccaaggacgaggtgtccgagagccgtcgtctgctcaaggccaagaccctggaaatcgaagcatgccggggcatgaatgaagcgctggagaagcagctgcaggagctggaggacaagcagaacgccgacatcagcgctatgcaggacacgatcaacaaattagaaaatgaattgaggaccacaaagagtgaaatggcacgatacctaaaagaataccaagacctcctcaacgtgaagatggctttggatattgagattgcagcttacaggaaactcttggaaggcgaggagacccgactcagtttcaccagcgtgggaagcataaccagtggctactcccagagctcccaggtctttggccgatctgcctacggcggtttacagaccagctcctatctgatgtccacccgctccttcccgtcctactacaccagccatgtccaagaggagcagatcgaagtggaggaaaccattgaggctgccaaggctgaggaagccaaggatgagcccccctctgaaggagaagccgaggaggaggagaaggacaaggaagaggccgaggaagaggaggcagctgaagaggaagaagctgccaaggaagagtctgaagaagcaaaagaagaagaagaaggaggtgaaggtgaagaaggagaggaaaccaaagaagctgaagaggaggagaagaaagttgaaggtgctggggaggaacaagcagctaagaagaaagattgaacccccatttccttaattatttcaggaataattctcccgaaatcaggtcaaccccatcaccaaccaaccaaccagttgagttccagattctatgtgaattaaaaagtcaatatatgtataattctgagatgacttaggttggacattcaatgttgtgctatgaatttcctctttatgcagagtatctgtttgcttgcagagtggctttctggcttgctgccagcctgtgcatggaccacgcttatgagttcaggatctacggcaatgtgaatcattcagatgtttacaataaaaaacaccacatgagtaaatgaattcactaatgttaatgttaaacttcatggaaaaatagtcctttgaaccttcggtggttagcaattaaagaccctgagttatgtgcaataaatagtaaataaagttataccgaatgatgtattttttgctgtggttgttacttaattaaaataccttaaagatggcaccaatataaagtatataccagtggactattgacctccaattttttaaaaagttgaaattttaacaattaccaatacttttttttcttccttcaattggaaattctgagggatacagttatgtcatgattacttgtgaaatctctccccacaaaaattttactgataataaacatgagtaaatgagaaagtctataaataacaatagactttgcctcataacacgtgttgtgttaggttttgggatggctttctagggagcaattctgaaattacttgacagatacactctttatggtaaacaggtcatttcagagtctagagtgctaaccattacactatggaaccatgataaataggtcatttcaaactgatatgtcacaatgcaatatggatagaatatgaatcccatacattcatccctataactgcattttaaaatatagtctaaatatcatgggaggaggttaaaacctgagaacatggtacaataagaaggaataattttttatctatatataatttcaggagaagggattaaaactaccaaaggttatttgccactccactgcaaacatgttgcctgcaatcctgagctcatgatttagtgtgttgttaagcgtaattctgttgcctcaagtaaataccacttaatgctacacatttttaaacctttaaaagctacagacacaagtaatgaaattatgagtcacttaaggggggaggtaatatgcttgtatgttacattgacattgctctgcatgtctctactgggagatatttggatttcaatgatagcttgactggttggacattgcatcaaatacacgccccatgtatcctttctgtcgtaaagttaagaacgctcttgcatttgatgtggaataaatatagatgatattactatctgctattctgcctttgttctgaaacaattgctttgtcagctaatttcattcaatatttgttttttagacgatctctataagttattaatttaacctgaaaccaaagtggtctccatttaaagttacttaatccctttgtaccacctatttctagttaaatatatgttgctatgcaaataggtaaagtgcttccttgccatgatggtaatggattggaactatgaaggctctcagtgtattggcttctgtaaagatgaggcgtctcctcagaaacaaaacttttcacatttctgcttactagacctgggttgatgtacatggtaagtctcaaacagatgcaagctatgtgcaaaaagtaactttagccaaatggaaatagctggatgctttgagaattacttggttgaagtaagaaaactgtaccatcctctatcctgtgtgccataataaaatagtaaaaaacctaaa

SEQ ID NO: 13686 - DNA, 1497 bp, Homo sapiens
  source 1..1497: mol_type = unassigned DNA
ttggctgcagcagcgcgctgcccccactggccggcgtgccgtgatcgatcgcaggctgcgtcaggagcctcccggcgtataaataggggtggcagaacggcgccgagccgcacacagccatccatcctcccccttccctctctcccctgtcctctctctccgggctcccaccgccgccgcgggccggggagccaccggccgccaccatgagttccttcagctacgagccgtactactcgacctcctacaagcggcgctacgtggagacgccccgggtgcacatctccagcgtgcgcagcggctacagcaccgcacgctcagcttactccagctactcggcgccggtgtcttcctcgctgtccgtgcgccgcagctactcctccagctctggatcgttgatgcccagtctggagaacctcgacctgagccaggtagccgccatcagcaacgacctcaagtccatccgcacgcaggagaaggcgcagctccaggacctcaatgaccgcttcgccagcttcatcgagcgcgtgcacgagctggagcagcagaacaaggtcctggaagccgagctgctggtgctgcgccagaagcactccgagccatcccgcttccgggcgctgtacgagcaggagatccgcgacctgcgcctggcggcggaagatgccaccaacgagaagcaggcgctccagggcgagcgcgaagggctggaggagaccctgcgcaacctgcaggcgcgctatgaagaggaggtgctgagccgcgaggacgccgagggccggctgatggaagcgcgcaaaggcgccgacgaggcggcgctcgctcgcgccgagctcgagaagcgcatcgacagcttgatggacgaaatctcttttctgaagaaagtgcacgaagaggagatcgccgaactgcaggcgcagatccagtacgcgcagatctccgtggagatggacgtgaccaagcccgacctttccgccgcgctcaaggacatccgcgcgcagtacgagaagctggccgccaagaacatgcagaacgctgaggaatggttcaagagccgcttcaccgtgctgaccgagagcgccgccaagaacaccgacgccgtgcgcgccgccaaggacgaggtgtccgagagccgtcgtctgctcaaggccaagaccctggaaatcgaagcatgccggggcatgaatgaagcgctggagaagcagctgcaggagctggaggacaagcagaacgccgacatcagcgctatgcaggtgcggcacggccagaaacacaggggggcgggggactcgagcaagggggggagttggtgcgcccagaaagtggagaccaggggtggtgcggctgcacgcagctcttagggatagggcttggctccttggccactgtgtgggaggggtggggcacttgaagggcgtgagtgcgggcgccactgtagtctgggagtgtgctccgtgctgctgcaccggcgttccgcattaaagctgcccagcccttgtt

SEQ ID NO: 13687 - DNA, 3205 bp, Homo sapiens
  source 1..3205: mol_type = unassigned DNA
atgagttccttcagctacgagccgtactactcgacctcctacaagcggcgctacgtggagacgccccgggtgcacatctccagcgtgcgcagcggctacagcaccgcacgctcagcttactccagctactcggcgccggtgtcttcctcgctgtccgtgcgccgcagctactcctccagctctggatcgttgatgcccagtctggagaacctcgacctgagccaggtagccgccatcagcaacgacctcaagtccatccgcacgcaggagaaggcgcagctccaggacctcaatgaccgcttcgccagcttcatcgagcgcgtgcacgagctggagcagcagaacaaggtcctggaagccgagctgctggtgctgcgccagaagcactccgagccatcccgcttccgggcgctgtacgagcaggagatccgcgacctgcgcctggcggcggaagatgccaccaacgagaagcaggcgctccagggcgagcgcgaagggctggaggagaccctgcgcaacctgcaggcgcgctatgaagaggaggtgctgagccgcgaggacgccgagggccggctgatggaagcgcgcaaaggcgccaagaacaccgacgccgtgcgcgccgccaaggacgaggtgtccgagagccgtcgtctgctcaaggccaagaccctggaaatcgaagcatgccggggcatgaatgaagcgctggagaagcagctgcaggagctggaggacaagcagaacgccgacatcagcgctatgcaggacacgatcaacaaattagaaaatgaattgaggaccacaaagagtgaaatggcacgatacctaaaagaataccaagacctcctcaacgtgaagatggctttggatattgagattgcagcttacaggaaactcttggaaggcgaggagacccgactcagtttcaccagcgtgggaagcataaccagtggctactcccagagctcccaggtctttggccgatctgcctacggcggtttacagaccagctcctatctgatgtccacccgctccttcccgtcctactacaccagccatgtccaagaggagcagatcgaagtggaggaaaccattgaggctgccaaggctgaggaagccaaggatgagcccccctctgaaggagaagccgaggaggaggagaaggacaaggaagaggccgaggaagaggaggcagctgaagaggaagaagctgccaaggaagagtctgaagaagcaaaagaagaagaagaaggaggtgaaggtgaagaaggagaggaaaccaaagaagctgaagaggaggagaagaaagttgaaggtgctggggaggaacaagcagctaagaagaaagattgaacccccatttccttaattatttcaggaataattctcccgaaatcaggtcaaccccatcaccaaccaaccaaccagttgagttccagattctatgtgaattaaaaagtcaatatatgtataattctgagatgacttaggttggacattcaatgttgtgctatgaatttcctctttatgcagagtatctgtttgcttgcagagtggctttctggcttgctgccagcctgtgcatggaccacgcttatgagttcaggatctacggcaatgtgaatcattcagatgtttacaataaaaaacaccacatgagtaaatgaattcactaatgttaatgttaaacttcatggaaaaatagtcctttgaaccttcggtggttagcaattaaagaccctgagttatgtgcaataaatagtaaataaagttataccgaatgatgtattttttgctgtggttgttacttaattaaaataccttaaagatggcaccaatataaagtatataccagtggactattgacctccaattttttaaaaagttgaaattttaacaattaccaatacttttttttcttccttcaattggaaattctgagggatacagttatgtcatgattacttgtgaaatctctccccacaaaaattttactgataataaacatgagtaaatgagaaagtctataaataacaatagactttgcctcataacacgtgttgtgttaggttttgggatggctttctagggagcaattctgaaattacttgacagatacactctttatggtaaacaggtcatttcagagtctagagtgctaaccattacactatggaaccatgataaataggtcatttcaaactgatatgtcacaatgcaatatggatagaatatgaatcccatacattcatccctataactgcattttaaaatatagtctaaatatcatgggaggaggttaaaacctgagaacatggtacaataagaaggaataattttttatctatatataatttcaggagaagggattaaaactaccaaaggttatttgccactccactgcaaacatgttgcctgcaatcctgagctcatgatttagtgtgttgttaagcgtaattctgttgcctcaagtaaataccacttaatgctacacatttttaaacctttaaaagctacagacacaagtaatgaaattatgagtcacttaaggggggaggtaatatgcttgtatgttacattgacattgctctgcatgtctctactgggagatatttggatttcaatgatagcttgactggttggacattgcatcaaatacacgccccatgtatcctttctgtcgtaaagttaagaacgctcttgcatttgatgtggaataaatatagatgatattactatctgctattctgcctttgttctgaaacaattgctttgtcagctaatttcattcaatatttgttttttagacgatctctataagttattaatttaacctgaaaccaaagtggtctccatttaaagttacttaatccctttgtaccacctatttctagttaaatatatgttgctatgcaaataggtaaagtgcttccttgccatgatggtaatggattggaactatgaaggctctcagtgtattggcttctgtaaagatgaggcgtctcctcagaaacaaaacttttcacatttctgcttactagacctgggttgatgtacatggtaagtctcaaacagatgcaagctatgtgcaaaaagtaactttagccaaatggaaatagctggatgctttgagaattacttggttgaagtaagaaaactgtaccatcctctatcctgtgtgccataataaaatagtaaaaaacct

SEQ ID NO: 13688 - DNA, 1879 bp, Homo sapiens
  source 1..1879: mol_type = unassigned DNA
gcacacagccatccatcctcccccttccctctctcccctgtcctctctctccgggctcccaccgccgccgcgggccggggagccaccggccgccaccatgagttccttcagctacgagccgtactactcgacctcctacaagcggcgctacgtggagacgccccgggtgcacatctccagcgtgcgcagcggctacagcaccgcacgctcagcttactccagctactcggcgccggtgtcttcctcgctgtccgtgcgccgcagctactcctccagctctggatcgttgatgcccagtctggagaacctcgacctgagccaggtagccgccatcagcaacgacctcaagtccatccgcacgcaggagaaggcgcagctccaggacctcaatgaccgcttcgccagcttcatcgagcgcgtgcacgagctggagcagcagaacaaggtcctggaagccgagctgctggtgctgcgccagaagcactccgagccatcccgcttccgggcgctgtacgagcaggagatccgcgacctgcgcctggcggcggaagatgccaccaacgagaagcaggcgctccagggcgagcgcgaagggctggaggagaccctgcgcaacctgcaggcgcgctatgaagaggaggtgctgagccgcgaggacgccgagggccggctgatggaagcgcgcaaagccgccaagaacaccgacgccgtgcgcgccgccaaggacgaggtgtccgagagccgtcgtctgctcaaggccaagaccctggaaatcgaagcatgccggggcatgaatgaagcgctggagaagcagctgcaggagctggaggacaagcagaacgccgacatcagcgctatgcaggacacgatcaacaaattagaaaatgaattgaggaccacaaagagtgaaatggcacgatacctaaaagaataccaagacctcctcacgtgaagatggctttggatattgagattgcagcttacaggaaactcttggaaggcgaggagacccgactcagtttcaccagcgtgggaagcataaccagtggctactcccagagctcccaggtctttggccgatctgcctacggcggtttacagaccagctcctatctgatgtccacccgctccttcccgtcctactacaccagccatgtccaagaggagcagatcgaagtggaggaaaccattgaggctgccaaggctgaggaagccaaggatgagcccccctctgaaggagaagccgaggaggaggagaaggacaaggaagaggccgaggaagaggaggcagctgaagaggaagaagctgccaaggaagagtctgaagaagcaaaagaagaagaagaaggaggtgaaggtgaagaaggagaggaaaccaaagaagctgaagaggaggagaagaaagttgaaggtgctggggaggaacaagcagctaagaagaaagattgaacccccatttccttaattatttcaggaataattctcccgaaatcaggtcaaccccatcaccaaccaaccaaccagttgagttccagattctatgtgaattaaaaagtcaatatatgtataattctgagatgacttaggttggacattcaatgttgtgctatgaatttcctctttatgcagagtatctgtttgcttgcagagtggctttctggcttgctgccagcctgtgcatggaccacgcttatgagttcaggatctacggcaatgtgaatcattcagatgtttacaataaaaaacaccacatgagtaaatgaattcactaatgttaatgttaaacttcatggaaaaatagtcctttgaaccttcggtggttagcaattaaagaccctgagttatgtgcaataaatagtaaataaagttataccgaatg

SEQ ID NO: 13689 - DNA, 4020 bp, Homo sapiens
  source 1..4020: mol_type = unassigned DNA
tttttttttgttttgttttgtcttctagacccagctcctcggcgctcatctccagctgctttaagacaaggggtgggggaaggggagggaggcaagaaaagatgagggtgggggaggggaaaagagggaatgcaaggggaaggagggaggagacggggagaaggaaagattggaagaaaaggatctccgaggaaggggctgagagaagggcagggtgaactggactaaaggccagagtaggaaggagaagaggggccaaaaaagaaggggatgaaattaagcacagaagatgggtaaagaaaaaagtatcagggaaagggcaaaataagagaaagccttgaggataagagggtagaaggctaaagaacaaggggaccacggggtcggggaagcgctgcctgaacggcgggacagtgacaaagaaagggcgctggcgatattcgcaccaagggtgcgaaacgcaatcgggaggtgagaaatggaaagaaggcgaatgcccggctacaagtagcctgggactgaaaggggacctgggggaggggctgggcccagggcagaaaagtccaggttcccatgcggcctgggcccacgtggagcgggcgctgaatcaccgttcagccgcccccctcccctcctccccgaccggtgcccgcagtccccgcctcctcggccgccgcctccacggggcggggccctggcccgggaccagcgccgcggctataaatgggctgcggcgaggccggcagaacgctgtgacagccacacgccccaaggcctccaagatgagctacacgttggactcgctgggcaacccgtccgcctaccggcgggtaaccgagacccgctcgagcttcagccgcgtcagcggctccccgtccagtggcttccgctcgcagtcgtggtcccgcggctcgcccagcaccgtgtcctcctcctataagcgcagcatgctcgccccgcgcctcgcttacagctcggccatgctcagctccgccgagagcagccttgacttcagccagtcctcgtccctgctcaacggcggctccggacccggcggcgactacaagctgtcccgctccaacgagaaggagcagctgcaggggctgaacgaccgctttgccggctacatagagaaggtgcactacctggagcagcagaataaggagattgaggcggagatccaggcgctgcggcagaagcaggcctcgcacgcccagctgggcgacgcgtacgaccaggagatccgcgagctgcgcgccaccctggagatggtgaaccacgagaaggctcaggtgcagctggactcggaccacctggaggaagacatccaccggctcaaggagcgctttgaggaggaggcgcggttgcgcgacgacactgaggcggccatccgcgcgctgcgcaaagacatcgaggaggcgtcgctggtcaaggtggagctggacaagaaggtgcagtcgctgcaggatgaggtggccttcctgcggagcaaccacgaggaggaggtggccgaccttctggcccagatccaggcatcgcacatcacggtggagcgcaaagactacctgaagacagacatctcgacggcgctgaaggaaatccgctcccagctcgaaagccactcagaccagaatatgcaccaggccgaagagtggttcaaatgccgctacgccaagctcaccgaggcggccgagcagaacaaggaggccatccgctccgccaaggaagagatcgccgagtaccggcgccagctgcagtccaagagcatcgagctagagtcggtgcgcggcaccaaggagtccctggagcggcagctcagcgacatcgaggagcgccacaaccacgacctcagcagctaccaggacaccatccagcagctggaaaatgagcttcggggcacaaagtgggaaatggctcgtcatttgcgcgaataccaggacctcctcaacgtcaagatggctctggatatagaaatcgctgcgtacagaaaactcctggagggtgaagagactagatttagcacatttgcaggaagcatcactgggccactgtatacacaccgacccccaatcacaatatccagtaagattcagaaacccaaggtggaagctcccaagcttaaggtccaacacaaatttgtcgaggagatcatagaggaaaccaaagtggaggatgagaagtcagaaatggaagaggccctgacagccattacagaggaattggccgtttccatgaaggaagagaagaaagaagcagcagaagaaaaggaagaggaacccgaagctgaagaagaagaagtagctgccaaaaagtctccagtgaaagcaactgcacctgaagttaaagaagaggaaggggaaaaggaggaagaagaaggccaggaagaagaggaggaagaagatgagggagctaagtcagaccaagccgaagagggaggatccgagaaggaaggctctagtgaaaaagaggaaggtgagcaggaagaaggagaaacagaagctgaagctgaaggagaggaagccgaagctaaagaggaaaagaaagtggaggaaaagagtgaggaagtggctaccaaggaggagctggtggcagatgccaaggtggaaaagccagaaaaagccaagtctcctgtgccaaaatcaccagtggaagagaaaggcaagtctcctgtgcccaagtcaccagtggaagagaaaggcaagtctcctgtgcccaagtcaccagtggaagagaaaggcaagtctcctgtgccgaaatcaccagtggaagagaaaggcaagtctcctgtgtcaaaatcaccagtggaagagaaagccaaatctcctgtgccaaaatcaccagtggaagaggcaaagtcaaaagcagaagtggggaaaggtgaacagaaagaggaagaagaaaaggaagtcaaggaagctcccaaggaagagaaggtagagaaaaaggaagagaaaccaaaggatgtgccagagaagaagaaagctgagtcccctgtaaaggaggaagctgtggcagaggtggtcaccatcaccaaatcggtaaaggtgcacttggagaaagagaccaaagaagaggggaagccactgcagcaggagaaagagaaggagaaagcgggaggagagggaggaagtgaggaggaagggagtgataaaggtgccaagggatccaggaaggaagacatagctgtcaatggggaggtagaaggaaaagaggaggtagagcaggagaccaaggaaaaaggcagtgggagggaagaggagaaaggcgttgtcaccaatggcctagacttgagcccagcagatgaaaagaaggggggtgataaaagtgaggagaaagtggtggtgaccaaaacggtagaaaaaatcaccagtgaggggggagatggtgctaccaaatacatcactaaatctgtaaccgtcactcaaaaggttgaagagcatgaagagacctttgaggagaaactagtgtctactaaaaaggtagaaaaagtcacttcacacgccatagtaaaggaagtcacccagagtgactaagatttgagtccattgcaaaaggttaagccatatgacaatttcaaaatgcatgtgattggcagcttcaaaacagaacgggttctcccatgggggctccagacattgtattttactttgtgcaatatgaggggactgcatgcaagctcagggtgctccctcctcagtctttgggggattcaaatgcatgatattgtatgtacctgggaaatttgccgatttcctaagctgttggaagggggtcacttaaggggggatgtcttgagatgtattatgcaaagtaccaactgagccaaaaacaataaacgaaacacagaactcagccttaagaaagctatatatgaataattatgtttacctcactggtgcatttaaaatggacttttgttcatgggagaacctcgttgacatgcacagtttgcaatcttatgttgatcgatgttaaacgtcacagcagtacttgctcaataaaggtcatattggaaacata

SEQ ID NO: 13690 - DNA, 582 bp, Homo sapiens
  source 1..582: mol_type = unassigned DNA
aacgctgtgacagccacacgccccaaggcctccaagatgagctacacgaggcgtcgctggtcaaggtggagctggacaagaaggtgcagtcgctgcaggatgaggtggccttcctgcggagcaaccacgaggaggaggtggccgaccttctggcccagatccaggcatcgcacatcacggtggagcgcaaagactacctgaagacagacatctcgacggcgctgaaggaaatccgctcccagctcgaaagccactcagaccagaatatgcaccaggccgaagagtggttcaaatgccgctacgccaagctcaccgaggcggccgagcagaacaaggaggccatccgctccgccaaggaagagatcgccgagtaccggcgccagctgcagtccaagagcatcgagctagagtcggtgcgcggcaccaaggagtccctggagcggcagctcagcgacatcgaggagcgccacaaccacgacctcagcagctaccaggacaccatccagcagctggaaaatgagcttcggggcacaaagtgggaaatggctcgtcatttgcgcgaataccaggacctcctcaacg

SEQ ID NO: 13691 - DNA, 2500 bp, Homo sapiens
  source 1..2500: mol_type = unassigned DNA
gctgtgacagccacacgccccaaggcctccaagatgagctacacgttggactcgctgggcaacccgtccgcctaccggcgggtaaccgagacccgctcgagcttcagccgcgtcagcggctccccgtccagtggcttccgctcgcagtcgtggtcccgcggctcgcccagcaccgtgtcctcctcctataagcgcagcatgctcgccccgcgcctcgcttacagctcggccatgctcagctccgccgagagcagccttgacttcagccagtcctcgtccctgctcaacggcggctccggacccggcggcgactacaagctgtcccgctccaacgagaaggagcagctgcaggggctgaacgaccgctttgccggctacatagagaaggtgcactacctggagcagcagaataaggagattgaggcggagatccaggcgctgcggcagaagcaggcctcgcacgcccagctgggcgacgcgtacgaccaggagatccgcgagctgcgcgccaccctggagatggtgaaccacgagaaggctcaggtgcagctggactcggaccacctggaggaagacatccaccggctcaaggagcgctttgaggaggaggcgcggttgcgcgacgacactgaggcggccatccgcgcgctgcgcaaagacatcgaggaggcgtcgctggtcaaggtggagctggacaagaaggtgcagtcgctgcaggatgaggtggccttcctgcggagcaaccacgaggaggaggtggccgaccttctggcccagatccaggcatcgcacatcacggtggagcgcaaagactacctgaagacagacatctcgacggcgctgaaggaaatccgctcccagctcgaaagccactcagaccagaatatgcaccaggccgaagagtggttcaaatgccgctacgccaagctcaccgaggcggccgagcagaacaaggaggccatccgctccgccaaggaagagatcgccgagtaccggcgccagctgcagtccaagagcatcgagctagagtcggtgcgcggcaccaaggagtccctggagcggcagctcagcgacatcgaggagcgccacaaccacgacctcagcagctaccaggacaccatccagcagctggaaaatgagcttcggggcacaaagtgggaaatggctcgtcatttgcgcgaataccaggacctcctcaacgtcaagatggctctggatatagaaatcgctgcgtacagaaaactcctggagggtgaagagactagatttagcacatttgcaggaagcatcactgggccactgtatacacaccgacccccaatcacaatatccagtaagattcagaaacccaaggtggaagctcccaagcttaaggtccaacacaaatttgtcgaggagatcatagaggaaaccaaagtggaggatgagaagtcagaaatggaagaggccctgacagccattacagaggaattggccgtttccatgaaggaagagaagaaagaagcagcagaagaaaaggaagaggaacccgaagctgaagaagaagaagtagctgccaaaaagtctccagtgaaagcaactgcacctgaagttaaagaagaggaaggggaaaaggaggaagaagaaggccaggaagaagaggaggaagaagatgagggagctaagtcagaccaagccgaagagggaggatccgagaaggaaggctctagtgaaaaagaggaaggtgagcaggaagaaggagaaacagaagctgaagctgaaggagaggaagccgaagctaaagaggaaaagaaagtagaaggaaaagaggaggtagagcaggagaccaaggaaaaaggcagtgggagggaagaggagaaaggcgttgtcaccaatggcctagacttgagcccagcagatgaaaagaaggggggtgataaaagtgaggagaaagtggtggtgaccaaaacggtagaaaaaatcaccagtgaggggggagatggtgctaccaaatacatcactaaatctgtaaccgtcactcaaaaggttgaagagcatgaagagacctttgaggagaaactagtgtctactaaaaaggtagaaaaagtcacttcacacgccatagtaaaggaagtcacccagagtgactaagatttgagtccattgcaaaaggttaagccatatgacaatttcaaaatgcatgtgattggcagcttcaaaacagaacgggttctcccatgggggctccagacattgtattttactttgtgcaatatgaggggactgcatgcaagctcagggtgctccctcctcagtctttgggggattcaaatgcatgatattgtatgtacctgggaaatttgccgatttcctaagctgttggaagggggtcacttaaggggggatgtcttgagatgtattatgcaaagtaccaactgagccaaaaacaataaacgaaacacagaactcagccttaagaaagctatatatgaataattatgtttacctcactggtgcattt

SEQ ID NO: 13692 - DNA, 1885 bp, Homo sapiens
  source 1..1885: mol_type = unassigned DNA
gtgacagccacacgccccaaggcctccaagatgagctacacgttggactcgctgggcaacccgtccgcctaccggcgggtaaccgagacccgctcgagcttcagccgcgtcagcggctccccgtccagtggcttccgctcgcagtcgtggtcccgcggctcgcccagcaccgtgtcctcctcctataagcgcagcatgctcgccccgcgcctcgcttacagctcggccatgctcagctccgccgagagcagccttgacttcagccagtcctcgtccctgctcaacggcggctccggacccggcggcgactacaagctgtcccgctccaacgagaaggagcagctgcaggggctgaacgaccgctttgccggctacatagagaaggtgcactacctggagcagcagaataaggagattgaggcggagatccaggcgctgcggcagaagcaggcctcgcacgcccagctgggcgacgcgtacgaccaggagatccgcgagctgcgcgccaccctggagatggtgaaccacgagaaggctcaggtgcagctggactcggaccacctggaggaagacatccaccggctcaaggagcgctttgaggaggaggcgcggttgcgcgacgacactgaggcggccatccgcgcgctgcgcaaagacatcgaggaggcgtcgctggtcaaggtggagctggacaagaaggtgcagtcgctgcaggatgaggtggccttcctgcggagcaaccacgaggaggaggtggccgaccttctggcccagatccaggcatcgcacatcacggtggagcgcaaagactacctgaagacagacatctcgacggcgctgaaggaaatccgctcccagctcgaaagccactcagaccagaatatgcaccaggccgaagagtggttcaaatgccgctacgccaagctcaccgaggcggccgagcagaacaaggaggccatccgctccgccaaggaagagatcgccgagtaccggcgccagctgcagtccaagagcatcgagctagagtcggtgcgcggcaccaaggagtccctggagcggcagctcagcgacatcgaggagcgccacaaccacgacctcagcagctaccaggacaccatccagcagctggaaaatgagcttcggggcacaaagtgggaaatggctcgtcatttgcgcgaataccaggacctcctcaacgtcaagatggctctggatatagaaatcgctgcgtacagaaaactcctggagggtgaagagactagatttagcacatttgcaggaagcatcactgggccactgtatacacaccgacccccaatcacaatatccagtaagattcagaaacccaaggtggaagctcccaagcttaaggtccaacacaaatttgtcgaggagatcatagaggaaaccaaagtggaggatgagaagtcagaaatggaagaggccctgacagccattacagaggaattggccgtttccatgaaggaagagaagaaagaagcagcagaagaaaaggaagaggaacccgaagctgaagaagaagaagtagctgccaaaaagtctccagtgaaagcaactgcacctgaatgggagggaagaggagaaaggcgttgtcaccaatggcctagacttgagcccagcagatgaaaagaaggggggtgataaaagtgaggagaaagtggtggtgaccaaaacggtagaaaaaatcaccagtgaggggggagatggtgctaccaaatacatcactaaatctgtaaccgtcactcaaaaggttgaagagcatgaagagacctttgaggagaaactagtgtctactaaaaaggtagaaaaagtcacttcacacgccatagtaaaggaagtcacccagagtgactaagatttgagt

SEQ ID NO: 13693 - DNA, 2519 bp, Homo sapiens
  source 1..2519: mol_type = unassigned DNA
gtgcccaggcgccctctccgccgcgctccctggtggccgctcgctagagcacgcgcgccgcagacctagggtatttgcggatcagcgtcctcgcccatctcatcctccacactccgcccccacccacctgccccagctgctaagggtcttgacctttttcagaaacgtgcatcttttccagttctaattttgcacgcttgcacgtttaaagcaggagggatgaattcggtagtggataaatcagcaactttaggatagcttatgcagaaacgcgtgtattctctacttttccggcagtgatcggaagagctctcaaaattggcttcagcccaaagggctcagatgggaatggccaggacaccatccagcagctggaaaatgagcttcggggcacaaagtgggaaatggctcgtcatttgcgcgaataccaggacctcctcaacgtcaagatggctctggatatagaaatcgctgcgtacagaaaactcctggagggtgaagagactagatttagcacatttgcaggaagcatcactgggccactgtatacacaccgacccccaatcacaatatccagtaagattcagaaacccaaggtggaagctcccaagcttaaggtccaacacaaatttgtcgaggagatcatagaggaaaccaaagtggaggatgagaagtcagaaatggaagaggccctgacagccattacagaggaattggccgtttccatgaaggaagagaagaaagaagcagcagaagaaaaggaagaggaacccgaagctgaagaagaagaagtagctgccaaaaagtctccagtgaaagcaactgcacctgaagttaaagaagaggaaggggaaaaggaggaagaagaaggccaggaagaagaggaggaagaagatgagggagctaagtcagaccaagccgaagagggaggatccgagaaggaaggctctagtgaaaaagaggaaggtgagcaggaagaaggagaaacagaagctgaagctgaaggagaggaagccgaagctaaagaggaaaagaaagtggaggaaaagagtgaggaagtggctaccaaggaggagctggtggcagatgccaaggtggaaaagccagaaaaagccaagtctcctgtgccaaaatcaccagtggaagagaaaggcaagtctcctgtgcccaagtcaccagtggaagagaaaggcaagtctcctgtgcccaagtcaccagtggaagagaaaggcaagtctcctgtgccgaaatcaccagtggaagagaaaggcaagtctcctgtgtcaaaatcaccagtggaagagaaagccaaatctcctgtgccaaaatcaccagtggaagaggcaaagtcaaaagcagaagtggggaaaggtgaacagaaagaggaagaagaaaaggaagtcaaggaagctcccaaggaagagaaggtagagaaaaaggaagagaaaccaaaggatgtgccagagaagaagaaagctgagtcccctgtaaaggaggaagctgtggcagaggtggtcaccatcaccaaatcggtaaaggtgcacttggagaaagagaccaaagaagaggggaagccactgcagcaggagaaagagaaggagaaagcgggaggagagggaggaagtgaggaggaagggagtgataaaggtgccaagggatccaggaaggaagacatagctgtcaatggggaggtagaaggaaaagaggaggtagagcaggagaccaaggaaaaaggcagtgggagggaagaggagaaaggcgttgtcaccaatggcctagacttgagcccagcagatgaaaagaaggggggtgataaaagtgaggagaaagtggtggtgaccaaaacggtagaaaaaatcaccagtgaggggggagatggtgctaccaaatacatcactaaatctgtaaccgtcactcaaaaggttgaagagcatgaagagacctttgaggagaaactagtgtctactaaaaaggtagaaaaagtcacttcacacgccatagtaaaggaagtcacccagagtgactaagatttgagtccattgcaaaaggttaagccatatgacaatttcaaaatgcatgtgattggcagcttcaaaacagaacgggttctcccatgggggctccagacattgtattttactttgtgcaatatgaggggactgcatgcaagctcagggtgctccctcctcagtctttgggggattcaaatgcatgatattgtatgtacctgggaaatttgccgatttcctaagctgttggaagggggtcacttaaggggggatgtcttgagatgtattatgcaaagtaccaactgagccaaaaacaataaacgaaacacagaactcagccttaagaaagctatatatgaataattatgtttacctcactggtgcatttaaaatggacttttgttcatgggagaacctcgttgacatgcacagtttgcaatcttatgttgatcgatgttaaacgtcacagcagtacttgctcaataaaggtcatattggaaacatagtcaa

SEQ ID NO: 13694 - DNA, 3148 bp, Homo sapiens
  source 1..3148: mol_type = unassigned DNA
gtgacagccacacgccccaaggcctccaagatgagctacacgttggactcgctgggcaacccgtccgcctaccggcgggtaaccgagacccgctcgagcttcagccgcgtcagcggctccccgtccagtggcttccgctcgcagtcgtggtcccgcggctcgcccagcaccgtgtcctcctcctataagcgcagcatgctcgccccgcgcctcgcttacagctcggccatgctcagctccgccgagagcagccttgacttcagccagtcctcgtccctgctcaacggcggctccggacccggcggcgactacaagctgtcccgctccaacgagaaggagcagctgcaggggctgaacgaccgctttgccggctacatagagaaggtgcactacctggagcagcagaataaggagattgaggcggagatccaggcgctgcggcagaagcaggcctcgcacgcccagctgggcgacgcgtacgaccaggagatccgcgagctgcgcgccaccctggagatggtgaaccacgagaaggctcaggtgcagctggactcggaccacctggaggaagacatccaccggctcaaggagcgctttgaggaggaggcgcggttgcgcgacgacactgaggcggccatccgcgcgctgcgcaaagacatcgaggaggcgtcgctggtcaaggtggagctggacaagaaggtgcagtcgctgcaggatgaggtggccttcctgcggagcaaccacgaggaggaggtggccgaccttctggcccagatccaggcatcgcacatcacggtggagcgcaaagactacctgaagacagacatctcgacggcgctgaaggaaatccgctcccagctcgaaagccactcagaccagaatatgcaccaggccgaagagtggttcaaatgccgctacgccaagctcaccgaggcggccgagcagaacaaggaggccatccgctccgccaaggaagagatcgccgagtaccggcgccagctgcagtccaagagcatcgagctagagtcggtgcgcggcaccaaggagtccctggagcggcagctcagcgacatcgaggagcgccacaaccacgacctcagcagctaccaggacaccatccagcagctggaaaatgagcttcggggcacaaagtgggaaatggctcgtcatttgcgcgaataccaggacctcctcaacgtcaagatggctctggatatagaaatcgctgcgtacagaaaactcctggagggtgaagagactagatttagcacatttgcaggaagcatcactgggccactgtatacacaccgacccccaatcacaatatccagtaagattcagaaacccaaggtggaagctcccaagcttaaggtccaacacaaatttgtcgaggagatcatagaggaaaccaaagtggaggatgagaagtcagaaatggaagaggccctgacagccattacagaggaattggccgtttccatgaaggaagagaagaaagaagcagcagaagaaaaggaagaggaacccgaagctgaagaagaagaagtagctgccaaaaagtctccagtgaaagcaactgcacctgaagttaaagaagaggaaggggaaaaggaggaagaagaaggccaggaagaagaggaggaagaagatgagggagctaagtcagaccaagccgaagagggaggatccgagaaggaaggctctagtgaaaaagaggaaggtgagcaggaagaaggagaaacagaagctgaagctgaaggagaggaagccgaagctaaagaggaaaagaaagtggaggaaaagagtgaggaagtggctaccaaggaggagctggtggcagatgccaaggtggaaaagccagaaaaagccaagtctcctgtgccaaaatcaccagtggaagagaaaggcaagtctcctgtgtcaaaatcaccagtggaagagaaagccaaatctcctgtgccaaaatcaccagtggaagaggcaaagtcaaaagcagaagtggggaaaggtgaacagaaagaggaagaagaaaaggaagtcaaggaagctcccaaggaagagaaggtagagaaaaaggaagagaaaccaaaggatgtgccagagaagaagaaagctgagtcccctgtaaaggaggaagctgtggcagaggtggtcaccatcaccaaatcggtaaaggtgcacttggagaaagagaccaaagaagaggggaagccactgcagcaggagaaagagaaggagaaagcgggaggagagggaggaagtgaggaggaagggagtgataaaggtgccaagggatccaggaaggaagacatagctgtcaatggggaggtagaaggaaaagaggaggtagagcaggagaccaaggaaaaaggcagtgggagggaagaggagaaaggcgttgtcaccaatggcctagacttgagcccagcagatgaaaagaaggggggtgataaaagtgaggagaaagtggtggtgaccaaaacggtagaaaaaatcaccagtgaggggggagatggtgctaccaaatacatcactaaatctgtaaccgtcactcaaaaggttgaagagcatgaagagacctttgaggagaaactagtgtctactaaaaaggtagaaaaagtcacttcacacgccatagtaaaggaagtcacccagagtgactaagatttgagtccattgcaaaaggttaagccatatgacaatttcaaaatgcatgtgattggcagcttcaaaacagaacgggttctcccatgggggctccagacattgtattttactttgtgcaatatgaggggactgcatgcaagctcagggtgctccctcctcagtctttgggggattcaaatgcatgatattgtatgtacctgggaaatttgccgatttcctaagctgttggaagggggtcacttaaggggggatgtcttgagatgtattatgcaaagtaccaactgagccaaaaacaataaacgaaacacagaactcagccttaagaaagctatatatgaataattatgtttacctcactggtgcatttaaaatggacttttgttcatgggagaacctcgttgacatgcacagtttgcaatcttatgttgatcgatgttaaacgtcacagcagtacttgctcaataaaggtcatattggaaac

SEQ ID NO: 13695 - DNA, 12811 bp, Homo sapiens
  source 1..12811: mol_type = unassigned DNA
gaagaggaggaggggaggcaaaaacaccgaaaaacaaaaagagagaaacaacacccaacaactggggtggggggaagaaagaaagaaaagaaacccacccacccaccaaaaaaaaaaaaaaaaaaaaaaaaaaaaaaaaatcctgtggcgcgccgcctggttcccgggaagactcgccagcaccagggggtgggggagtgcgagctgaaagctgctggagagtgagcagccctagcagggatggacatgatgctgttggtgcagggtgcttgttgctcgaaccagtggctggcggcggtgctcctcagcctgtgctgcctgctaccctcctgcctcccggctggacagagtgtggacttcccctgggcggccgtggacaacatgatggtcagaaaaggggacacggcggtgcttaggtgttatttggaagatggagcttcaaagggtgcctggctgaaccggtcaagtattatttttgcgggaggtgataagtggtcagtggatcctcgagtttcaatttcaacattgaataaaagggactacagcctccagatacagaatgtagatgtgacagatgatggcccatacacgtgttctgttcagactcaacatacacccagaacaatgcaggtgcatctaactgtgcaagttcctcctaagatatatgacatctcaaatgatatgaccgtcaatgaaggaaccaacgtcactcttacttgtttggccactgggaaaccagagccttccatttcttggcgacacatctccccatcagcaaaaccatttgaaaatggacaatatttggacatttatggaattacaagggaccaggctggggaatatgaatgcagtgcggaaaatgatgtgtcattcccagatgtgaggaaagtaaaagttgttgtcaactttgctcctactattcaggaaattaaatctggcaccgtgacccccggacgcagtggcctgataagatgtgaaggtgcaggtgtgccgcctccagcctttgaatggtacaaaggagagaagaagctcttcaatggccaacaaggaattattattcaaaattttagcacaagatccattctcactgttaccaacgtgacacaggagcacttcggcaattatacctgtgtggctgccaacaagctaggcacaaccaatgcgagcctgcctcttaaccctccaagtacagcccagtatggaattaccgggagcgctgatgttcttttctcctgctggtaccttgtgttgacactgtcctctttcaccagcatattctacctgaagaatgccattctacaataaattcaaagacccataaaaggcttttaaggattctctgaaagtgctgatggctggatccaatctggtacagtttgttaaaagcagcgtgggatataatcagcagtgcttacatggggatgatcgccttctgtagaattgctcattatgtaaatactttaattctactcttttttgattagctacattaccttgtgaagcagtacacattgtcctttttttaagacgtgaaagctctgaaattacttttagaggatattaattgtgatttcatgtttgtaatctacaacttttcaaaagcattcagtcatggtctgctaggttgcaggctgtagtttacaaaaacgaatattgcagtgaatatgtgattctttaaggctgcaatacaagcattcagttccctgtttcaataagagtcaatccacatttacaaagatgcatttttttcttttttgataaaaaagcaaataatattgccttcagattatttcttcaaaatataacacatatctagatttttctgctcgcatgatattcaggtttcaggaatgagccttgtaatataactggctgtgcagctctgcttctctttcctgtaagttcagcatgggtgtgccttcatacaataatatttttctctttgtctccaactaatataaaatgttttgctaaatcttacaatttgaaagtaaaaataaaccagagtgatcaagttaaaccatacactatctctaagtaacgaaggagctattggactgtaaaaatctcttcctgcactgacaatggggtttgagaattttgccccacactaactcagttcttgtgatgagagacaatttaataacagtatagtaaatataccatatgatttctttagttgtagctaaatgttagatccaccgtgggaaatcattccctttaaaatgacagcacagtccactcaaaggattgcctagcaatacagcatcttttcctttcactagtccaagccaaaaattttaagatgatttgtcagaaagggcacaaagtcctatcacctaatattacaagagttggtaagcgctcatcattaattttattttgtggcagctaagttagtatgacagaggcagtgctcctgtggacaggagcattttgcatattttccatctgaaagtatcactcagttgatagtctggaatgcatgttatatattttaaaacttccaaaatatattataacaaacattctatatcggtatgtagcagaccaatctctaaaatagctaattcttcaataaaatctttctatatagccatttcagtgcaaacaagtaaaatcaaaaaagaccatcctttatttttccttacatgatatatgtaagatgcgatcaaataaagacaaaacaccagtgatgagaatatcttaagataagtaattatcaaattattgtgaatgttaaattatttctactataaagaagcaaaactacatttttgaaggaaaatgctgttactctaacattaatttacaggaatagtttgatggtttcactctttactaaagaaaggccatcaccttgaaagccattttacaggtttgatgaagttaccaatttcagtacacctaaatttctacaaatagtccccttttacaagttgtaacaacaaagaccctataataaaattagatacaagaaattttgcagtggttatacatatttgagatatctagtatgttgccctagcagggatggcttaaaaactgtgattttttttcttcaagtaaaacttagtcccaaagtacatcataaatcaattttaattagaaaaatgaatcttaaatgaggggacataagtatactctttccacaaaatggcaataataaggcataaagctagtaaatctactaactgtaataaatgtatgacattattttgattgatacattaaaaaagagtttttagaacaaatatggcatttaactttattatttatttgcttttaagaaatattctttgtggaattgttgaataaactataaaatattattttgtattgcagctttaaagtggcacactccataataatctacttactagaaatagtggtgctaccacaaaaaatgttaaccatcagtaccattgtttgggagaaagaaacagatcaagaatgcatattattcagtgaccgctttcctagagttaaaatacctcctctttgtaaggtttgtaggtaaattgaggtataaactatggatgaaccaaataattagttcaaagtgttgtcatgattccaaatttgtggagtctggtgtttttaccatagaatgtgacagaagtacagtcatagctcagtagctatatgtatttgcctttatgttagaagagactttcttgagtgacatttttaaatagaggaggtattcactatgtttttctgtatcacagcagcattcctagtccttaggccctcggacagagtgaaatcatgagtatttatgagttcaatattgtcaaataaggctacagtatttgcttttttgtgtgaatgtattgcatataatgttcaagtagatgattttacatttatggacatataaaatgtctgattaccccattttatcagtcctgactgtacaagattgttgcaatttcagaatagcagttttataaattgatttatcttttaatctataacaatttgtgttagctgttcatttcaggattatattttctacaagttccacttgtgggactccttttgttgcccctatttttttttaaagaaggaagaaagaaaaataagtagcagtttaaaaatgagaatggagagaaaagaaaaagaatgaaaaggaaaggcagtaaagagggaaaaaaaggaaggatggaaggaatgaaggaaggaagggaggaaggggagaaggtaggaagaaagaaaggatgagagggaaggaagaatcagagtattagggtagttaacttacacatttgcattcttagtttaactgcaagtggtgtaactacgtttttcaatgatcgcatttgaaacataagtcctattataccattaagttcctattatgcagcaattatataataaaaagtactgcccaagttatagtaatgtgggtgtttttgagacactaaaagatttgagagggagaatttcaaacttaaagccacttttggggggtttataacttaactgaaaaattaatgcttcatcataacatttaagctatatctagaaagtagactggagaactgagaaaattacccaggtaattcagggaaaaaaaaaaatatatatatatataaatacccctacatttgaagtcagaaaactctgaaaaactgaattatcaaagtcaatcatctataatgatcaaatttactgaacaattgttaatttatccattgtgcttagctttgtgacacagccaaaagttacctatttaatcttttcaataaaaattgttttttgaaatccagaaatgatttaaaaagaggtcaggtttttaactatttattgaagtatgtggatgtacagtatttcaatagatatgaatatgaataaatggtatgccttaagattctttgaatatgtatttactttaaagactggaaaaagctcttcctgtcttttagtaaaacatccatatttcataacctgatgtaaaatatgttgtactgtttccaataggtgaatataaactcagtttatcaattaaaatatgtatttgactcattttaaaactctattagcttaagagaaagaaggaagaaataataatttgaagatatttctgctattctctttatttcctgtattacactcatctttctgcttactctaaagcagtacagggtaaaaattctagatgctacagtttcaaatgactccacactatattctttcttgctgttgctgattcctaaaaggtttgatgagctgaactacatctaaactaaaaataaattttctggaaacattttattattaattatttagaacctttacctggtaaaatacagcagagttagcaacagagactaaatatcctgttgataaaatcctgatgatcttacaggctaaacaactgaaaactcaaacgcttgtaagagccaggcagagtgtaatttcttaacagctgggtataaaacaacgggcacctgaaggtattcagatacaatttccttaaaaataccttggtttccaagcaaaacacgttatttggctgagaacctttagtttgtaaataccaaaccataatatacaaatgagatctcaagccaaatgaattttttaagccctctttcccatatctgttcatctatgatagtcaactgaataaatgagaacaatgtgatagataaaacaacaaagcataaaaaagattcatgcttggttttataagctattttgaaatataagtatcattgctattctgagaaatctatatacaccaaagccctccctccacaaaaaaactggaaatgttctaataaatgtctgatttcccccacagcttcattatttcttcccttttcaacatctatcttatctatcttgcataaattacatcacagaaacagaaacatcaagtatcagacatggaaaaccagcacatgaaacagagctagtttccctctcaaaagaatagggcaaaacatagatgcttcaaaatcatatcttggtatacagaaaataattattcactttaacctgacagtcagaaatgtaagtaagaatttgtagagataattttccaaggtaattcattcaagttagtggaatttgatccaaacacccgtcaatgtactccctctgaactttccaagaatcatacaccttcacatttacattcactgtttttctagtaattccaaacttactcaaaagtatttcagaattgatatcactggtggaaagagagcaatttagcaaacaaatacatgctttccggtattcctagagaaaaggaaaagaggaatacgtttcattcttctccctagaagctctacccacagtcatcctaaagctagaccaatctctcccagggctttccttcagtctaagaaacatgcttcatttcagagacaattgtggcaactatagttttccccaaagggtcacaactacctctcctttgcattttacaatggagcacttttgcaagtgttgctattgtggctttctcaacactttcaaatacttaaaggagaaaatattactattgtcatgtattgatggtgaaaacgagattcagaaattttgagtcacttgctgaagattatacttcaactaagtggcagatctgagccaaatatgcaatgaaaaatgttcccaatttgtttccagtcccagactacctaggaaaaagaaaagcatataatcacattgctagcttcatagacaactatttgcatatttttatttatatatttatataaatataagcacattttaaatataaatatagatatttatgacatccttgtattttccaatacctgcagagggtatgagatttaaaggctaatcagattgtacatgtcatctaaaactttggaaacgtgaaactcacagtacagttgcctttggacacacagccttgggttgtatgagactggtcacaccaagtggagaatcttgtcataatcgcatgtatcttctttttgtatagcattttgcaaaaaatgtgtcaagtttgggataatccactaagactattcctcagacatctgcaatcaacagaattttgggggaaatggagatcagaatacatacacacttttaaaaaaattcacaatactgattttaatctgagtgatgttgtttgaggccatttatattgaaatactaacatgaacatctgtttgtgctgggacagtagaacaagagaaagattctaattctagaaattaaatgatatgcaacctaagaaatacatttgtactttgttttcaaaatatgaatataatacaaatcctatggatatcaccacttagtttgaaaaacataaaaagtgtgattttcatacacttatgaaatgaataaattaattcattaatgaaggacctgataagacattacaaccagataaaaggataatttaaagaacatacacatttatagatcaaaaaccttgaaattaatgtactaatagaggcaaaactggcttccagagtgaggaggagaattcaattgaatctttacccctcagaatttatttccatatctgtagacgagaaatattttgccttagtattatttatttacaacttgaaaaagagttcaaatataatgaaaaatacagaggctccaaaagaatcagaatcaggtaacctgtaaaagtgtgttccaagtaattagtggtttttcatttcagcaaaaattcttctctgcaatgaagagacataatttttttttctttttcagagttttgctcggttgccctggatggagtgcagtggtgtgatcttggctcactgcaacctccgcctcctgggttcaagcgattctcctgcatcagcctccccagtagctgggattataggcacgtgccaccacacctggctaagttttgtatttttagtagaggtggggtttcaccatgttggccagtctggtctagaactcctgacctcaagtgatccacttccctcggcctcctaaagtgctgggattacaggcgtgagccaccgctcccagacgagatgtaaaatttttaaagccattgaattaaattcattgctaacattttgagctttgataatgtaatgcctactttaatgacccaaaaaaaaaaaaacccaagtaacctatctatctaataatctatgttttttaattactccttttcttccttatctcacaaaccataatccaatagtctaggacatgtgaaagagaaagtaaacagtcacaagaactaccttgcttcgagaatccaccttgttgaaaaaataatatattttgggcacttgttaaaaagaattaacagaaaaagtctttttttttttgtcacaggggcatttaattcatggtataacaggaattttatatcaaaaacagtaagaaaaatgaagtaacagttgagatagcaataattcatcaaccaaatactatgataatgataaaaacattgcaagaagctatagccagaactgagtgttctgctcctacttagtgctaatgagcccagtcctagcacacatcttggtttggtagaaactacaggaggtagcatggttcattacaccttcaaaactttaaaatgttaaagagggtggtttccctccttcatttcaaatggattgctaaaagcactgggctattccttggtggaaatttgaatttgccagtttcttcatcaattttgactttttacattcaaaaaggagttaactttacactaagtcacagcagacttagacctcccgcagttctgaattgtgcttaaacaagtattcaagcacatggggatttctcaagaaaatttggggaccatatcttagaaaaaaaacttacaaaatattcgttgaagactataatatgctaaagctaaggaacaaaattctcttgattgttctaaaaatacctagtaagagccacagaactcttccatagttttctaagtagtttcataagtgtggattgtggttgccctgaaacttgacatctccctaccaagtacttgacaagtgacctggcaaaaatgtgttcaatagctcatttttgacatactccttaagaaatcattgccagagatttgaaactgcttcaagctgatgtctttttcaaaacaaaacacatactcacacacaaatacaaaatcgcattgctatcagtgatctggaaaataagcttgcaagctggccatgtggtgttctgaataatttttttaaagtagaagaagaaatgacaacagtgcaaccaacagtttctgtttaagttttatttgctaagacgttagcataaggaacatcttgtgatttaattaatcagaagatggcacctgctgtaaatactgacatggagaaaagcagatttttaaaaaaatttggaataaattaatttcttgtaatacatttttcttgttgataaacaactaaattatgctttgaaatgtgttactgtctaataactttaaatgttgacaaggagaaagactgggtttttttttttacatttgaataagcaatttttttctggaaacatatatatttctaatttatagataaactagtatgtgtgttcagaattcctgctctctcattattcaggtttcaaaatgtattaacaaagcttttatggttttataatagacaattagatatctttcatcaggtaatgtaagaacttgtatagtggtatattagtcagttttcacactgctgataaagatatacccgagacagggcaatatgcaaaagaaagaggtttttttggacctacagttccatgtggctggggaagcctcacaatcacagtggaaggtgaaaggcacgtctcatatggcagcagacaagagaaaagagcttgtgcagataaactcccccttataaaaccatcagatctcatgagacccattcactatcacaagaacagcatgggaaagacctgctcccatgattcaattacctcccaccaagtccctcccacaatccgtgggaattccaaatgagacttgggtggggacacagccaaaccatatcattccacccctggtccctcccaaatctcatgtcctcacatttcaaaaccaatcatgctttcccaacagtccctcaaagtcttaactcatttcagcactatctcaaaagtccacagtctaaagtctcatctgagacaaggcaagtctcttctgcctatgagcagccagtaaaatcaaaagcaagttagttacttcctagatgcaatggaagtacaggcattgggtaagcatagccattccaagtggaagaaattggccagaacaaagggactacaggggcggtcaagtcttaaagctccaaaatgatctcctttgactccatttctcacatccaggtcatgctgatgcaagaggtgggctcccatggccttaggcagctccgcctctgcagctttgcagggtatagccctcctcctggctgctttcaccagctggcattgagtgtctgtgccttttccaggtgcatggtgcaagctgttagtggatttatgattctgggatctggaggacagtggcccacttctcacagctccactacgtggtgtcccagtagggactctgtgtggggctcactccacattttccttctgcactgccctagcagaggttctccatgaggagaacttcattctgggcatccaggcatttctatacatcctctgaaatttaggtggtggtttccaagcctcaatttttgacttccatgcacccacaggctcaacaccatgtggaagctgccaaggcttggggcttccactgtctgaagcaacagcccaagctgtaccttggcttcatttaaatcatcctgggagcaactgggaggcagagcaccaagttcctagactgcacatagcagagggaccctgggccaggcccacaaaaccatttttttcctccaaaacctaggggcctgtgatggcaggggctgctgcaaaggtctctgacgtgccctggagacatattccccactgtcttggtgacattcagctcctcattacttatgcaattttctgcagccagcttgaatttctcctcaggaaatgggattttcttttctatcacattttcagtctgtaaatttttcaaacttttatactgtttcccttttaaaactgaatgccagccaggtgcactggctcatgcttgtaatctcagcactttgggagtctgagacaggcagatcacctgaggtcacgaatttgagaccaacctggccaacatgataaaaccccaactctactaaaaatataaaaattagtgaggcatggtggcacatgcctgtaatctcaactgcttgggaggctgaagcagaagaattgcttgaacccaggaggcagaggttgcagtgagctgagatcatgccactgcactcctgcctgggtgacaaagtgagactctgtctcaaaaacaaaacaaaacagaacagaacactgaatgcctttaacaacacccaagtcacctgttgaatgctttgctgcttagaaatttcttcctccaaatatcctaaatcacctctctcaacttcaaagttctacacatctctagggcaagggcaaaatgctacccatctctttgctaaaacataacaagagtcacctttgctccagttcccaacaagttattcatttccatctgagaccacctcagcctggattttattgtccatatcattatcagcattttggtcaaaaccattcaacaagtctctaggaagttccaaactttcccacattttcctgtcttcttctgagccctccaaactattccaacccctgcctgttacccagttccaaagtcacttccacattttcaggtatcttttcagcagcactccactcctgatactaatttactatattagtcagttttcacactgctgataaagacatacctgaggctgggcaatttacaaaagaaagaggtttatcagacttacagttccacgtggctggggaggcctcacaatcatggtggaaggtgaaaggcacatctcacatggcagcagagaagagaagagaacttgtgaaggaaaactcccgcttataaaaccatcagatctcatgagacttactcactgtcatgagaacagcatgggaaagacctgcccccatggttcaattacctcccaccaagtccctctcacaatatgtgggaattcaaaatgagatttgtgtggggacatggccaaacaatatcaaatggttttgatttttatgttgaggcacattctcaagctagtatcatttcaagaagaacctgttatttgttgattttggaaattttaaaaatcagatttaatttacactgaaaagtggttgaccttaacgtttctcagataacctgaaatgttcatgtggcattcattcattcattaatccatccacttatttgacaataaaatatgatttaggtgacctctgaagagctgtctaaaaagaattacctggtagagttaatctggatgtttaggacactatgatcaaactgaagaaaaaggcacccatttctctaatcctttctttgggaagctgatttcactttaaactgaaagtgagaaaggaaaaggaagaagaaaagaaacagagggtaaaagaagagaaagaggaagggaaagaaagagattaatgtatattttctcctaagaaaggctcttttgtgtgtgtcggtgtgtgtgtgcatgtgtgtttcctgttgcctggatctatcataaaaagcaatgtcttctctggaatggggcttcagtttccacatttacaattagtacatattacaattagtgatatgaataaaggctgttatcctacattt

SEQ ID NO: 13696 - DNA, 5577 bp, Homo sapiens
  source 1..5577: mol_type = unassigned DNA
gccatgtgaggacacagagagaaggcagccatctgcaagccaggaatagagccctcaccagagacctaatttgccagcatcttgatcatgtacttccagcctccagaactgtgagaaaatgcatttctgttgttaagccacccaatctgtggattttgttatggaagcccgagcaaactaatacaggtgttatttggaagatggagcttcaaagggtgcctggctgaaccggtcaagtattatttttgcgggaggtgataagtggtcagtggatcctcgagtttcaatttcaacattgaataaaagggactacagcctccagatacagaatgtagatgtgacagatgatggcccatacacgtgttctgttcagactcaacatacacccagaacaatgcaggtgcatctaactgtgcaagttcctcctaagatatatgacatctcaaatgatatgaccgtcaatgaaggaaccaacgtcactcttacttgtttggccactgggaaaccagagccttccatttcttggcgacacatctccccatcagcaaaaccatttgaaaatggacaatatttggacatttatggaattacaagggaccaggctggggaatatgaatgcagtgcggaaaatgatgtgtcattcccagatgtgaggaaagtaaaagttgttgtcaactttgctcctactattcaggaaattaaatctggcaccgtgacccccggacgcagtggcctgataagatgtgaaggtgcaggtgtgccgcctccagcctttgaatggtacaaaggagagaagaagctcttcaatggccaacaaggaattattattcaaaattttagcacaagatccattctcactgttaccaacgtgacacaggagcacttcggcaattatacctgtgtggctgccaacaagctaggcacaaccaatgcgagcctgcctcttaaccctccaagtacagcccagtatggaattaccgggagcgctgatgttcttttctcctgctggtaccttgtgttgacactgtcctctttcaccagcatattctacctgaagaatgccattctacaataaattcaaagacccataaaaggcttttaaggattctctgaaagtgctgatggctggatccaatctggtacagtttgttaaaagcagcgtgggatataatcagcagtgcttacatggggatgatcgccttctgtagaattgctcattatgtaaatactttaattctactcttttttgattagctacattaccttgtgaagcagtacacattgtcctttttttaagacgtgaaagctctgaaattacttttagaggatattaattgtgatttcatgtttgtaatctacaacttttcaaaagcattcagtcatggtctgctaggttgcaggctgtagtttacaaaaacgaatattgcagtgaatatgtgattctttaaggctgcaatacaagcattcagttccctgtttcaataagagtcaatccacatttacaaagatgcatttttttcttttttgataaaaaagcaaataatattgccttcagattatttcttcaaaatataacacatatctagatttttctgctcgcatgatattcaggtttcaggaatgagccttgtaatataactggctgtgcagctctgcttctctttcctgtaagttcagcatgggtgtgccttcatacaataatatttttctctttgtctccaactaatataaaatgttttgctaaatcttacaatttgaaagtaaaaataaaccagagtgatcaagttaaaccatacactatctctaagtaacgaaggagctattggactgtaaaaatctcttcctgcactgacaatggggtttgagaattttgccccacactaactcagttcttgtgatgagagacaatttaataacagtatagtaaatataccatatgatttctttagttgtagctaaatgttagatccaccgtgggaaatcattccctttaaaatgacagcacagtccactcaaaggattgcctagcaatacagcatcttttcctttcactagtccaagccaaaaattttaagatgatttgtcagaaagggcacaaagtcctatcacctaatattacaagagttggtaagcgctcatcattaattttattttgtggcagctaagttagtatgacagaggcagtgctcctgtggacaggagcattttgcatattttccatctgaaagtatcactcagttgatagtctggaatgcatgttatatattttaaaacttccaaaatatattataacaaacattctatatcggtatgtagcagaccaatctctaaaatagctaattcttcaataaaatctttctatatagccatttcagtgcaaacaagtaaaatcaaaaaagaccatcctttatttttccttacatgatatatgtaagatgcgatcaaataaagacaaaacaccagtgatgagaatatcttaagataagtaattatcaaattattgtgaatgttaaattatttctactataaagaagcaaaactacatttttgaaggaaaatgctgttactctaacattaatttacaggaatagtttgatggtttcactctttactaaagaaaggccatcaccttgaaagccattttacaggtttgatgaagttaccaatttcagtacacctaaatttctacaaatagtccccttttacaagttgtaacaacaaagaccctataataaaattagatacaagaaattttgcagtggttatacatatttgagatatctagtatgttgccctagcagggatggcttaaaaactgtgattttttttcttcaagtaaaacttagtcccaaagtacatcataaatcaattttaattagaaaaatgaatcttaaatgaggggacataagtatactctttccacaaaatggcaataataaggcataaagctagtaaatctactaactgtaataaatgtatgacattattttgattgatacattaaaaaagagtttttagaacaaatatggcatttaactttattatttatttgcttttaagaaatattctttgtggaattgttgaataaactataaaatattattttgtattgcagctttaaagtggcacactccataataatctacttactagaaatagtggtgctaccacaaaaaatgttaaccatcagtaccattgtttgggagaaagaaacagatcaagaatgcatattattcagtgaccgctttcctagagttaaaatacctcctctttgtaaggtttgtaggtaaattgaggtataaactatggatgaaccaaataattagttcaaagtgttgtcatgattccaaatttgtggagtctggtgtttttaccatagaatgtgacagaagtacagtcatagctcagtagctatatgtatttgcctttatgttagaagagactttcttgagtgacatttttaaatagaggaggtattcactatgtttttctgtatcacagcagcattcctagtccttaggccctcggacagagtgaaatcatgagtatttatgagttcaatattgtcaaataaggctacagtatttgcttttttgtgtgaatgtattgcatataatgttcaagtagatgattttacatttatggacatataaaatgtctgattaccccattttatcagtcctgactgtacaagattgttgcaatttcagaatagcagttttataaattgatttatcttttaatctataacaatttgtgttagctgttcatttcaggattatattttctacaagttccacttgtgggactccttttgttgcccctatttttttttaaagaaggaagaaagaaaaataagtagcagtttaaaaatgagaatggagagaaaagaaaaagaatgaaaaggaaaggcagtaaagagggaaaaaaaggaaggatggaaggaatgaaggaaggaagggaggaaggggagaaggtaggaagaaagaaaggatgagagggaaggaagaatcagagtattagggtagttaacttacacatttgcattcttagtttaactgcaagtggtgtaactacgtttttcaatgatcgcatttgaaacataagtcctattataccattaagttcctattatgcagcaattatataataaaaagtactgcccaagttatagtaatgtgggtgtttttgagacactaaaagatttgagagggagaatttcaaacttaaagccacttttggggggtttataacttaactgaaaaattaatgcttcatcataacatttaagctatatctagaaagtagactggagaactgagaaaattacccaggtaattcagggaaaaaaaaaaatatatatatatataaatacccctacatttgaagtcagaaaactctgaaaaactgaattatcaaagtcaatcatctataatgatcaaatttactgaacaattgttaatttatccattgtgcttagctttgtgacacagccaaaagttacctatttaatcttttcaataaaaattgttttttgaaatccagaaatgatttaaaaagaggtcaggtttttaactatttattgaagtatgtggatgtacagtatttcaatagatatgaatatgaataaatggtatgccttaagattctttgaatatgtatttactttaaagactggaaaaagctcttcctgtcttttagtaaaacatccatatttcataacctgatgtaaaatatgttgtactgtttccaataggtgaatataaactcagtttatcaattaaaatatgtatttgactcattttaaaactctattagcttaagagaaagaaggaagaaataataatttgaagatatttctgctattctctttatttcctgtattacactcatctttctgcttactctaaagcagtacagggtaaaaattctagatgctacagtttcaaatgactccacactatattctttcttgctgttgctgattcctaaaaggtttgatgagctgaactacatctaaactaaaaataaattttctggaaacattttattattaattatttagaacctttacctggtaaaatacagcagagttagcaacagagactaaatatcctgttgataaaatcctgatgatcttacaggctaaacaactgaaaactcaaacgcttgtaagagccaggcagagtgtaatttcttaacagctgggtataaaacaacgggcacctgaaggtattcagatacaatttccttaaaaataccttggtttccaagcaaaacacgttatttggctgagaacctttagtttgtaaataccaaaccataatatacaaatgagatctcaagccaaatgaattttttaagccctctttcccatatctgttcatctatgatagtcaactgaataaatgagaacaatgtgatagataaaacaacaaagcataaaaaagattcatgcttggttttataagctattttgaaatataagtatcattgctattctgagaaatctatatacaccaaagccctccctccacaaaaaaactggaaatgttctaataaatgtctgatttcccc

SEQ ID NO: 13697 - DNA, 192 bp, Homo sapiens
  source 1..192: mol_type = unassigned DNA
atataggcatatacagaaaaagagagaagaaagaccagtagaatgattaaaataagaaaacaagaatccctcagccagagtcccatccagaatctttaataaagcatggtaagctccaagtacagcccagtatggaattaccgggagcgctgatgttcttttctcctgctggtaccttgtgttgacactgtc

SEQ ID NO: 13698 - DNA, 428 bp, Homo sapiens
  source 1..428: mol_type = unassigned DNA
attggatattggacattatgttgttaagtgtttagattttgttttgttcccttaaagagtgttggattttttttaaacaggctcctgtatcacctgcaaattattttggtccattaaaccttgttattaagctttaaaggataggccaaaaagagtctttattctggcttttattcagccatacaactaaggcattagccttttggaatctccatcagtctctgcaaaaccatttgaaaatggacaatatttggacatttatggaattacaagggaccaggctggggaatatgaatgcagtgcggaaaatgatgtgtcattcccagatgtgaggaaagtaaaagttgttgtcaactgtaagtgtcatcaccttttatcaagataagttctgagaaaagataaaacaccttgaaaaattctgactgaaa

SEQ ID NO: 13699 - DNA, 726 bp, Homo sapiens
  source 1..726: mol_type = unassigned DNA
acagagagaaggcagccatctgcaagccaggaatagagccctcaccagagacctaatttgccagcatcttgatcatgtacttccagcctccagaactgtgagaaaatgcatttctgttgttaagccacccaatctgtggattttgttatggaagcccgagcaaactaatacaggtgttatttggaagatggagcttcaaagggtgcctggctgaaccggtcaagtattatttttgcgggaggtgataagtggtcagtggatcctcgagtttcaatttcaacattgaataaaagggactacagcctccagatacagaatgtagatgtgacagatgatggcccatacacgtgttctgttcagactcaacatacacccagaacaatgcaggtgcatctaactgtgcaagttcctcctaagatatatgacatctcaaatgatatgaccgtcaatgaaggaaccaacgtcactcttacttgtttggccactgggaaaccagagccttccatttcttggcgacacatctccccatcagcaaaaccatttgaaaatggacaatatttggacatttatggaattacaagggaccaggctggggaatatgaatgcagtgcggaaaatgatgtgtcattcccagatgtgaggaaagtaaaagttgttgtcaactgtaagtgtcatcaccttttatcaagataagttctgagaaaagataaaacaccttgaaaaatt

SEQ ID NO: 13700 - DNA, 2131 bp, Homo sapiens
  source 1..2131: mol_type = unassigned DNA
cggggcccaaggcaggggtggcgggtcagtgctgctcgggggcttctccatccaggtccctggagttcctggtccctggagctccgcacttggcggcgcaacctgcgtgaggcagcgcgactctggcgactggccggccatgccttcccgggctgaggactatgaagtgttgtacaccattggcacaggctcctacggccgctgccagaagatccggaggaagagtgatggcaagatattagtttggaaagaacttgactatggctccatgacagaagctgagaaacagatgcttgtttctgaagtgaatttgcttcgtgaactgaaacatccaaacatcgttcgttactatgatcggattattgaccggaccaatacaacactgtacattgtaatggaatattgtgaaggaggggatctggctagtgtaattacaaagggaaccaaggaaaggcaatacttagatgaagagtttgttcttcgagtgatgactcagttgactctggccctgaaggaatgccacagacgaagtgatggtggtcataccgtattgcatcgggatctgaaaccagccaatgttttcctggatggcaagcaaaacgtcaagcttggagactttgggctagctagaatattaaaccatgacacgagttttgcaaaaacatttgttggcacaccttattacatgtctcctgaacaaatgaatcgcatgtcctacaatgagaaatcagatatctggtcattgggctgcttgctgtatgagttatgtgcattaatgcctccatttacagcttttagccagaaagaactcgctgggaaaatcagagaaggcaaattcaggcgaattccataccgttactctgatgaattgaatgaaattattacgaggatgttaaacttaaaggattaccatcgaccttctgttgaagaaattcttgagaaccctttaatagcagatttggttgcagacgagcaaagaagaaatcttgagagaagagggcgacaattaggagagccagaaaaatcgcaggattccagccctgtattgagtgagctgaaactgaaggaaattcagttacaggagcgagagcgagctctcaaagcaagagaagaaagattggagcagaaagaacaggagctttgtgttcgtgagagactagcagaggacaaactggctagagcagaaaatctgttgaagaactacagcttgctaaaggaacggaagttcctgtctctggcaagtaatccagaacttcttaatcttccatcctcagtaattaagaagaaagttcatttcagtggggaaagtaaagagaacatcatgaggagtgagaattctgagagtcagctcacatctaagtccaagtgcaaggacctgaagaaaaggcttcacgctgcccagctgcgggctcaagccctgtcagatattgagaaaaattaccaactgaaaagcagacagatcctgggcatgcgctagccaggtagagagacacagagctgtgtacaggatgtaatattaccaacctttaaagactgatattcaaatgctgtagtgttgaatacttggttccatgagccatgcctttctgtatagtacacatgatatttcggaattggttttactgttcttcagcaactattgtacaaaatgttcacatttaatttttctttcttcttttaagaacatattataaaaagaatactttcttggttgggcttttaatcctgtgtgtgattactagtaggaacatgagatgtgacattctaaatcttgggagaaaaaataatgttaggaaaaaaatatttatgcaggaagagtagcactcactgaatagttttaaatgactgagtggtatgcttacaattgtcatgtctagatttaaattttaagtctgagattttaaatgtttttgagcttagaaaacccagttagatgcaatttggtcattaataccatgacatcttgcttataaatattccattgctctgtagttcaaatctgttagctttgtgaaaattcatcactgtgatgtttgtattctttttttttttctgtttaacagaatatgagctgtctgtcatttacctacttctttcccactaaataaaagaattcttcagtttccctgta

SEQ ID NO: 13701 - DNA, 801 bp, Homo sapiens
  source 1..801: mol_type = unassigned DNA
gaacaaatgaatcgcatgtcctacaatgagaaatcagatatctggtcattgggctgcttgctgtatgagttatgtgcattaatgtaagtatgatgaagacagattcctagtctaagcttttagccagaaagaactcgctgggaaaatcagagaaggcaaattcaggcgaattccataccgttactctgatgaattgaatgaaattattacgaggatgttaaacttaaaggattaccatcgaccttctgttgaagaaattcttgagaaccctttaatagcagatttggttgcagacgagcaaagaagaaatcttgagagaagagggcgacaattaggagagccagaaaaatcgcaggattccagccctgtattgagtgagctgaaactgaaggaaattcagttacaggagcgagagcgagctctcaaagcaagagaagaaagattggagcagaaagaacaggagctttgtgttcgtgagagactagcagaggacaaactggctagagcagaaaatctgttgaagaactacagcttgctaaaggaacggaagttcctgtctctggcaagtaatccagtaattaagaagaaagttcatttcagtggggaaagtaaagagaacatcatgaggagtgagaattctgagagtcagctcacatctaagtccaagtgcaaggacctgaagaaaaggcttcacgctgcccagctgcgggctcaagccctgtcagatattgagaaaaattaccaactgaaaagcagacagatcctgggcatgcgctagccaggtagagagacacagagctg

SEQ ID NO: 13702 - DNA, 661 bp, Homo sapiens
  source 1..661: mol_type = unassigned DNA
gtggacccagaacctcatgagttaaaaccaccagtgaacttatttttccaagtttttaagacctagccataaaggagtcctttcttttgtcttggaaacacatttttgtccttttattttaactgctgtcttaggaggactattctgttatgcaatctgactataatactgagtattttttccccaggattaccatcgaccttctgttgaagaaattcttgagaaccctttaatagcagatttggttgcagacgagcaaagaagaaatcttgagagaagagggcgacaattaggagagccagaaaaatcgcaggattccagccctgtattgagtgagctgaaactgaaggaaattcagttacaggagcgagagcgagctctcaaagcaagagaagaaagattggagcagaaagaacaggagctttgtgttcgtgagagactagcagaggacaaactggctagagcagaaaatctgttgaagaactacagcttgctaaaggaacggaagttcctgtctctggcaagtaatccagaacttcttaatcttccatcctcagtaattaagaagaaagttcatttcagtggggaaagtaaagagaacatcatgaggagtgagaattctgagagtcagctcacatctaagtccaagtgcaaggacctg

SEQ ID NO: 13703 - DNA, 1865 bp, Homo sapiens
  source 1..1865: mol_type = unassigned DNA
ggagttcctggtccctggagctccgcacttggcggcgcaacctgcgtgaggcagcgcgactctggcgactggccggccatgccttcccgggctgaggactatgaagtgttgtacaccattggcacaggctcctacggccgctgccagaagatccggaggaagagtgatggcaagatattagtttggaaagaacttgactatggctccatgacagaagctgagaaacagatgcttgtttctgaagtgaatttgcttcgtgaactgaaacatccaaacatcgttcgttactatgatcggattattgaccggaccaatacaacactgtacattgtaatggaatattgtgaaggaggggatctggctagtgtaattacaaagggaaccaaggaaaggcaatacttagatgaagagtttgttcttcgagtgatgactcagttgactctggccctgaaggaatgccacagacgaagtgatggtggtcataccgtattgcatcgggatctgaaaccagccaatgttttcctggatggcaagcaaaacgtcaagcttggagactttgggctagctagaatattaaaccatgacacgagttttgcaaaaacatttgttggcacaccttattacatgtctcctgaacaaatgaatcgcatgtcctacaatgagaaatcagatatctggtcattgggctgcttgctgtatgagttatgtgcattaatgcctccatttacagcttttagccagaaagaactcgctgggaaaatcagagaaggcaaattcaggcgaattccataccgttactctgatgaattgaatgaaattattacgaggatgttaaacttaaaggattaccatcgaccttctgttgaagaaattcttgagaaccctttaatagcagatttggttgcagacgagcaaagaagaaatcttgagagaagagggcgacaattaggagagccagaaaaatcgcaggattccagccctgtattgagtgagctgaaactgaaggaaattcagttacaggagcgagagcgagctctcaaagcaagagaagaaagattggagcagaaagaacaggagctttgtgttcgtgagagactagcagaggacaaactggctagagcagaaaatctgttgaagaactacagcttgctaaaggaacggaagttcctgtctctggcaagtaatccaggtatgagaatcaacttggtcaacagaagctggtgctacaaatgaagaaatgtgcaccagtgttgctcccaaagtggcttaggtagcccttttcatttacaaatctcaaattttaagatggatttcattgaatatatgcatttcaatggaaacaaaattctgttatagcaatgatttatttcctgggttcatagacctgaggcaatgagtcatagaatttcatgtttgattttctttaccttatcaaactacatgtttagtaattgatacttatttttattatcattatttatttttttattttttttgagatggagtctcactctgtagcccaggctggagtgcagtggcacaatctcggctcactgcaagctctgcctcccgggttcacgccattcttctgcctcagcctcccaagtagctgggactacagacacccgccaccaagcccggctaatttttgtatttttagtagagacggggtttcaccgtgttagccaggatggtctcgatttcctgacctcgtgatccgcctgcctcggcctcccaatgtgctgggattacaggcatgagacaccgtgcccagccgatacttatttttaaaaattagggcatttacaaaactattgtatgtttcagatttcagagagataaactgcatttcaagtaaaaataaa

SEQ ID NO: 13704 - DNA, 1318 bp, Homo sapiens
  source 1..1318: mol_type = unassigned DNA
gcgacggttaaacggggcccaaggcaggggtggcgggtcagtgctgctcgggggcttctccatccaggtccctggagttcctggtccctggagctccgcacttggcggcgcaacctgcgtgaggcagcgcgactctggcgactggccggccatgccttcccgggctgaggactatgaagtgttgtacaccattggcacaggctcctacggccgctgccagaagatccggaggaagagtgatggcaagatattagtttggaaagaacttgactatggctccatgacagaagctgagaaacagatgcttgtttctgaagtgaatttgcttcgtgaactgaaacatccaaacatcgttcgttactatgatcggattattgaccggaccaatacaacactgtacattgtaatggaatattgtgaaggaggggatctggctagtgtaattacaaagggaaccaaggaaaggcaatacttagatgaagagtttgttcttcgagtgatgactcagttgactctggccctgaaggaatgccacagacgaagtgatggtggtcataccgtattgcatcgggatctgaaaccagccaatgttttcctggatggcaagcaaaacgtcaagcttggagactttgggctagctagaatattaaaccatgacacgagttttgcaaaaacatttgttggcacaccttattacatgtctcctgaacaaatgaatcgcatgtcctacaatgagaaatcagatatctggtcattgggctgcttgctgtatgagttatgtgcattaatgcctccatttacagcttttagccagaaagaactcgctgggaaaatcagagaaggcaaattcaggcgaattccataccgttactctgatgaattgaatgaaattattacgaggatgttaaacttaaaggattaccatcgaccttctgttgaagaaattcttgagaaccctttaatagcagatttggttgcagacgagcaaagaagaaatcttgagagaagagggcgacaattaggagagccagaaaaatcgcaggattccagccctgtattgagtgagctgaaactgaaggaaattcagttacaggagcgagagcgagctctcaaagcaagagaagaaagattggagcagaaagaacaggagctttgtgttcgtgagagactagcagaggacaaactggctagagcagaaaatctgttgaagaactacagcttgctaaaggaacggaagttcctgtctctggcaagtaatccagagtctcactttgttgcccaggctggaatgcagtggtgtgatcacagctcaatgtag

SEQ ID NO: 13705 - DNA, 6057 bp, Homo sapiens
  source 1..6057: mol_type = unassigned DNA
agcatgcgcagaactgctcccggcccggatcgctatggcagcggcgtcgtcgcgggccgggccccagcaatcccgcccgggcccggctgcctcaacagccgcccccactgccccctctcgggcatgaaccgagcttcttgttgccgcccgctgccctacccgccgctgccgccgcatcccgactctgggccagcgctgggaacatgcccctggccgcctactgctacctgcgggtcgtgggcaaggggagctatggagaggtgacgcttgtgaagcaccggcgggacggcaagcagtatgtcatcaaaaaactgaacctccgaaatgcctctagccgagagcggcgagctgctgaacaggaagcccagctcttgtctcagttgaagcatcccaacattgtcacctacaaggagtcatgggaaggaggagatggtctgctctacattgtcatgggcttctgtgaaggaggtgatttgtaccgaaagctcaaggagcagaaagggcagcttctgcctgagaatcaggtggtagagtggtttgtacagatcgccatggctttgcagtatttacatgaaaaacacatccttcatcgagatctgaaaactcaaaatgtcttcctaacaagaacaaacatcatcaaagtaggggacctaggaattgcccgagtgttagagaaccactgtgacatggctagcaccctcattggcacaccctactacatgagccctgaattgttctcaaacaaaccctacaactataagtctgatgtttgggctctaggatgctgtgtctatgaaatggccaccttgaagcatgctttcaatgcaaaagatatgaattctttagtttatcggattattgaaggaaagctgccaccaatgccaagagattacagcccagagctggcagaactgataagaacaatgctgagcaaaaggcctgaagaaaggccgtctgtgaggagcatcctgaggcagccttatataaagcggcaaatctccttctttttggaggccacaaagataaaaacctccaaaaataacattaaaaatggtgactctcaatccaagccttttgctacagtggtttctggagaggcagaatcaaatcatgaagtaatccacccccaaccactctcttctgagggctcccagacatatataatgggtgaaggcaaatgtttgtcccaggagaaacccagggcctctggtctcttgaagtcacctgccagtctgaaagcccatacctgcaaacaggacttgagcaataccacagaactagccacaatcagtagcgtaaatattgacatcttacctgcaaaagggagggattcagtgagtgatggctttgttcaggagaatcagccaagatatttggatgcctctaatgagttaggaggtatatgcagtatttctcaagtggaagaggagatgctgcaggacaacactaaatccagtgcccagcctgaaaacctgattcccatgtggtcctctgacattgtcactggggaaaagaatgaaccagtgaagcctctgcagcccctaatcaaagaacaaaagccaaaggaccagagtcttgccctgtcgcccaagctggagtgcagtggcacaatcttggctcacagcaacctccgcctcctgggttcaagtgattctccagcctcagcctcccgagtagctgggattacaggcgtgtgccaccacgcccaggatcaagttgctggtgaatgtattatagaaaaacagggcagaatccacccagatttacagccacacaactctgggtctgaaccttccctgtctcgacagcgacggcaaaagaggagagaacagactgagcacagaggggaaaagagacaggtccgcagagatctctttgctttccaagagtcgcctcctcgatttttgccttctcatcccattgttgggaaagtggatgtcacatcaacacaaaaagaggctgaaaaccaacgtagagtggtcactgggtctgtgagcagttcaaggagcagtgagatgtcatcatcaaaggatcgaccattatcagccagagagaggaggcgactaaagcagtcacaggaagaaatgtcctcttcaggcccttcagtgaggaaagcgtctctgagtgtagcagggccaggaaaaccccaggaagaagaccagcccttgcctgcccgacggctctcctctgactgcagcgtcactcaggaaaggaaacagattcattgtctgtctgaggatgagttaagttcttctacaagttcaactgataagtcagatggggattacggggaagggaaaggtcagacaaatgaaattaatgccttggtacaattgatgactcagaccctgaaactggattctaaagagagctgtgaagatgtcccggtagcaaacccagtgtcagaattcaaacttcatcggaaatatcgggacacactgatacttcatgggaaggttgcagaagaggcagaggaaatccattttaaagagctaccttcagctattatgccaggttctgaaaagatcaggagactagttgaagtcttgagaactgatgtaattcgtggcctgggagttcagcttttagagcaggtgtatgatcttttggaggaggaggatgaatttgatagagaggtacgtttgcgggagcacatgggtgaaaagtatacaacttacagtgtgaaagctcgccagttgaaattttttgaagaaaacatgaatttttgagcatttgtcctaatctgctgccagaattaaagacctatttttagaggattttggcttaaaaagcaagggcaaacagtcatttggaagccactcaccactgttttatatctcttttttatatctctttggcgtttccctacagaaaagaaattggacagaacagaataatatgaagcaggatcacaaaagaaaaaaaactttggctttcatattctctttgtgaggacaaatctgttgtttgtttgattactgtttactgagccttaatccaccaagtttatatttagaattttatttttttaaggtactaattaacttaaacacagagctataaaatgctggattgaaaattttatattgtaatgtagagataaaagcagtaggagaaacaaatgacataatatgtcgtcataattcctgctattgttaataaccttaaggagtagttgataaattataaaattttaaaaagtcaattcagttctagaaatagatttaaagaatatgaagttctatctagtacttgagcagctgtatttcttttctacacattgatggacttttaatattttattctcatttaatataaacctcatctagggtatatacaaattaaaactgagacacattggctttgtaaatcagtatgtttttacataatggttttgttagatttatttttccatcagtgaaaacatttcttaaacacaaatttcatttccatttaagcaatttgtaagcaaagtccaggtccatttagtttttggatatatttaatgtttgtctcctgaagtttgtcttcatgtactgtaagatattagttgtctttccatgttttaaatgtatgattatatagcacatattttattagttgtttaataagaggtaatacccatctaggaaagaaattttatgaagttaaatacaagtcttgaatagtacattttcacttctgtattcgagggactctaaaaataaatattgctccagaaatgttttcaggtgttttttttttgagacagagtttcactctgtcagtcaggctggagtgcagtggcatgatctcaactcactgcaacctccacttctggggctcaagtggtattcctgcctgagcctccctagtagctgagaccacaggcgtgtgccaccacacctggctagtttttgtattttttgtagagacagggttacaccacattgcccaggctgatctcagaactcctgggctcaagcaatccactcacctcagcctcccaaagtgccaggattacaggaatgagccactgtgcccagccctgttttcagtttctataactaaaaatatatctatctttgaaaattacacacacacacaaatactctaatgaaatgttccctttacagccacttaacaatttttttttttttttaagacacagtcttgctctgtcacccaggctgaagtgcagtggcccaatctcagatcactgcaagctccgcctcccaggttcactccattctcctacctcatcctctcgagtagctgggactacagttgcccgccaccatgcccggctaatttttttgtatttttttagtagagacagggtttcaccgtgttagccaggatggtctcaatctcctgacctcgtgatctgcccgcctcggcctcccaaagtgctgggattacaggcgtgagccaccgcgcccggcacacttaacagatttttatttagagtttactgtgtgccaggttctctgccaggagctggggatatagtggtgaataaaacaatacttcctgcccttttacagtgctcacagcctggtttctgataactcttattttcactttgaagggtttgctagaactcaacttgcaaaaccatcaagtcccaatgcccagttgggaacaaatctttggcaaacttggtatccttgagctattcacctttccgtgcatgttttggaaatccacatcgttctggagagtcatcagttttacttaatttttctaatgtattggtataaagtaggtattttattagaattaaaggaatctcacccatatcttttttttttttttttttttttgagacagggtcttgctctgtcacccagcctggagtgcagtgaggtgatcatagctcactgcagccttgacctcctgggcttaagtgatcctcccacctcagcccctcaagtagctaggaccacaggcatgcaccaccacacctggctaatttttaaaattttttgtggagaggaagtctgtgttgcccaggctggtctcaaactgcattcaagcagtcctcctgcatcggcctctgaaagtgctgggattataggcatgaaccaccacacctgacttcccccatactttcttattaattaccatactgtatatttttattttgtttaaacatcttttcttcccacttttatcgtttttacttgagtgcttaattcatcttcctaaattaatttaaaaactcatctttaagactgtgaattttcttccgaatatacctttggccacagttcagagactttgatgtgttactcttttggcattggttctaaaatgtcaatcattcttttttttttttttttgagatggagtcttcttgttgcccaggctggagtacagtggtgcgatcttggctcactgcagcctacgcctcctgggttcaagttcccctccctcagcctcccgagtagctgggattacaggcacacaccaccatgcctggctgattttcgttatttttagtagagatggagtttcaccatgttggccaggctggtcttgaactcctgacctcaggtgatctgcctgccttggcctccctaaatgctgggattacaggcttgaggcaccatgcctggcctaaagtgtcagtaattctgatttcggttttctcttttagaagttttgatttccacagacttacaaagctaaggaagttttatgtccttgctctggctacactgcagtgttactgaatatcacctgcacaacctttactgcttgcagttttttttttcctgttgctttgtacatgatccgttattcaaatggccttataggcattcaataaaggtgaaatgttaaatacaaaatcacttgtctattaaattttattcaaggttctatataagatctgataaatggaactttgtgatggaaatgttttatatggtagccactagtcacatatagctattgaacctttgaatcatggctagttttagagttttatattttaattttaattaaatagacgtgtctagtggcaccatattgtacaatgcagttctcattcaataaatcttaagtacttaa

SEQ ID NO: 13706 - DNA, 2576 bp, Homo sapiens
  source 1..2576: mol_type = unassigned DNA
gaactgctcccggcccggatcgctatggcagcggcgtcgtcgcgggccgggccccagcaatcccgcccgggcccggctgcctcaacagccgcccccactgccccctctcgggcatgaaccgagcttcttgttgccgcccgctgccctacccgccgctgccgccgcatcccgactctgggccagcgctgggaacatgcccctggccgcctactgctacctgcgggtcgtgggcaaggggagctatggagaggtgacgcttgtgaagcaccggcgggacggcaagcagtatgtcatcaaaaaactgaacctccgaaatgcctctagccgagagcggcgagctgctgaacaggaagcccagctcttgtctcagttgaagcatcccaacattgtcacctacaaggagtcatgggaaggaggagatggtctgctctacattgtcatgggcttctgtgaaggaggtgatttgtaccgaaagctcaaggagcagaaagggcagcttctgcctgagaatcaggtggtagagtggtttgtacagatcgccatggctttgcagtatttacatgaaaaacacatccttcatcgagatctgaaaactcaaaatgtcttcctaacaagaacaaacatcatcaaagtaggggacctaggaattgcccgagtgttagagaaccactgtgacatggctagcaccctcattggcacaccctactacatgagccctgaattgttctcaaacaaaccctacaactataagtctgatgtttgggctctaggatgctgtgtctatgaaatggccaccttgaagcatgctttcaatgcaaaagatatgaattctttagtttatcggattattgaaggaaagctgccaccaatgccaagagattacagcccagagctggcagaactgataagaacaatgctgagcaaaaggcctgaagaaaggccgtctgtgaggagcatcctgaggcagccttatataaagcggcaaatctccttctttttggaggccacaaagataaaaacctccaaaaataacattaaaaatggtgactctcaatccaagccttttgctacagtggtttctggagaggcagaatcaaatcatgaagtaatccacccccaaccactctcttctgagggctcccagacatatataatgggtgaaggcaaatgtttgtcccaggagaaacccagggcctctggtctcttgaagtcacctgccagtctgaaagcccatacctgcaaacaggacttgagcaataccacagaactagccacaatcagtagcgtaaatattgacatcttacctgcaaaagggagggattcagtgagtgatggctttgttcaggagaatcagccaagatatttggatgcctctaatgagttaggaggtatatgcagtatttctcaagtggaagaggagatgctgcaggacaacactaaatccagtgcccagcctgaaaacctgattcccatgtggtcctctgacattgtcactggggaaaagaatgaaccagtgaagcctctgcagcccctaatcaaagaacaaaagccaaaggaccaggatcaagttgctggtgaatgtattatagaaaaacagggcagaatccacccagatttacagccacacaactctgggtctgaaccttccctgtctcgacagcgacggcaaaagaggagagaacagactgagcacagaggggaaaagagacaggtccgcagagatctctttgctttccaagagtcgcctcctcgatttttgccttctcatcccattgttgggaaagtggatgtcacatcaacacaaaaagaggctgaaaaccaacgtagagtggtcactgggtctgtgagcagttcaaggagcagtgagatgtcatcatcaaaggatcgaccattatcagccagagagaggaggcgactaaagcagtcacaggaagaaatgtcctcttcaggcccttcagtgaggaaagcgtctctgagtgtagcagggccaggaaaaccccaggaagaagaccagcccttgcctgcccgacggctctcctctgactgcagcgtcactcaggaaaggaaacagattcattgtctgtctgaggatgagttaagttcttctacaagttcaactgataagtcagatggggattacggggaagggaaaggtcagacaaatgaaattaatgccttggtacaattgatgactcagaccctgaaactggattctaaagagagctgtgaagatgtcccggtagcaaacccagtgtcagaattcaaacttcatcggaaatatcgggacacactgatacttcatgggaaggttgcagaagaggcagaggaaatccattttaaagagctaccttcagctattatgccaggttctgaaaagatcaggagactagttgaagtcttgagaactgatgtaattcgtggcctgggagttcagcttttagagcaggtgtatgatcttttggaggaggaggatgaatttgatagagaggtgagtgtctcattaactgtatcaagatgcttatgttatagaattttttaaacaaccttttgaaatataaatcacacataacaattca

SEQ ID NO: 13707 - DNA, 2276 bp, Homo sapiens
  source 1..2276: mol_type = unassigned DNA
aacagccgcccccactgccccctctcgggcatgaaccgagcttcttgttgccgcccgctgccctacccgccgctgccgccgcatcccgactctgggccagcgctgggaacatgcccctggccgcctactgctacctgcgggtcgtgggcaaggggagctatggagaggtgacgcttgtgaagcaccggcgggacggcaagcagtatttacatgaaaaacacatccttcatcgagatctgaaaactcaaaatgtcttcctaacaagaacaaacatcatcaaagtaggggacctaggaattgcccgagtgttagagaaccactgtgacatggctagcaccctcattggcacaccctactacatgagccctgaattgttctcaaacaaaccctacaactataagtctgatgtttgggctctaggatgctgtgtctatgaaatggccaccttgaagcatgctttcaatgcaaaagatatgaattctttagtttatcggattattgaaggaaagctgccaccaatgccaagagattacagcccagagctggcagaactgataagaacaatgctgagcaaaaggcctgaagaaaggccgtctgtgaggagcatcctgaggcagccttatataaagcggcaaatctccttctttttggaggccacaaagataaaaacctccaaaaataacattaaaaatggtgactctcaatccaagccttttgctacagtggtttctggagaggcagaatcaaatcatgaagtaatccacccccaaccactctcttctgagggctcccagacatatataatgggtgaaggcaaatgtttgtcccaggagaaacccagggcctctggtctcttgaagtcacctgccagtctgaaagcccatacctgcaaacaggacttgagcaataccacagaactagccacaatcagtagcgtaaatattgacatcttacctgcaaaagggagggattcagtgagtgatggctttgttcaggagaatcagccaagatatttggatgcctctaatgagttaggaggtatatgcagtatttctcaagtggaagaggagatgctgcaggacaacactaaatccagtgcccagcctgaaaacctgattcccatgtggtcctctgacattgtcactggggaaaagaatgaaccagtgaagcctctgcagcccctaatcaaagaacaaaagccaaaggaccagagtcttgccctgtcgcccaagctggagtgcagtggcacaatcttggctcacagcaacctccgcctcctgggttcaagtgattctccagcctcagcctcccgagtagctgggattacaggcgtgtgccaccacgcccaggatcaagttgctggtgaatgtattatagaaaaacagggcagaatccacccagatttacagccacacaactctgggtctgaaccttccctgtctcgacagcgacggcaaaagaggagagaacagactgagcacagaggggaaaagagacaggtccgcagagatctctttgctttccaagagtcgcctcctcgatttttgccttctcatcccattgttgggaaagtggatgtcacatcaacacaaaaagaggctgaaaaccaacgtagagtggtcactgggtctgtgagcagttcaaggagcagtgagatgtcatcatcaaaggatcgaccattatcagccagagagaggaggcgactaaagcagtcacaggaagaaatgtcctcttcaggcccttcagtgaggaaagcgtctctgagtgtagcagggccaggaaaaccccaggaagaagaccagcccttgcctgcccgacggctctcctctgactgcagcgtcactcaggaaaggaaacagattcattgtctgtctgaggatgagttaagttcttctacaagttcaactgataagtcagatggggattacggggaagggaaaggtcagacaaatgaaattaatgccttggtacaattgatgactcagaccctgaaactggattctaaagagagctgtgaagatgtcccggtagcaaacccagtgtcagaattcaaacttcatcggaaatatcgggacacactgatacttcatgggaaggttgcagaagaggcagaggaaatccattttaaagagctaccttcagctattatgccaggttctgaaaagatcaggagactagttgaagtcttgagaactgatgtaattcgtggcctgggagttcagcttttagagcaggtgtatgatcttttggaggaggaggatgaatttgatagagag

SEQ ID NO: 13708 - DNA, 355 bp, Homo sapiens
  source 1..355: mol_type = unassigned DNA
gtggtcactgggtctgtgagcagttcaaggagcagtgagatgtcatcatcaaaggatcgaccattatcagccagagagaggaggcgactaaagcagtcacaggaagaaatgtcctcttcaggcccttcagtgaggaaagcgtctctgagtgtagcagggccaggaaaaccccaggaagaagaccagcccttgcctgcccgacggctctcctctgactgcagcgtcactcaggtgcattacgtactcctaagagagaaggtggacagtctacatctggcaggcctaatgcagtaaaccttttaaatgtcagctccatttatttttgggacagggccagcttgttatatcttttcac

SEQ ID NO: 13709 - DNA, 631 bp, Homo sapiens
  source 1..631: mol_type = unassigned DNA
gctgcaggacaacactaaatccagtgcccagcctgaaaacctgattcccatgtggtcctctgacattgtcactggggaaaagaatgaaccagtgaagcctctgcagcccctaatcaaagaacaaaagccaaaggaccagagtcttgccctgtcgcccaagctggagtgcagtggcacaatcttggctcacagcaacctccgcctcctgggttcaagtgattctccagcctcagcctcccgagtagctgggattacaggcgtgtgccaccacgcccagatggagtctcactctgttgcccaggctggagtgcagtggtgcgatctcagcttactgcagcctccccctcccgggttcaagcaattcttctacctcagccttctgagtagctgggattacaggatcaagttgctggtgaatgtattatagaaaaacagggcagaatccacccagatttacagccacacaactctgggtctgaaccttccctgtctcgacagcgacggcaaaagaggagagaacagactgagcacagaggggaaaagagacaggtccgcagagatctctttgctttccaagagtcgcctcctcgatttttgccttctcatcccattgttgggaaagtggatgtca

SEQ ID NO: 13710 - DNA, 582 bp, Homo sapiens
  source 1..582: mol_type = unassigned DNA
atgcgcagaactgctcccggcccggatcgctatggcagcggcgtcgtcgcgggccgggccccagcaatcccgcccgggcccggctgcctcaacagccgcccccactgccccctctcgggcatgaaccgagcttcttgttgccgcccgctgccctacccgccgctgccgccgcatcccgactctgggccagcgctgggaacatgcccctggccgcctactgctacctgcgggtcgtgggcaaggggagctatggagaggtgacgcttgtgaagcaccggcgggacggcaagcagccgagagcggcgagctgctgaacaggaagcccagctcttgtctcagttgaagcatcccaacattgtcacctacaaggagtcatgggaaggaggagatggtctgctctacattgtcatgggcttctgtgaaggaggtgatttgtaccgaaagctcaaggagcagaaagggcagcttctgcctgagaatcaggtggtagagtggtttgtacagatcgccatggctttgcagtatttacatgaaaaacacatccttcatcgagatctgaaaactcaaaatgtcttcctaaca

SEQ ID NO: 13711 - DNA, 2452 bp, Homo sapiens
  source 1..2452: mol_type = unassigned DNA
gaactgctcccggcccggatcgctatggcagcggcgtcgtcgcgggccgggccccagcaatcccgcccgggcccggctgcctcaacagccgcccccactgccccctctcgggcatgaaccgagcttcttgttgccgcccgctgccctacccgccgctgccgccgcatcccgactctgggccagcgctgggaacatgcccctggccgcctactgctacctgcgggtcgtgggcaaggggagctatggagaggtgacgcttgtgaagcaccggcgggacggcaagcagtatttacatgaaaaacacatccttcatcgagatctgaaaactcaaaatgtcttcctaacaagaacaaacatcatcaaagtaggggacctaggaattgcccgagtgttagagaaccactgtgacatggctagcaccctcattggcacaccctactacatgagccctgaattgttctcaaacaaaccctacaactataagtctgatgtttgggctctaggatgctgtgtctatgaaatggccaccttgaagcatgctttcaatgcaaaagatatgaattctttagtttatcggattattgaaggaaagctgccaccaatgccaagagattacagcccagagctggcagaactgataagaacaatgctgagcaaaaggcctgaagaaaggccgtctgtgaggagcatcctgaggcagccttatataaagcggcaaatctccttctttttggaggccacaaagataaaaacctccaaaaataacattaaaaatggtgactctcaatccaagccttttgctacagtggtttctggagaggcagaatcaaatcatgaagtaatccacccccaaccactctcttctgagggctcccagacatatataatgggtgaaggcaaatgtttgtcccaggagaaacccagggcctctggtctcttgaagtcacctgccagtctgaaagcccatacctgcaaacaggacttgagcaataccacagaactagccacaatcagtagcgtaaatattgacatcttacctgcaaaagggagggattcagtgagtgatggctttgttcaggagaatcagccaagatatttggatgcctctaatgagttaggaggtatatgcagtatttctcaagtggaagaggagatgctgcaggacaacactaaatccagtgcccagcctgaaaacctgattcccatgtggtcctctgacattgtcactggggaaaagaatgaaccagtgaagcctctgcagcccctaatcaaagaacaaaagccaaaggaccagagtcttgccctgtcgcccaagctggagtgcagtggcacaatcttggctcacagcaacctccgcctcctgggttcaagtgattctccagcctcagcctcccgagtagctgggattacaggcgtgtgccaccacgcccaggatcaagttgctggtgaatgtattatagaaaaacagggcagaatccacccagatttacagccacacaactctgggtctgaaccttccctgtctcgacagcgacggcaaaagaggagagaacagactgagcacagaggggaaaagagacaggtccgcagagatctctttgctttccaagagtcgcctcctcgatttttgccttctcatcccattgttgggaaagtggatgtcacatcaacacaaaaagaggctgaaaaccaacgtagagtggtcactgggtctgtgagcagttcaaggagcagtgagatgtcatcatcaaaggatcgaccattatcagccagagagaggaggcgactaaagcagtcacaggaagaaatgtcctcttcaggcccttcagtgaggaaagcgtctctgagtgtagcagggccaggaaaaccccaggaagaagaccagcccttgcctgcccgacggctctcctctgactgcagcgtcactcaggaaaggaaacagattcattgtctgtctgaggatgagttaagttcttctacaagttcaactgataagtcagatggggattacggggaagggaaaggtcagacaaatgaaattaatgccttggtacaattgatgactcagaccctgaaactggattctaaagagagctgtgaagatgtcccggtagcaaacccagtgtcagaattcaaacttcatcggaaatatcgggacacactgatacttcatgggaaggttgcagaagaggcagaggaaatccattttaaagagctaccttcagctattatgccaggttctgaaaagatcaggagactagttgaagtcttgagaactgatgtaattcgtggcctgggagttcagcttttagagcaggtgtatgatcttttggaggaggaggatgaatttgatagagaggtacgtttgcgggagcacatgggtgaaaagtatacaacttacagtgtgaaagctcgccagttgaaattttttgaagaaaacatgaatttttga

SEQ ID NO: 13712 - DNA, 3329 bp, Homo sapiens
  source 1..3329: mol_type = unassigned DNA
atatgcgagcgcagcacccggcgctgccgagccacctcccccgccgcccgctagcaagtttggcggctccaagccaggcgcgcctcaggatccaggctcatttgcttccacctagcttcggtgccccctgctaggcggggaccctcgagagcgatgccgatggatttgattttagttgtgtggttctgtgtgtgcactgccaggacagcagaagatatgaagccacccgtgttatcgctgatatggagaactagagttctgaagtctctgcttcagcaatcccttcagggagtggtgggctttgggatggaccctgaccttcagatggatatcgtcaccgagcttgaccttgtgaacaccacccttggagttgctcaggtgtctggaatgcacaatgccagcaaagcatttttatttcaagacatagaaagagagatccatgcagctcctcatgtgagtgagaaattaattcagctgttccggaacaagagtgaattcaccattttggccactgtacagcagaagccatccacttcaggagtgatactgtccattcgagaactggagcacagctattttgaactggagagcagtggcctgagggatgagattcggtatcactacatacacaatgggaagccaaggacagaggcacttccttaccgcatggcagatggacaatggcacaaggttgcactgtcagttagcgcctctcatctcctgctccatgtcgactgtaacaggatttatgagcgtgtgatagaccctccagataccaaccttcccccaggaatcaatttatggcttggccagcgcaaccaaaagcatggcttattcaaagggatcatccaagatgggaagatcatctttatgccgaatggatatataacacagtgtccaaatctaaatcacacttgcccaacctgcagtgatttcttaagcctggtgcaaggaataatggatttacaagagcttttggccaagatgactgcaaaactaaattatgcagagacaagacttagtcaattggaaaactgtcattgtgagaagacttgtcaagtgagtggactgctctatcgagatcaagactcttgggtagatggtgaccattgcaggaactgcacttgcaaaagtggtgccgtggaatgccgaaggatgtcctgtccccctctcaattgctccccagactccctcccagtgcacattgctggccagtgctgtaaggtctgccgaccaaaatgtatctatggaggaaaagttcttgcagaaggccagcggattttaaccaagagctgtcgggaatgccgaggtggagttttagtaaaaattacagaaatgtgtcctcctttgaactgctcagaaaaggatcacattcttcctgagaatcagtgctgccgtgtctgtagaggtcataacttttgtgcagaaggacctaaatgtggtgaaaactcagagtgcaaaaactggaatacaaaagctacttgtgagtgcaagagtggttacatctctgtccagggagactctgcctactgtgaagatattgatgagtgtgcagctaagatgcattactgtcatgccaatactgtgtgtgtcaaccttcctgggttatatcgctgtgactgtgtcccaggatacattcgtgtggatgacttctcttgtacagaacacgatgaatgtggcagcggccagcacaactgtgatgagaatgccatctgcaccaacactgtccagggacacagctgcacctgcaaaccgggctacgtggggaacgggaccatctgcagagctttctgtgaagagggctgcagatacggtggaacgtgtgtggctcccaacaaatgtgtctgtccatctggattcacaggaagccactgcgagaaagatattgatgaatgttcagagggaatcattgagtgccacaaccattcccgctgcgttaacctgccagggtggtaccactgtgagtgcagaagcggtttccatgacgatgggacctattcactgtccggggagtcctgtattgacattgatgaatgtgccttaagaactcacacctgttggaacgattctgcctgcatcaacctggcagggggctttgactgtctctgcccctctgggccctcctgctctggtgactgtcctcatgaaggggggctgaagcacaatggccaggtgtggaccttgaaagaagacaggtgttctgtctgctcctgcaaggatggcaagatattctgccgacggacagcttgtgattgccagaatccaagtgctgacctattctgttgcccagaatgtgacaccagagtcacaagtcaatgtttagaccaaaatggtcacaagctgtatcgaagtggagacaattggacccatagctgtcagcagtgtcggtgtctggaaggagaggtagattgctggccactcacttgccccaacttgagctgtgagtatacagctatcttagaaggggaatgttgtccccgctgtgtcagtgacccctgcctagctgataacatcacctatgacatcagaaaaacttgcctggacagctatggtgtttcacggcttagtggctcagtgtggacgatggctggatctccctgcacaacctgtaaatgcaagaatggaagagtctgttgttctgtggattttgagtgtcttcaaaataattgaagtatttacagtggactcaacgcagaagaatggacgaaatgaccatccaacgtgattaaggataggaatcggtagtttggtttttttgtttgttttgtttttttaaccacagataattgccaaagtttccacctgaggacggtgtttggaggttgccttttggacctaccactttgctcattcttgctaacctagtctaggtgacctacagtgccgtgcatttaagtcaatggttgttaaaagaagtttcccgtgttgtaaatcatgtttcccttatcagatcatttgcaaatacatttaaatgatctcatggtaaatgttgatgtattttttggtttattttgtgtactaacataatagagagagactcagctccttttatttattttgttgatttatggatcaaattctaaaataaagttgcctgttgtgacttttgtcccatctactgcatacttagtgctgagatccctgtaaaatgttttgatgaaaatatgtatgtagagtccagtcgcattatacatacatttcatagtgctgaaccttcttaaatgcctactcattcagcttaaacaggctgaagccaagtatgacaaagaggggaagggccaaaaacataatcaaagaataattttaaagagaattcttgtctctcttgc

SEQ ID NO: 13713 - DNA, 3022 bp, Homo sapiens
  source 1..3022: mol_type = unassigned DNA
tatgcgagcgcagcacccggcgctgccgagccacctcccccgccgcccgctagcaagtttggcggctccaagccaggcgcgcctcaggatccaggctcatttgcttccacctagcttcggtgccccctgctaggcggggaccctcgagagcgatgccgatggatttgattttagttgtgtggttctgtgtgtgcactgccaggacagtggtgggctttgggatggaccctgaccttcagatggatatcgtcaccgagcttgaccttgtgaacaccacccttggagttgctcaggtgtctggaatgcacaatgccagcaaagcatttttatttcaagacatagaaagagagatccatgcagctcctcatgtgagtgagaaattaattcagctgttccggaacaagagtgaattcaccattttggccactgtacagcagaagccatccacttcaggagtgatactgtccattcgagaactggagcacagctattttgaactggagagcagtggcctgagggatgagattcggtatcactacatacacaatgggaagccaaggacagaggcacttccttaccgcatggcagatggacaatggcacaaggttgcactgtcagttagcgcctctcatctcctgctccatgtcgactgtaacaggatttatgagcgtgtgatagaccctccagataccaaccttcccccaggaatcaatttatggcttggccagcgcaaccaaaagcatggcttattcaaagggatcatccaagatgggaagatcatctttatgccgaatggatatataacacagtgtccaaatctaaatcacacttgcccaacctgcagtgatttcttaagcctggtgcaaggaataatggatttacaagagcttttggccaagatgactgcaaaactaaattatgcagagacaagacttagtcaattggaaaactgtcattgtgagaagacttgtcaagtgagtggactgctctatcgagatcaagactcttgggtagatggtgaccattgcaggaactgcacttgcaaaagtggtgccgtggaatgccgaaggatgtcctgtccccctctcaattgctccccagactccctcccagtgcacattgctggccagtgctgtaaggtctgccgaccaaaatgtatctatggaggaaaagttcttgcagaaggccagcggattttaaccaagagctgtcgggaatgccgaggtggagttttagtaaaaattacagaaatgtgtcctcctttgaactgctcagaaaaggatcacattcttcctgagaatcagtgctgccgtgtctgtagaggtcataacttttgtgcagaaggacctaaatgtggtgaaaactcagagtgcaaaaactggaatacaaaagctacttgtgagtgcaagagtggttacatctctgtccagggagactctgcctactgtgaagatattgatgagtgtgcagctaagatgcattactgtcatgccaatactgtgtgtgtcaaccttcctgggttatatcgctgtgactgtgtcccaggatacattcgtgtggatgacttctcttgtacagaacacgatgaatgtggcagcggccagcacaactgtgatgagaatgccatctgcaccaacactgtccagggacacagctgcacctgcaaaccgggctacgtggggaacgggaccatctgcagagctttctgtgaagagggctgcagatacggtggaacgtgtgtggctcccaacaaatgtgtctgtccatctggattcacaggaagccactgcgagaaagatattgatgaatgttcagagggaatcattgagtgccacaaccattcccgctgcgttaacctgccagggtggtaccactgtgagtgcagaagcggtttccatgacgatgggacctattcactgtccggggagtcctgtattgacattgatgaatgtgccttaagaactcacacctgttggaacgattctgcctgcatcaacctggcagggggctttgactgtctctgcccctctgggccctcctgctctggtgactgtcctcatgaaggggggctgaagcacaatggccaggtgtggaccttgaaagaagacaggtgttctgtctgctcctgcaaggatggcaagatattctgccgacggacagcttgtgattgccagaatccaagtgctgacctattctgttgcccagaatgtgacaccagagtcacaagtcaatgtttagaccaaaatggtcacaagctgtatcgaagtggagacaattggacccatagctgtcagcagtgtcggtgtctggaaggagaggtagattgctggccactcacttgccccaacttgagctgtgagtatacagctatcttagaaggggaatgttgtccccgctgtgtcagtgacccctgcctagctgataacatcacctatgacatcagaaaaacttgcctggacagctatggtgtttcacggcttagtggctcagtgtggacgatggctggatctccctgcacaacctgtaaatgcaagaatggaagagtctgttgttctgtggattttgagtgtcttcaaaataattgaagtatttacagtggactcaacgcagaagaatggacgaaatgaccatccaacgtgattaaggataggaatcggtagtttggtttttttgtttgttttgtttttttaaccacagataattgccaaagtttccacctgaggacggtgtttggaggttgccttttggacctaccactttgctcattcttgctaacctagtctaggtgacctacagtgccgtgcatttaagtcaatggttgttaaaagaagtttcccgtgttgtaaatcatgtttcccttatcagatcatttgcaaatacatttaaatgatctcatggtaaatgttgatgtattttttggtttattttgtgtactaacataatagagagagactcagctccttttatttattttgttgatttatggatcaaattctaaaataaagttgcctgttgtgacttt

SEQ ID NO: 13714 - DNA, 2400 bp, Homo sapiens
  source 1..2400: mol_type = unassigned DNA
tccaggctcatttgcttccacctagcttcggtgccccctgctaggcggggaccctcgagagcgatgccgatggatttgattttagttgtgtggttctgtgtgtgcactgccaggacagtggtgggctttgggatggaccctgaccttcagatggatatcgtcaccgagcttgaccttgtgaacaccacccttggagttgctcaggtgtctggaatgcacaatgccagcaaagcatttttatttcaagacatagaaagagagatccatgcagctcctcatgtgagtgagaaattaattcagctgttccggaacaagagtgaattcaccattttggccactgtacagcagaagccatccacttcaggagtgatactgtccattcgagaactggagcacagctattttgaactggagagcagtggcctgagggatgagattcggtatcactacatacacaatgggaagccaaggacagaggcacttccttaccgcatggcagatggacaatggcacaaggttgcactgtcagttagcgcctctcatctcctgctccatgtcgactgtaacaggatttatgagcgtgtgatagaccctccagataccaaccttcccccaggaatcaatttatggcttggccagcgcaaccaaaagcatggcttattcaaagggatcatccaagatgggaagatcatctttatgccgaatggatatataacacagtgtccaaatctaaatcacacttgcccaacctgcagtgatttcttaagcctggtgcaaggaataatggatttacaagagcttttggccaagatgactgcaaaactaaattatgcagagacaagacttagtcaattggaaaactgtcattgtgagaagacttgtcaagtgagtggactgctctatcgagatcaagactcttgggtagatggtgaccattgcaggaactgcacttgcaaaagtggtgccgtggaatgccgaaggatgtcctgtccccctctcaattgctccccagactccctcccagtgcacattgctggccagtgctgtaaggtctgccgaccaaaatgtatctatggaggaaaagttcttgcagaaggccagcggattttaaccaagagctgtcgggaatgccgaggtggagttttagtaaaaattacagaaatgtgtcctcctttgaactgctcagaaaaggatcacattcttcctgagaatcagtgctgccgtgtctgtagaggtcataacttttgtgcagaaggacctaaatgtggtgaaaactcagagtgcaaaaactggaatacaaaagctacttgtgagtgcaagagtggttacatctctgtccagggagactctgcctactgtgaagatattgatgagtgtgcagctaagatgcattactgtcatgccaatactgtgtgtgtcaaccttcctgggttatatcgctgtgactgtgtcccaggatacattcgtgtggatgacttctcttgtacagaacacgatgaatgtggcagcggccagcacaactgtgatgagaatgccatctgcaccaacactgtccagggacacagctgcacctgcaaaccgggctacgtggggaacgggaccatctgcagagctttctgtgaagagggctgcagatacggtggaacgtgtgtggctcccaacaaatgtgtctgtccatctggattcacaggaagccactgcgagaaagacattgatgaatgtgccttaagaactcacacctgttggaacgattctgcctgcatcaacctggcagggggctttgactgtctctgcccctctgggccctcctgctctggtgactgtcctcatgaaggggggctgaagcacaatggccaggtgtggaccttgaaagaagacaggtgttctgtctgctcctgcaaggatggcaagatattctgccgacggacagcttgtgattgccagaatccaagtgctgacctattctgttgcccagaatgtgacaccagagtcacaagtcaatgtttagaccaaaatggtcacaagctgtatcgaagtggagacaattggacccatagctgtcagcagtgtcggtgtctggaaggagaggtagattgctggccactcacttgccccaacttgagctgtgagtatacagctatcttagaaggggaatgttgtccccgctgtgtcagtgacccctgcctagctgataacatcacctatgacatcagaaaaacttgcctggacagctatggtgtttcacggcttagtggctcagtgtggacgatggctggatctccctgcacaacctgtaaatgcaagaatggaagagtctgttgttctgtggattttgagtgtcttcaaaataattgaagtatttacagtggactcaacgcagaagaatggacgaaatgacca

SEQ ID NO: 13715 - DNA, 582 bp, Homo sapiens
  source 1..582: mol_type = unassigned DNA
gaatgttctttgaggcactctgacaagtaagacagaaggcagaggagtgcacaataaaggagcctctagacagccccggaggtaggaggacaacaggaagaatgcagtgtcaaaagggcagaatgtttcaaaaggaggcagagcacgactgtttgggaagttaccaagggttcacttagtggtcaggccaccgtctggccattaactttggcacaatgtagagaataagatttgtaagagtgggtggtattggtcagtgcagctaaaaatactggccagatatttctctccagactgagtccatcttaatcaccacagtacagagcctggcacagagaacatactccacaaatacatctttgaatggacatagaaagagagatccatgcagctcctcatgtgagtgagaaattaattcagctgttccggaacaagagtgaattcaccattttggccactgtacagcagaagccatccacttcaggagtgatactgtccattcgagaactggagcacagctattttgaactggagagcagtggcctgagggatgagattcggtatcactacatacacaatggg

SEQ ID NO: 13716 - DNA, 748 bp, Homo sapiens
  source 1..748: mol_type = unassigned DNA
gctggttcatcagggactgacattgcttcatgactcctggctgctgtggaaaataatttttcccctccttctgatagcaagatggagtctggctctctgtcacccaggctggagtgcagtggcgccaccttggcttattacaacttcctcctcccaggttcaagtgattctcctgccttagcctcccaagttgctgggattacagacatagaaagagagatccatgcagctcctcatgtgagtgagaaattaattcagctgttccggaacaagagtgaattcaccattttggccactgtacagcagaagccatccacttcaggagtgatactgtccattcgagaactggagcacagctattttgaactggagagcagtggcctgagggatgagattcggtatcactacatacacaatgggaagccaaggacagaggcacttccttaccgcatggcagatggacaatggcacaaggttgcactgtcagttagcgcctctcatctcctgctccatgtcgactgtaacaggatttatgagcgtgtgatagaccctccagataccaaccttcccccaggaatcaatttatggcttggccagcgcaaccaaaagcatggcttattcaaagggatcatccaagatgggaagatcatctttatgccgaatggatatataacacagtgtccaaatctaaatcacacttgcccaacctgcagtgatttcttaagcctggtgcaaggaataatggatt

SEQ ID NO: 13717 - DNA, 556 bp, Homo sapiens
  source 1..556: mol_type = unassigned DNA
tcagggactgacattgcttcatgactcctggctgctgtggaaaataatttttcccctccttctgatagcaagacatagaaagagagatccatgcagctcctcatgtgagtgagaaattaattcagctgttccggaacaagagtgaattcaccattttggccactgtacagcagaagccatccacttcaggagtgatactgtccattcgagaactggagcacagctattttgaactggagagcagtggcctgagggatgagattcggtatcactacatacacaatgggaagccaaggacagaggcacttccttaccgcatggcagatggacaatggcacaaggttgcactgtcagttagcgcctctcatctcctgctccatgtcgactgtaacaggatttatgagcgtgtgatagaccctccagataccaaccttcccccaggaatcaatttatggcttggccagcgcaaccaaaagcatggcttattcaaagggatcatccaagatgggaagatcatctttatgccgaatggatatataacacagtgtccaaatct

SEQ ID NO: 13718 - DNA, 256 bp, Homo sapiens
  source 1..256: mol_type = unassigned DNA
ttgattcctagacatagaaagagagatccatgcagctcctcatgtgagtgagaaattaattcagctgttccggaacaagagtgaattcaccattttggccactgtacagcagaagccatccacttcaggagtgatactgtccattcgagaactggagcacaggatttatgagcgtgtgatagaccctccagataccaaccttcccccaggaatcaatttatggcttggccagcgcaaccaaaagcatggcttattc

SEQ ID NO: 13719 - DNA, 486 bp, Homo sapiens
  source 1..486: mol_type = unassigned DNA
aaagcacacacatttatgaacacccatgaggttcctgagttacagtttaatgtctcatttggtattcattagaccatgacagccaatatttcttcaatttagagtgattccaccttgtgtaaaaaaaataaaaaaaacaaaaaacagataatgctaagaatcagtgaactgctctgagcatttttttctcttctcagaaggattttttttcttgttgctattagctttgttaggatgatgcaattgaattacagaaattacattcagtaactcttgtttgcagctaaattatgcagagacaagacttagtcaattggaaaactgtcattgtgagaagacttgtcaagtgagtggactgctctatcgagatcaagactcttgggtagatggtgaccattgcaggaactgcacttgcaaaagtggtgccgtggaatgccgaaggatgtcctgtccccctctcaattgctccccagactccctcccagt

SEQ ID NO: 13720 - DNA, 563 bp, Homo sapiens
  source 1..563: mol_type = unassigned DNA
agagctaggaagttgtggtggtactgaagaagagggatgacgacagcctgaacaaagacagtgtctgggggcagaggcaaaatgtatctatggaggaaaagttcttgcagaaggccagcggattttaaccaagagctgtcgggaatgccgaggtggagttttagtaaaaattacagaaatgtgtcctcctttgaactgctcagaaaaggatcacattcttcctgagaatcagtgctgccgtgtctgtagaggtcataacttttgtgcagaaggacctaaatgtggtgaaaactcagagtgcaaaaactggaatacaaaagctacttgtgagtgcaagagtggttacatctctgtccagggagactctgcctactgtgaagatattgatgagtgtgcagctaagatgcattactgtcatgccaatactgtgtgtgtcaaccttcctgggttatatcgctgtgactgtgtcccaggatacattcgtgtggatgacttctcttgtacagaacacgatgaatgtggcagcggccagcacaactgtgatgagaatgccatctgcacca

SEQ ID NO: 13721 - DNA, 1907 bp, Homo sapiens
  source 1..1907: mol_type = unassigned DNA
agagagaattatgacccaagcaagaatcatgggtccagaattccacccaaggaagctagttcaaagccagagaaagagcacagcttttcacacaattgaatagatctcaacttcatgattttggtattgaagatgctgacagtagccagtggctctgtgaaggcaattttccaacctaccattcttggctactcctgggatattttacttggctgtgagatccccctgagaagcttctctttttctcacacaattcctccatcagcgaagtgtggtgggcagcacacagtgactatgattcctggagatggcactgggactgaacttatgctgcctgtcaagattatgttcagacatgtgtgtgtgcctgtggactttgagggaatgtcagtgacctccacctctgcctcacatgaagaggaaattcataatgccatcatggcagttcattgaaaccgtgtggctttgaagagtagcgttaaaactgacgacaccctgccaccatcatacaaatccttcaacaacatgttgcataccaccctagatctctatgccagtgtcattcatttaaaaaatttgccaaacgtggagacctggcacaaagatgtagacatcctagttgtttgggaaaacacagagggtgagtatagcaatctggagcatgagagtgtgaaaggagtgacagagagcctaaagatcatgactaaggccaagtctttgtgcattgctgaatatgccttccagctggcccagaagatgggatgcaaaaaagtgatggctgtgcacaaggtcaacatcacgaaactgggagatggtctcttcctccagtgctgtgggggaggtggcatcccgctatcctcagctcaccttagaagacatgattgtggagaatgccacaatgcactttctgtgaagagggctgcagatacggtggaacgtgtgtggctcccaacaaatgtgtctgtccatctggattcacaggaagccactgcgagaaagatattgatgaatgttcagagggaatcattgagtgccacaaccattcccgctgcgttaacctgccagggtggtaccactgtgagtgcagaagcggtttccatgacgatgggacctattcactgtccggggagtcctgtattggatggcaagatattctgccgacggacagcttgtgattgccagaatccaagtgctgacctattctgttgcccagaatgtgacaccagagtcacaagtcaatgtttagaccaaaatggtcacaagctgtatcgaagtggagacaattggacccatagctgtcagcagtgtcggtgtctggaaggagaggtagattgctggccactcacttgccccaacttgagctgtgagtatacagctatcttagaaggggaatgttgtccccgctgtgtcagtgacccctgcctagctgataacatcacctatgacatcagaaaaacttgcctggacagctatggtgtttcacggcttagtggctcagtgtggacgatggctggatctccctgcacaacctgtaaatgcaagaatggaagagtctgttgttctgtggattttgagtgtcttcaaaataattgaagtatttacagtggactcaacgcagaagaatggacgaaatgaccatccaacgtgattaaggataggaatcggtagtttggtttttttgtttgttttgtttttttaaccacagataattgccaaagtttccacctgaggacggtgtttggaggttgccttttggacctaccactttgctcattcttgctaacctagtctaggtgacctacagtgccgtgcatttaagtcaatggttgttaaaagaagtttcccgtgttgtaaatcatgtttcccttatcagatcatttgcaaatacatttaaatgatctcatggt

SEQ ID NO: 13722 - DNA, 1037 bp, Homo sapiens
  source 1..1037: mol_type = unassigned DNA
agcacagcttttcacacaattgaatagatctcaacttcatgattttggtattgaagatgctgacagtagccagtggctctgtgaaggcaattttccaacctaccattcttggctactcctgggatattttacttggctgtgagatccccctgagaagcttctctttttctcacacaattcctccatcagcgaagtgtggtgggcagcacacagtgactatgattcctggagatggcactgggactgaacttatgctgcctgtcaagattatgttcagacatgtgtgtgtgcctgtggactttgagggaatgtcagtgacctccacctctgcctcacatgaagaggaaattcataatgccatcatggcagttcattgaaaccgtgtggctttgaagagtagcgttaaaactgacgacaccctgccaccatcatacaaatccttcaacaacatgttgcataccaccctagatctctatgccagtgtcattcatttaaaaaatttgccaaacgtggagacctggcacaaagatgtagacatcctagttgtttgggaaaacacagagggtgagtatagcaatctggagcatgagagtgtgaaaggagtgacagagagcctaaagatcatgactaaggccaagtctttgtgcattgctgaatatgccttccagctggcccagaagatgggatgcaaaaaagtgatggctgtgcacaaggtcaacatcacgaaactgggagatggtctcttcctccagtgctgtgggggaggtggcatcccgctatcctcagctcaccttagaagacatgattgtggagaatgccacaatgcactttctgtgaagagggctgcagatacggtggaacgtgtgtggctcccaacaaatgtgtctgtccatctggattcacaggaagccactgcgagaaagtggtgagaatgctggctccatgaaagaggtctgcgagagcagggaccttgtttgctctccagggcttactgcaacagactggcacataagtgtctaataaatattccgacagaa

SEQ ID NO: 13723 - DNA, 3094 bp, Homo sapiens
  source 1..3094: mol_type = unassigned DNA
ggggctgccttcccgggcgcatatgcgagcgcagcacccggcgctgccgagccacctcccccgccgcccgctagcaagtttggcggctccaagccaggcgcgcctcaggatccaggctcatttgcttccacctagcttcggtgccccctgctaggcggggaccctcgagagcgatgccgatggatttgattttagttgtgtggttctgtgtgtgcactgccaggacagtggtgggctttgggatggaccctgaccttcagatggatatcgtcaccgagcttgaccttgtgaacaccacccttggagttgctcaggtgtctggaatgcacaatgccagcaaagcatttttatttcaagacatagaaagagagatccatgcagctcctcatgtgagtgagaaattaattcagctgttccggaacaagagtgaattcaccattttggccactgtacagcagaagccatccacttcaggagtgatactgtccattcgagaactggagcacaggatttatgagcgtgtgatagaccctccagataccaaccttcccccaggaatcaatttatggcttggccagcgcaaccaaaagcatggcttattcaaagggatcatccaagatgggaagatcatctttatgccgaatggatatataacacagtgtccaaatctaaatcacacttgcccaacctgcagtgatttcttaagcctggtgcaaggaataatggatttacaagagcttttggccaagatgactgcaaaactaaattatgcagagacaagacttagtcaattggaaaactgtcattgtgagaagacttgtcaagtgagtggactgctctatcgagatcaagactcttgggtagatggtgaccattgcaggaactgcacttgcaaaagtggtgccgtggaatgccgaaggatgtcctgtccccctctcaattgctccccagactccctcccagtgcacattgctggccagtgctgtaaggtctgccgaccaaaatgtatctatggaggaaaagttcttgcagaaggccagcggattttaaccaagagctgtcgggaatgccgaggtggagttttagtaaaaattacagaaatgtgtcctcctttgaactgctcagaaaaggatcacattcttcctgagaatcagtgctgccgtgtctgtagaggtcataacttttgtgcagaaggacctaaatgtggtgaaaactcagagtgcaaaaactggaatacaaaagctacttgtgagtgcaagagtggttacatctctgtccagggagactctgcctactgtgaagatattgatgagtgtgcagctaagatgcattactgtcatgccaatactgtgtgtgtcaaccttcctgggttatatcgctgtgactgtgtcccaggatacattcgtgtggatgacttctcttgtacagaacacgatgaatgtggcagcggccagcacaactgtgatgagaatgccatctgcaccaacactgtccagggacacagctgcacctgcaaaccgggctacgtggggaacgggaccatctgcagagctttctgtgaagagggctgcagatacggtggaacgtgtgtggctcccaacaaatgtgtctgtccatctggattcacaggaagccactgcgagaaagatattgatgaatgttcagagggaatcattgagtgccacaaccattcccgctgcgttaacctgccagggtggtaccactgtgagtgcagaagcggtttccatgacgatgggacctattcactgtccggggagtcctgtattgacattgatgaatgtgccttaagaactcacacctgttggaacgattctgcctgcatcaacctggcagggggctttgactgtctctgcccctctgggccctcctgctctggtgactgtcctcatgaaggggggctgaagcacaatggccaggtgtggaccttgaaagaagacaggtgttctgtctgctcctgcaaggatggcaagatattctgccgacggacagcttgtgattgccagaatccaagtgctgacctattctgttgcccagaatgtgacaccagagtcacaagtcaatgtttagaccaaaatggtcacaagctgtatcgaagtggagacaattggacccatagctgtcagcagtgtcggtgtctggaaggagaggtagattgctggccactcacttgccccaacttgagctgtgagtatacagctatcttagaaggggaatgttgtccccgctgtgtcagtgacccctgcctagctgataacatcacctatgacatcagaaaaacttgcctggacagctatggtgtttcacggcttagtggctcagtgtggacgatggctggatctccctgcacaacctgtaaatgcaagaatggaagagtctgttgttctgtggattttgagtgtcttcaaaataattgaagtatttacagtggactcaacgcagaagaatggacgaaatgaccatccaacgtgattaaggataggaatcggtagtttggtttttttgtttgttttgtttttttaaccacagataattgccaaagtttccacctgaggacggtgtttggaggttgccttttggacctaccactttgctcattcttgctaacctagtctaggtgacctacagtgccgtgcatttaagtcaatggttgttaaaagaagtttcccgtgttgtaaatcatgtttcccttatcagatcatttgcaaatacatttaaatgatctcatggtaaatgttgatgtattttttggtttattttgtgtactaacataatagagagagactcagctccttttatttattttgttgatttatggatcaaattctaaaataaagttgcctgttgtgacttttgtcccatctactgcatacttagtgctgagatccctgtaaaatgttttgatgaaaatatgtatgtagagtccagtcgcattatacatacatttcatagtgctgaaccttcttaaatgcctactcattcagcttaaacaggctgaagccaagtatgacaaagaggggaagggccaaaaacataatcaaagaataattttaaagagaattcttgtctctcttgc

SEQ ID NO: 13724 - DNA, 7342 bp, Homo sapiens
  source 1..7342: mol_type = unassigned DNA
ggtcagcggctgcgcggccggccccctcccacgggagccgcgccagggcccagcaagagtcgggcgggatcgctattgtttttggcgagcacataaatccccgggccgacccactgcgcacccaggtttcctcccggaggcctttcggtttcctctgaggccctatatagaggctccaggcccggactgtgcagaggtgcgcgcccacgccggcctcccggaccagcctgagctcggagcgcctctcgccctcaggagggaggcgccctggagtctcccctccagcgagaggggctgcgcgggccgggccgggccgggctgggctggagcagcggcggccgcgggagccgagcttgcagcgagggaccggctgaggcgcgcgggagggaaggaggcaagggctccgcggcgctgtcgccgccgctgccgctcactctcggggaagagatggcggcggagcggggagcccggcgactcctcagcaccccctccttctggctctactgcctgctgctgctcgggcgccgggcgccgggcgccgcggccgccaggagcggctccgcgccgcagtccccaggagccagcattcgaacgttcactccattttattttctggtggagccggtggatacactctcagttagaggctcttctgttatattaaactgttcagcatattctgagccttctccaaaaattgaatggaaaaaagatggaacttttttaaacttagtatcagatgatcgacgccagcttctcccggatggatctttatttatcagcaatgtggtgcattccaaacacaataaacctgatgaaggttattatcagtgtgtggccactgttgagagtcttggaactattatcagtagaacagcgaagctcatagtagcaggtcttccaagatttaccagccaaccagaaccttcctcagtttatgctgggaacaatgcaattctgaattgtgaagttaatgcagatttggtcccatttgtgaggtgggaacagaacagacaaccccttcttctggatgatagagttatcaaacttccaagtggaatgctggttatcagcaatgcaactgaaggagatggcgggctttatcgctgcgtagtggaaagtggtgggccaccaaagtatagtgatgaagttgaattgaaggttcttccagatcctgaggtgatatcagacttggtatttttgaaacagccttctcccttagtcagagtcattggtcaggatgtagtgttgccatgtgttgcttcaggacttcctactccaaccattaaatggatgaaaaatgaggaggcacttgacacagaaagctctgaaagattggtattgctggcaggtggtagcctggagatcagtgatgttactgaggatgatgctgggacttatttttgtatagctgataatggaaatgagacaattgaagctcaagcagagcttacagtgcaagctcaacctgaattcctgaagcagcctactaatatatatgctcacgaatctatggatattgtatttgaatgtgaagtgactggaaaaccaactccaactgtgaagtgggtcaaaaatggggatatggttatcccaagtgattattttaagattgtaaaggaacataatcttcaagttttgggtctggtgaaatcagatgaagggttctatcagtgcattgctgaaaatgatgttggaaatgcacaagctggagcccaactgataatccttgaacatgcaccagccacaacgggaccactgccttcagctcctcgggatgtcgtggcctccctggtctctacccgcttcatcaaattgacgtggcggacacctgcatcagatcctcacggagacaaccttacctactctgtgttctacaccaaggaagggattgctagggaacgtgttgagaataccagtcacccaggagagatgcaagtaaccattcaaaacctaatgccagcgaccgtgtacatctttagagttatggctcaaaataagcatggctcaggagagagttcagctccactgcgagtagaaacacaacctgaggttcagctccctggcccagcacctaaccttcgtgcatatgcagcttcgcctacctccatcactgttacgtgggaaacaccagtgtctggcaatggggaaattcagaattataaattgtactacatggaaaaggggactgataaagaacaggatgttgatgtttcaagtcactcttacaccattaatgggttgaaaaaatatacagagtatagtttccgagtggtggcctacaataaacatggtcctggagtttccacaccagatgttgctgttcgaacattgtcagatgttcccagtgctgctcctcagaatctgtccttggaagtgagaaattcaaagagtattatgattcactggcagccacctgctccagccacacaaaatgggcagattactggctacaagattcgctaccgaaaggcctcccgaaagagtgatgtcactgagaccttggtaagcgggacacagctgtctcagctgattgaaggtcttgatcgggggactgagtataatttccgagtggctgctctaacaatcaatggtacaggcccggcaactgactggctgtctgctgaaacttttgaaagtgacctagatgaaactcgtgttcctgaagtgcctagctctcttcacgtacgcccgctcgttactagcatcgtagtgagctggactcctccagagaatcagaacattgtggtcagaggttacgccattggttatggcattggcagccctcatgcccagaccatcaaagtggactataaacagcgctattacaccattgaaaatctggatcccagctctcactatgtgattaccctgaaagcatttaataacgtgggtgaaggcatccccctgtatgagagtgctgtgaccaggcctcacacagacacttctgaagttgatttatttgttattaatgctccatacactccagtgccagatcccactcccatgatgccaccagtgggagttcaggcttccattctgagtcatgacaccatcaggattacgtgggcagacaactcgctgcccaagcaccagaagattacagactcccgatactacaccgtccgatggaaaaccaacatcccagcaaacaccaagtacaagaatgcaaatgcaaccactttgagttatttggtgactggtttaaagccgaatacactctatgaattctctgtgatggtgaccaaaggtcgaagatcaagtacatggagtatgacagcccatgggaccacctttgaattagttccgacttctccacccaaggatgtgactgttgtgagtaaagaggggaaacctaagaccataattgtgaattggcagcctccctccgaagccaatggcaaaattacaggttacatcatatattacagtacagatgtgaatgcagagatacatgactgggttattgagcctgttgtgggaaacagactgactcaccagatacaagagttaactcttgacacaccatactacttcaaaatccaggcacggaactcaaagggcatgggacccatgtctgaagctgtccaattcagaacacctaaagcggactcctctgataaaatgcctaatgatcaagcctcagggtctggagggaaaggaagccggctgccagacctaggatccgactacaaacctccaatgagcggcagtaacagccctcatgggagccccacctctcctctggacagtaatatgctgctggtcataattgtttctgttggcgtcatcaccatcgtggtggttgtgattatcgctgtcttttgtacccgtcgtaccacctctcaccagaaaaagaaacgagctgcctgcaaatcagtgaatggctctcataagtacaaagggaattccaaagatgtgaaacctccagatctctggatccatcatgagagactggagctgaaacccattgataagtctccagacccaaaccccatcatgactgatactccaattcctcgcaactctcaagatatcacaccagttgacaactccatggacagcaatatccatcaaaggcgaaattcatacagagggcatgagtcagaggacagcatgtctacactggctggaaggcgaggaatgagaccaaaaatgatgatgccctttgactcccagccaccccagcctgtgattagtgcccatcccatccattccctcgataaccctcaccatcatttccactccagcagcctcgcttctccagctcgcagtcatctctaccacccgggcagcccatggcccattggcacatccatgtccctttcagacagggccaattccacagaatccgttcgaaatacccccagcactgacaccatgccagcctcttcgtctcaaacatgctgcactgatcaccaggaccctgaaggtgctaccagctcctcttacttggccagctcccaagaggaagattcaggccagagtcttcccactgcccatgttcgcccttcccacccattgaagagcttcgccgtgccagcaatcccgcctccaggacctcccacctatgatcctgcattgccaagcacaccattactgtcccagcaagctctgaaccatcacattcactcagtgaagacagcctccatcgggactctaggaaggagccggcctcctatgccagtggttgttcccagtgcccctgaagtgcaggagaccacaaggatgttggaagactccgagagtagctatgaaccagatgagctgaccaaagagatggcccacctggaaggactaatgaaggacctaaacgctatcacaacagcatgacgaccttcaccaggacctgacttcaaacctgagtctggaagtcttggaacttacccttgaaaacaaggaattgtacagagtacgagaggacagcacttgagaacacagaatgagccagcagactggccagcgcctctgtgtagggctggctccaggcatggccacctgccttcccctggtcagcctggaagaagcctgtgtcgaggcagcttccctttgcctgctgatattctgcaggactgggcaccatgggccaaaattttgtgtccagggaagaggcgagaagtgcaacctgcatttcactttgtggtcaggccgtgtctttgtgctgtgactgcatcacctttatggagtgtagacattggcatttatgtacaattttatttgtgtcttattttattttaccttcaaaaacaaaaacgccatccaaaaccaaggaagtccttggtgttctccacaagtggttgacatttgactgcttgttccaattatgtatggaaagtctttgacagtgtgggtcgttcctggggttggcttgttttttggtttcatttttattttttaattctgagtcattgcatcctctaccagctgttaatccatcactctgagggggaggaaatgttgcattgctgtttgtaagctttttttattatttttttattataattattaaaggcctgactctttcctctcatcactgtgagattacagatctatttgaattgaatgaaatgtaacattgaaaagacttgtttgttgctttctgtgcagtttcagtattggggcgggtggggggctgggggttggtaataggaaatggaggggctgctgaggtcctgtgaatgtttctgtcattgtactttcttccagaagcctgcagagaatggaagcatcttctttattgtcctttcctggcatgtccatccttattgtcactacgttgcaactggagtttgatttggatctggttttaaaattcttctgtgcaatagatgggtttgaggatttagcggccctgatgtcttggtcatagcctggtaagaatgtccatgctgaggagccagatgttgtatttctaactgcctgagtcacacagaatagggtaagagcctgaccccattctgtaaatcagaaagcaaggatggagaccctttcctgctgctattattggctctctttgaggaagttggaggttaaggaaggaacttgtttgtttccgtatacgactccttcttctctctagttcagtcttcagccagtccagcgctctcttccacacttcagagccccttcagagaaagcattagcaggaatgagacaaggcagagctgcagtgccccctgaggcttccacacatctttctgaatattatttttcaagtaacaagggcagggacagcggaaacagctgcccaccccccccatcccagcagctcagctaagccctgatgagaatgaagccacaggagttgtctgaggtgaacccagccgctcagccacacatggaagccattgcctttgcacatagttcttgggttctttttcctaaaaaggtaaggagctgaggtgtgtggttttttaatattaagaatatataatggaaaacacacgactgacgctcaggcatcttcccctactccccaacagatccccagaagacagcgtggaaggcagtgtagacagtaaatcgggcttcagttctatagccaagaagagatcagctgctgaaaccaccagtgggtaccccaggccacctgcctttgaacttggggatttgccatgtttgatcttgtcacatacttgcttttttacaagatgaactctttgtatttatgatttggggggcaatgaaaggtgcaatgcaggaactgctgctgccgagctcgctggtcacatgggggtgccaggcgggattctggaaaaccagtgcacttaaactgatcctgaagagagctgtcccagcactctggccaccaggagggccagattccccagaaactaccttttgcccaaagaacatgctcagtatttggggcatttcctcccacaaaccctgactgcttctgttacctcagggccttggtacctggatactgccacagaattggggcgggtgggggaggggcctatttttaaataaaataactgttcaaagttgggggttttttaaaaaattaagaaaaaggaaagctattctgtattgcaccttttcacaatttaatacattttcttacattttcctgtgattttcgaaactaaaccattgtgtgtcctgtagtgtcctggttgagctgccgctcagcagcttcctcggggggatttggaacacctgtgtctgtcgccgcactgcctgtgggaggggcccagagggctgctgggactggcgtctgtacacacttgtttggccttttctgtagttgatgctgtaaactctatggctttttaaaaacgatttcatgtttttatttagtattggaaatccaatacacttttttaatccaatcaaa

SEQ ID NO: 13725 - DNA, 4315 bp, Homo sapiens
  source 1..4315: mol_type = unassigned DNA
gggagggaaggaggcaagggctccgcggcgctgtcgccgccgctgccgctcactctcggggaagagatggcggcggagcggggagcccggcgactcctcagcaccccctccttctggctctactgcctgctgctgctcgggcgccgggcgccgggcgccgcggccgccaggagcggctccgcgccgcagtccccaggagccagcattcgaacgttcactccattttattttctggtggagccggtggatacactctcagttagaggctcttctgttatattaaactgttcagcatattctgagccttctccaaaaattgaatggaaaaaagatggaacttttttaaacttagtatcagatgatcgacgccagcttctcccggatggatctttatttatcagcaatgtggtgcattccaaacacaataaacctgatgaaggttattatcagtgtgtggccactgttgagagtcttggaactattatcagtagaacagcgaagctcatagtagcaggtcttccaagatttaccagccaaccagaaccttcctcagtttatgctgggaacaatgcaattctgaattgtgaagttaatgcagatttggtcccatttgtgaggtgggaacagaacagacaaccccttcttctggatgatagagttatcaaacttccaagtggaatgctggttatcagcaatgcaactgaaggagatggcgggctttatcgctgcgtagtggaaagtggtgggccaccaaagtatagtgatgaagttgaattgaaggttcttccagatcctgaggtgatatcagacttggtatttttgaaacagccttctcccttagtcagagtcattggtcaggatgtagtgttgccatgtgttgcttcaggacttcctactccaaccattaaatggatgaaaaatgaggaggcacttgacacagaaagctctgaaagattggtattgctggcaggtggtagcctggagatcagtgatgttactgaggatgatgctgggacttatttttgtatagctgataatggaaatgagacaattgaagctcaagcagagcttacagtgcaagctcaacctgaattcctgaagcagcctactaatatatatgctcacgaatctatggatattgtatttgaatgtgaagtgactggaaaaccaactccaactgtgaagtgggtcaaaaatggggatatggttatcccaagtgattattttaagattgtaaaggaacataatcttcaagttttgggtctggtgaaatcagatgaagggttctatcagtgcattgctgaaaatgatgttggaaatgcacaagctggagcccaactgataatccttgaacatgcaccagccacaacgggaccactgccttcagctcctcgggatgtcgtggcctccctggtctctacccgcttcatcaaattgacgtggcggacacctgcatcagatcctcacggagacaaccttacctactctgtgttctacaccaaggaagggattgctagggaacgtgttgagaataccagtcacccaggagagatgcaagtaaccattcaaaacctaatgccagcgaccgtgtacatctttagagttatggctcaaaataagcatggctcaggagagagttcagctccactgcgagtagaaacacaacctgaggttcagctccctggcccagcacctaaccttcgtgcatatgcagcttcgcctacctccatcactgttacgtgggaaacaccagtgtctggcaatggggaaattcagaattataaattgtactacatggaaaaggggactgataaagaacaggatgttgatgtttcaagtcactcttacaccattaatgggttgaaaaaatatacagagtatagtttccgagtggtggcctacaataaacatggtcctggagtttccacaccagatgttgctgttcgaacattgtcagatgttcccagtgctgctcctcagaatctgtccttggaagtgagaaattcaaagagtattatgattcactggcagccacctgctccagccacacaaaatgggcagattactggctacaagattcgctaccgaaaggcctcccgaaagagtgatgtcactgagaccttggtaagcgggacacagctgtctcagctgattgaaggtcttgatcgggggactgagtataatttccgagtggctgctctaacaatcaatggtacaggcccggcaactgactggctgtctgctgaaacttttgaaagtgacctagatgaaactcgtgttcctgaagtgcctagctctcttcacgtacgcccgctcgttactagcatcgtagtgagctggactcctccagagaatcagaacattgtggtcagaggttacgccattggttatggcattggcagccctcatgcccagaccatcaaagtggactataaacagcgctattacaccattgaaaatctggatcccagctctcactatgtgattaccctgaaagcatttaataacgtgggtgaaggcatccccctgtatgagagtgctgtgaccaggcctcacacagacacttctgaagttgatttatttgttattaatgctccatacactccagtgccagatcccactcccatgatgccaccagtgggagttcaggcttccattctgagtcatgacaccatcaggattacgtgggcagacaactcgctgcccaagcaccagaagattacagactcccgatactacaccgtccgatggaaaaccaacatcccagcaaacaccaagtacaagaatgcaaatgcaaccactttgagttatttggtgactggtttaaagccgaatacactctatgaattctctgtgatggtgaccaaaggtcgaagatcaagtacatggagtatgacagcccatgggaccacctttgaattagttccgacttctccacccaaggatgtgactgttgtgagtaaagaggggaaacctaagaccataattgtgaattggcagcctccctccgaagccaatggcaaaattacaggttacatcatatattacagtacagatgtgaatgcagagatacatgactgggttattgagcctgttgtgggaaacagactgactcaccagatacaagagttaactcttgacacaccatactacttcaaaatccaggcacggaactcaaagggcatgggacccatgtctgaagctgtccaattcagaacacctaaagcggactcctctgataaaatgcctaatgatcaagcctcagggtctggagggaaaggaagccggctgccagacctaggatccgactacaaacctccaatgagcggcagtaacagccctcatgggagccccacctctcctctggacagtaatatgctgctggtcataattgtttctgttggcgtcatcaccatcgtggtggttgtgattatcgctgtcttttgtacccgtcgtaccacctctcaccagaaaaagaaacgagctgcctgcaaatcagtgaatggctctcataagtacaaagggaattccaaagatgtgaaacctccagatctctggatccatcatgagagactggagctgaaacccattgataagtctccagacccaaaccccatcatgactgatactccaattcctcgcaactctcaagatatcacaccagttgacaactccatggacagcaatatccatcaaaggcgaaattcatacagagggcatgagtcagaggacagcatgtctacactggctggaaggcgaggaatgagaccaaaaatgatgatgccctttgactcccagccaccccagcaatccgttcgaaatacccccagcactgacaccatgccagcctcttcgtctcaaacatgctgcactgatcaccaggaccctgaaggtgctaccagctcctcttacttggccagctcccaagaggaagattcaggccagagtcttcccactgcccatgttcgcccttcccacccattgaagagcttcgccgtgccagcaatcccgcctccaggacctcccacctatgatcctgcattgccaagcacaccattactgtcccagcaagctctgaaccatcacattcactcagtgaagacagcctccatcgggactctaggaaggagccggcctcctatgccagtggttgttcccagtgcccctgaagtgcaggagaccacaaggatgttggaagactccgagagtagctatgaaccagatgagctgaccaaagagatggcccacctggaaggactaatgaaggacctaaacgctatcacaacagcatgacgaccttcaccaggacctgact

SEQ ID NO: 13726 - DNA, 4441 bp, Homo sapiens
  source 1..4441: mol_type = unassigned DNA
gggagggaaggaggcaagggctccgcggcgctgtcgccgccgctgccgctcactctcggggaagagatggcggcggagcggggagcccggcgactcctcagcaccccctccttctggctctactgcctgctgctgctcgggcgccgggcgccgggcgccgcggccgccaggagcggctccgcgccgcagtccccaggagccagcattcgaacgttcactccattttattttctggtggagccggtggatacactctcagttagaggctcttctgttatattaaactgttcagcatattctgagccttctccaaaaattgaatggaaaaaagatggaacttttttaaacttagtatcagatgatcgacgccagcttctcccggatggatctttatttatcagcaatgtggtgcattccaaacacaataaacctgatgaaggttattatcagtgtgtggccactgttgagagtcttggaactattatcagtagaacagcgaagctcatagtagcaggtcttccaagatttaccagccaaccagaaccttcctcagtttatgctgggaacaatgcaattctgaattgtgaagttaatgcagatttggtcccatttgtgaggtgggaacagaacagacaaccccttcttctggatgatagagttatcaaacttccaagtggaatgctggttatcagcaatgcaactgaaggagatggcgggctttatcgctgcgtagtggaaagtggtgggccaccaaagtatagtgatgaagttgaattgaaggttcttccagatcctgaggtgatatcagacttggtatttttgaaacagccttctcccttagtcagagtcattggtcaggatgtagtgttgccatgtgttgcttcaggacttcctactccaaccattaaatggatgaaaaatgaggaggcacttgacacagaaagctctgaaagattggtattgctggcaggtggtagcctggagatcagtgatgttactgaggatgatgctgggacttatttttgtatagctgataatggaaatgagacaattgaagctcaagcagagcttacagtgcaagctcaacctgaattcctgaagcagcctactaatatatatgctcacgaatctatggatattgtatttgaatgtgaagtgactggaaaaccaactccaactgtgaagtgggtcaaaaatggggatatggttatcccaagtgattattttaagattgtaaaggaacataatcttcaagttttgggtctggtgaaatcagatgaagggttctatcagtgcattgctgaaaatgatgttggaaatgcacaagctggagcccaactgataatccttgaacatgcaccagccacaacgggaccactgccttcagctcctcgggatgtcgtggcctccctggtctctacccgcttcatcaaattgacgtggcggacacctgcatcagatcctcacggagacaaccttacctactctgtgttctacaccaaggaagggattgctagggaacgtgttgagaataccagtcacccaggagagatgcaagtaaccattcaaaacctaatgccagcgaccgtgtacatctttagagttatggctcaaaataagcatggctcaggagagagttcagctccactgcgagtagaaacacaacctgaggttcagctccctggcccagcacctaaccttcgtgcatatgcagcttcgcctacctccatcactgttacgtgggaaacaccagtgtctggcaatggggaaattcagaattataaattgtactacatggaaaaggggactgataaagaacaggatgttgatgtttcaagtcactcttacaccattaatgggttgaaaaaatatacagagtatagtttccgagtggtggcctacaataaacatggtcctggagtttccacaccagatgttgctgttcgaacattgtcagatgttcccagtgctgctcctcagaatctgtccttggaagtgagaaattcaaagagtattatgattcactggcagccacctgctccagccacacaaaatgggcagattactggctacaagattcgctaccgaaaggcctcccgaaagagtgatgtcactgagaccttggtaagcgggacacagctgtctcagctgattgaaggtcttgatcgggggactgagtataatttccgagtggctgctctaacaatcaatggtacaggcccggcaactgactggctgtctgctgaaacttttgaaagtgacctagatgaaactcgtgttcctgaagtgcctagctctcttcacgtacgcccgctcgttactagcatcgtagtgagctggactcctccagagaatcagaacattgtggtcagaggttacgccattggttatggcattggcagccctcatgcccagaccatcaaagtggactataaacagcgctattacaccattgaaaatctggatcccagctctcactatgtgattaccctgaaagcatttaataacgtgggtgaaggcatccccctgtatgagagtgctgtgaccaggcctcacacagacacttctgaagttgatttatttgttattaatgctccatacactccagtgccagatcccactcccatgatgccaccagtgggagttcaggcttccattctgagtcatgacaccatcaggattacgtgggcagacaactcgctgcccaagcaccagaagattacagactcccgatactacaccgtccgatggaaaaccaacatcccagcaaacaccaagtacaagaatgcaaatgcaaccactttgagttatttggtgactggtttaaagccgaatacactctatgaattctctgtgatggtgaccaaaggtcgaagatcaagtacatggagtatgacagcccatgggaccacctttgaattagttccgacttctccacccaaggatgtgactgttgtgagtaaagaggggaaacctaagaccataattgtgaattggcagcctccctccgaagccaatggcaaaattacaggttacatcatatattacagtacagatgtgaatgcagagatacatgactgggttattgagcctgttgtgggaaacagactgactcaccagatacaagagttaactcttgacacaccatactacttcaaaatccaggcacggaactcaaagggcatgggacccatgtctgaagctgtccaattcagaacacctaaagcctcagggtctggagggaaaggaagccggctgccagacctaggatccgactacaaacctccaatgagcggcagtaacagccctcatgggagccccacctctcctctggacagtaatatgctgctggtcataattgtttctgttggcgtcatcaccatcgtggtggttgtgattatcgctgtcttttgtacccgtcgtaccacctctcaccagaaaaagaaacgagctgcctgcaaatcagtgaatggctctcataagtacaaagggaattccaaagatgtgaaacctccagatctctggatccatcatgagagactggagctgaaacccattgataagtctccagacccaaaccccatcatgactgatactccaattcctcgcaactctcaagatatcacaccagttgacaactccatggacagcaatatccatcaaaggcgaaattcatacagagggcatgagtcagaggacagcatgtctacactggctggaaggcgaggaatgagaccaaaaatgatgatgccctttgactcccagccaccccagcctgtgattagtgcccatcccatccattccctcgataaccctcaccatcatttccactccagcagcctcgcttctccagctcgcagtcatctctaccacccgggcagcccatggcccattggcacatccatgtccctttcagacagggccaattccacagaatccgttcgaaatacccccagcactgacaccatgccagcctcttcgtctcaaacatgctgcactgatcaccaggaccctgaaggtgctaccagctcctcttacttggccagctcccaagaggaagattcaggccagagtcttcccactgcccatgttcgcccttcccacccattgaagagcttcgccgtgccagcaatcccgcctccaggacctcccacctatgatcctgcattgccaagcacaccattactgtcccagcaagctctgaaccatcacattcactcagtgaagacagcctccatcgggactctaggaaggagccggcctcctatgccagtggttgttcccagtgcccctgaagtgcaggagaccacaaggatgttggaagactccgagagtagctatgaaccagatgagctgaccaaagagatggcccacctggaaggactaatgaaggacctaaacgctatcacaacagcatgacgaccttcaccaggacctgact

SEQ ID NO: 13727 - DNA, 374 bp, Homo sapiens
  source 1..374: mol_type = unassigned DNA
acagaacagacaaccccttcttctggatgatagagttatcaaacttccaagtggaatgctggttatcagcaatgcaactgaaggagatggcgggctttatcgctgcgtagtggaaagtggtgggccaccaaagtatagtgatgaagttgaattgaaggttcttccagatcctgaggtgatatcagacttggtatttttgaaacagccttctcccttagtcagagtcattggtcaggatgtagtgttgccatgtgttgcttcaggacttcctactccaaccattaaatggatgaaaaatgaggaggcacttgacacagaaaggtaagtgttgtctgcctaaaagccttcttcagccttagcttgagactttgtca

SEQ ID NO: 13728 - DNA, 5895 bp, Homo sapiens
  source 1..5895: mol_type = unassigned DNA
ggaaatgagacaattgaagctcaagcagagcttacagtgcaagctcaacctgaattcctgaagcagcctactaatatatatgctcacgaatctatggatattgtatttgaatgtgaagtgactggaaaaccaactccaactgtgaagtgggtcaaaaatggggatatggttatcccaagtgattattttaagattgtaaaggaacataatcttcaagttttgggtctggtgaaatcagatgaagggttctatcagtgcattgctgaaaatgatgttggaaatgcacaagctggagcccaactgataatccttgaacatgatgttgccatcccaacattacctcccacttcactgaccagtgccactactgaccatctagcaccagccacaacgggaccactgccttcagctcctcgggatgtcgtggcctccctggtctctacccgcttcatcaaattgacgtggcggacacctgcatcagatcctcacggagacaaccttacctactctgtgttctacaccaaggaagggattgctagggaacgtgttgagaataccagtcacccaggagagatgcaagtaaccattcaaaacctaatgccagcgaccgtgtacatctttagagttatggctcaaaataagcatggctcaggagagagttcagctccactgcgagtagaaacacaacctgaggttcagctccctggcccagcacctaaccttcgtgcatatgcagcttcgcctacctccatcactgttacgtgggaaacaccagtgtctggcaatggggaaattcagaattataaattgtactacatggaaaaggggactgataaagaacaggatgttgatgtttcaagtcactcttacaccattaatgggttgaaaaaatatacagagtatagtttccgagtggtggcctacaataaacatggtcctggagtttccacaccagatgttgctgttcgaacattgtcagatgttcccagtgctgctcctcagaatctgtccttggaagtgagaaattcaaagagtattatgattcactggcagccacctgctccagccacacaaaatgggcagattactggctacaagattcgctaccgaaaggcctcccgaaagagtgatgtcactgagaccttggtaagcgggacacagctgtctcagctgattgaaggtcttgatcgggggactgagtataatttccgagtggctgctctaacaatcaatggtacaggcccggcaactgactggctgtctgctgaaacttttgaaagtgacctagatgaaactcgtgttcctgaagtgcctagctctcttcacgtacgcccgctcgttactagcatcgtagtgagctggactcctccagagaatcagaacattgtggtcagaggttacgccattggttatggcattggcagccctcatgcccagaccatcaaagtggactataaacagcgctattacaccattgaaaatctggatcccagctctcactatgtgattaccctgaaagcatttaataacgtgggtgaaggcatccccctgtatgagagtgctgtgaccaggcctcacacagtgccagatcccactcccatgatgccaccagtgggagttcaggcttccattctgagtcatgacaccatcaggattacgtgggcagacaactcgctgcccaagcaccagaagattacagactcccgatactacaccgtccgatggaaaaccaacatcccagcaaacaccaagtacaagaatgcaaatgcaaccactttgagttatttggtgactggtttaaagccgaatacactctatgaattctctgtgatggtgaccaaaggtcgaagatcaagtacatggagtatgacagcccatgggaccacctttgaattagttccgacttctccacccaaggatgtgactgttgtgagtaaagaggggaaacctaagaccataattgtgaattggcagcctccctccgaagccaatggcaaaattacaggttacatcatatattacagtacagatgtgaatgcagagatacatgactgggttattgagcctgttgtgggaaacagactgactcaccagatacaagagttaactcttgacacaccatactacttcaaaatccaggcacggaactcaaagggcatgggacccatgtctgaagctgtccaattcagaacacctaaagcctcagggtctggagggaaaggaagccggctgccagacctaggatccgactacaaacctccaatgagcggcagtaacagccctcatgggagccccacctctcctctggacagtaatatgctgctggtcataattgtttctgttggcgtcatcaccatcgtggtggttgtgattatcgctgtcttttgtacccgtcgtaccacctctcaccagaaaaagaaacgagctgcctgcaaatcagtgaatggctctcataagtacaaagggaattccaaagatgtgaaacctccagatctctggatccatcatgagagactggagctgaaacccattgataagtctccagacccaaaccccatcatgactgatactccaattcctcgcaactctcaagatatcacaccagttgacaactccatggacagcaatatccatcaaaggcgaaattcatacagagggcatgagtcagaggacagcatgtctacactggctggaaggcgaggaatgagaccaaaaatgatgatgccctttgactcccagccaccccagcctgtgattagtgcccatcccatccattccctcgataaccctcaccatcatttccactccagcagcctcgcttctccagctcgcagtcatctctaccacccgggcagcccatggcccattggcacatccatgtccctttcagacagggccaattccacagaatccgttcgaaatacccccagcactgacaccatgccagcctcttcgtctcaaacatgctgcactgatcaccaggaccctgaaggtgctaccagctcctcttacttggccagctcccaagaggaagattcaggccagagtcttcccactgcccatgttcgcccttcccacccattgaagagcttcgccgtgccagcaatcccgcctccaggacctcccacctatgatcctgcattgccaagcacaccattactgtcccagcaagctctgaaccatcacattcactcagtgaagacagcctccatcgggactctaggaaggagccggcctcctatgccagtggttgttcccagtgcccctgaagtgcaggagaccacaaggatgttggaagactccgagagtagctatgaaccagatgagctgaccaaagagatggcccacctggaaggactaatgaaggacctaaacgctatcacaacagcatgacgaccttcaccaggacctgacttcaaacctgagtctggaagtcttggaacttacccttgaaaacaaggaattgtacagagtacgagaggacagcacttgagaacacagaatgagccagcagactggccagcgcctctgtgtagggctggctccaggcatggccacctgccttcccctggtcagcctggaagaagcctgtgtcgaggcagcttccctttgcctgctgatattctgcaggactgggcaccatgggccaaaattttgtgtccagggaagaggcgagaagtgcaacctgcatttcactttgtggtcaggccgtgtctttgtgctgtgactgcatcacctttatggagtgtagacattggcatttatgtacaattttatttgtgtcttattttattttaccttcaaaaacaaaaacgccatccaaaaccaaggaagtccttggtgttctccacaagtggttgacatttgactgcttgttccaattatgtatggaaagtctttgacagtgtgggtcgttcctggggttggcttgttttttggtttcatttttattttttaattctgagtcattgcatcctctaccagctgttaatccatcactctgagggggaggaaatgttgcattgctgtttgtaagctttttttattatttttttattataattattaaaggcctgactctttcctctcatcactgtgagattacagatctatttgaattgaatgaaatgtaacattgaaaagacttgtttgttgctttctgtgcagtttcagtattggggcgggtggggggctgggggttggtaataggaaatggaggggctgctgaggtcctgtgaatgtttctgtcattgtactttcttccagaagcctgcagagaatggaagcatcttctttattgtcctttcctggcatgtccatccttattgtcactacgttgcaactggagtttgatttggatctggttttaaaattcttctgtgcaatagatgggtttgaggatttagcggccctgatgtcttggtcatagcctggtaagaatgtccatgctgaggagccagatgttgtatttctaactgcctgagtcacacagaatagggtaagagcctgaccccattctgtaaatcagaaagcaaggatggagaccctttcctgctgctattattggctctctttgaggaagttggaggttaaggaaggaacttgtttgtttccgtatacgactccttcttctctctagttcagtcttcagccagtccagcgctctcttccacacttcagagccccttcagagaaagcattagcaggaatgagacaaggcagagctgcagtgccccctgaggcttccacacatctttctgaatattatttttcaagtaacaagggcagggacagcggaaacagctgcccaccccccccatcccagcagctcagctaagccctgatgagaatgaagccacaggagttgtctgaggtgaacccagccgctcagccacacatggaagccattgcctttgcacatagttcttgggttctttttcctaaaaaggtaaggagctgaggtgtgtggttttttaatattaagaatatataatggaaaacacacgactgacgctcaggcatcttcccctactccccaacagatccccagaagacagcgtggaaggcagtgtagacagtaaatcgggcttcagttctatagccaagaagagatcagctgctgaaaccaccagtgggtaccccaggccacctgcctttgaacttggggatttgccatgtttgatcttgtcacatacttgcttttttacaagatgaactctttgtatttatgatttggggggcaatgaaaggtgcaatgcaggaactgctgctgccgagctcgctggtcacatgggggtgccaggcgggattctggaaaaccagtgcacttaaactgatcctgaagagagctgtcccagcactctggccaccaggagggccagattccccagaaactaccttttgcccaaagaacatgctcagtatttggggcatttcctcccacaaaccctgactgcttctgttacctcagggccttggtacctggatactgccacagaattggggcgggtgggggaggggcctatttttaaataaaataactgttcaaagttgggggttttttaaaaaattaagaaaaaggaaagctattctgtattgcaccttttcacaatttaatacattttcttacattttcctgtgattttcgaaactaaaccattgtgtgtcctgtagtgtcctggttgagctgccgctcagcagcttcctcggggggatttggaacacctgtgtctgtcgccgcactgcctgtgggaggggcccagagggctgctgggactggcgtctgtacacacttgtttggccttttctgtagttgatgctgtaaactctatggctttttaaaaacgatttcatgtttttatttagtattggaaatccaatacacttttttaatcc

SEQ ID NO: 13729 - DNA, 566 bp, Homo sapiens
  source 1..566: mol_type = unassigned DNA
agcaaacggcgagactctgtgggcgtgggaccctctgagccagcaccagccacaacgggaccactgccttcagctcctcgggatgtcgtggcctccctggtctctacccgcttcatcaaattgacgtggcggacacctgcatcagatcctcacggagacaaccttacctactctgtgttctacaccaaggaagggattgctagggaacgtgttgagaataccagtcacccaggagagatgcaagtaaccattcaaaacctaatgccagcgaccgtgtacatctttagagttatggctcaaaataagcatggctcaggagagagttcagctccactgcgagtagaaacacaacctgaggttcagctccctggcccagcacctaaccttcgtgcatatgcagcttcgcctacctccatcactgttacgtgggaaacaccagtgtctggcaatggggaaattcagaattataaattgtactacatggaaaaggggactgataaagaacaggatgttgatgtttcaagtcactcttacaccattaatgggttgaaaaaatatacagagta

SEQ ID NO: 13730 - DNA, 468 bp, Homo sapiens
  source 1..468: mol_type = unassigned DNA
acggtgcgctgcacccactgacctgcgcccactgtctggcactccctagtgagatgaacccggtacctcagatggaaatgcagaaatcacccatcttctgcgtcgctcacgctggaagctgtagaccggagctgttcctattcggccatcttcactcctccccctgttgcaccagccacaacgggaccactgccttcagctcctcgggatgtcgtggcctccctggtctctacccgcttcatcaaattgacgtggcggacacctgcatcagatcctcacggagacaaccttacctactctgtgttctacaccaaggaagggattgctagggaacgtgttgagaataccagtcacccaggagagatgcaagtaaccattcaaaacctaatgccagcgaccgtgtacatctttagagttatggctcaaaataagcatggctcaggagagagttcagctccactgcgagta

SEQ ID NO: 13731 - DNA, 459 bp, Homo sapiens
  source 1..459: mol_type = unassigned DNA
cacacaaaatgggcagattactggctacaagattcgctaccgaaaggcctcccgaaagagtgatgtcactgagaccttggtaagcgggacacagctgtctcagctgattgaaggtcttgatcgggggactgagtataatttccgagtggctgctctaacaatcaatggtacaggcccggcaactgactggctgtctgctgaaacttttgaaagtgacctagatggtaagaataacaattggcaagactggaacacaatagatactagctgtagtcaaatgagtcaaactggaaagccacagacttggggtggatatggctcaagtctgtgaactttagtgcatcacgctgctgttgttcctgtattgcatcgaggctgctggaatggattttttgcagtgccttgtagagaactgtcctttcaagcagaactagagcaaataaaaatgtgtatgtgcta

SEQ ID NO: 13732 - DNA, 1046 bp, Homo sapiens
  source 1..1046: mol_type = unassigned DNA
atgtttcactgttgaggctgctcagtggcatagggcacatgctggtaactaacctccacgtttaacatctagggcatgagtcagaggacagcatgtctacactggctggaaggcgaggaatgagaccaaaaatgatgatgccctttgactcccagccaccccagcctgtgattagtgcccatcccatccattccctcgataaccctcaccatcatttccactccagcagcctcgcttctccagctcgcagtcatctctaccacccgggcagcccatggcccattggcacatccatgtccctttcagacagggccaattccacagaatccgttcgaaatacccccagcactgacaccatgccagcctcttcgtctcaaacatgctgcactgatcaccaggaccctgaaggtgctaccagctcctcttacttggccagctcccaagaggaagattcaggccagagtcttcccactgcccatgttcgcccttcccacccattgaagagcttcgccgtgccagcaatcccgcctccaggacctcccacctatgatcctgcattgccaagcacaccattactgtcccagcaagctctgaaccatcacattcactcagtgaagacagcctccatcgggactctaggaaggagccggcctcctatgccagtggttgttcccagtgcccctgaagtgcaggagaccacaaggatgttggaagactccgagagtagctatgaaccagatgagctgaccaaagagatggcccacctggaaggactaatgaaggacctaaacgctatcacaacagcatgacgaccttcaccaggacctgacttcaaacctgagtctggaagtcttggaacttacccttgaaaacaaggaattgtacagagtacgagaggacagcacttgagaacacagaatgagccagcagactggccagcgcctctgtgtagggctggctccaggcatggccacctgccttcccctggtcagcctggaagaagcctgtgtcgaggcagcttccctttgcctgctgatattctgcag

SEQ ID NO: 13733 - DNA, 543 bp, Homo sapiens
  source 1..543: mol_type = unassigned DNA
catatttaatggcaaaagaaatgctaacatttagactttcctgctgtagaatccgttcgaaatacccccagcactgacaccatgccagcctcttcgtctcaaacatgctgcactgatcaccaggaccctgaaggtgctaccagctcctcttacttggccagctcccaagaggaagattcaggccagagtcttcccactgcccatgttcgcccttcccacccattgaagagcttcgccgtgccagcaatcccgcctccaggacctcccacctatgatcctgcattgccaagcacaccattactgtcccagcaagctctgaaccatcacattcactcagtgaagacagcctccatcgggactctaggaaggagccggcctcctatgccagtggttgttcccagtgcccctgaagtgcaggagaccacaaggatgttggaagactccgagagtgtaagttcgtggggccatcagtccagccagattgcctgggaacatgccccagggcctgagactgctggtcaagctgataatctgtgcatacca

SEQ ID NO: 13734 - DNA, 7088 bp, Homo sapiens
  source 1..7088: mol_type = unassigned DNA
gagggaggcgccctggagtctcccctccagcgagaggggctgcgcgggccgggccgggccgggctgggctggagcagcggcggccgcgggagccgagcttgcagcgagggaccggctgaggcgcgcgggagggaaggaggcaagggctccgcggcgctgtcgccgccgctgccgctcactctcggggaagagatggcggcggagcggggagcccggcgactcctcagcaccccctccttctggctctactgcctgctgctgctcgggcgccgggcgccgggcgccgcggccgccaggagcggctccgcgccgcagtccccaggagccagcattcgaacgttcactccattttattttctggtggagccggtggatacactctcagttagaggctcttctgttatattaaactgttcagcatattctgagccttctccaaaaattgaatggaaaaaagatggaacttttttaaacttagtatcagatgatcgacgccagcttctcccggatggatctttatttatcagcaatgtggtgcattccaaacacaataaacctgatgaaggttattatcagtgtgtggccactgttgagagtcttggaactattatcagtagaacagcgaagctcatagtagcaggtcttccaagatttaccagccaaccagaaccttcctcagtttatgctgggaacaatgcaattctgaattgtgaagttaatgcagatttggtcccatttgtgaggtgggaacagaacagacaaccccttcttctggatgatagagttatcaaacttccaagtggaatgctggttatcagcaatgcaactgaaggagatggcgggctttatcgctgcgtagtggaaagtggtgggccaccaaagtatagtgatgaagttgaattgaaggttcttccagatcctgaggtgatatcagacttggtatttttgaaacagccttctcccttagtcagagtcattggtcaggatgtagtgttgccatgtgttgcttcaggacttcctactccaaccattaaatggatgaaaaatgaggaggcacttgacacagaaagctctgaaagattggtattgctggcaggtggtagcctggagatcagtgatgttactgaggatgatgctgggacttatttttgtatagctgataatggaaatgagacaattgaagctcaagcagagcttacagtgcaagctcaacctgaattcctgaagcagcctactaatatatatgctcacgaatctatggatattgtatttgaatgtgaagtgactggaaaaccaactccaactgtgaagtgggtcaaaaatggggatatggttatcccaagtgattattttaagattgtaaaggaacataatcttcaagttttgggtctggtgaaatcagatgaagggttctatcagtgcattgctgaaaatgatgttggaaatgcacaagctggagcccaactgataatccttgaacatgcaccagccacaacgggaccactgccttcagctcctcgggatgtcgtggcctccctggtctctacccgcttcatcaaattgacgtggcggacacctgcatcagatcctcacggagacaaccttacctactctgtgttctacaccaaggaagggattgctagggaacgtgttgagaataccagtcacccaggagagatgcaagtaaccattcaaaacctaatgccagcgaccgtgtacatctttagagttatggctcaaaataagcatggctcaggagagagttcagctccactgcgagtagaaacacaacctgaggttcagctccctggcccagcacctaaccttcgtgcatatgcagcttcgcctacctccatcactgttacgtgggaaacaccagtgtctggcaatggggaaattcagaattataaattgtactacatggaaaaggggactgataaagaacaggatgttgatgtttcaagtcactcttacaccattaatgggttgaaaaaatatacagagtatagtttccgagtggtggcctacaataaacatggtcctggagtttccacaccagatgttgctgttcgaacattgtcagatgttcccagtgctgctcctcagaatctgtccttggaagtgagaaattcaaagagtattatgattcactggcagccacctgctccagccacacaaaatgggcagattactggctacaagattcgctaccgaaaggcctcccgaaagagtgatgtcactgagaccttggtaagcgggacacagctgtctcagctgattgaaggtcttgatcgggggactgagtataatttccgagtggctgctctaacaatcaatggtacaggcccggcaactgactggctgtctgctgaaacttttgaaagtgacctagatgaaactcgtgttcctgaagtgcctagctctcttcacgtacgcccgctcgttactagcatcgtagtgagctggactcctccagagaatcagaacattgtggtcagaggttacgccattggttatggcattggcagccctcatgcccagaccatcaaagtggactataaacagcgctattacaccattgaaaatctggatcccagctctcactatgtgattaccctgaaagcatttaataacgtgggtgaaggcatccccctgtatgagagtgctgtgaccaggcctcacacagacacttctgaagttgatttatttgttattaatgctccatacactccagtgccagatcccactcccatgatgccaccagtgggagttcaggcttccattctgagtcatgacaccatcaggattacgtgggcagacaactcgctgcccaagcaccagaagattacagactcccgatactacaccgtccgatggaaaaccaacatcccagcaaacaccaagtacaagaatgcaaatgcaaccactttgagttatttggtgactggtttaaagccgaatacactctatgaattctctgtgatggtgaccaaaggtcgaagatcaagtacatggagtatgacagcccatgggaccacctttgaattagttccgacttctccacccaaggatgtgactgttgtgagtaaagaggggaaacctaagaccataattgtgaattggcagcctccctccgaagccaatggcaaaattacaggttacatcatatattacagtacagatgtgaatgcagagatacatgactgggttattgagcctgttgtgggaaacagactgactcaccagatacaagagttaactcttgacacaccatactacttcaaaatccaggcacggaactcaaagggcatgggacccatgtctgaagctgtccaattcagaacacctaaagcggactcctctgataaaatgcctaatgatcaagcctcagggtctggagggaaaggaagccggctgccagacctaggatccgactacaaacctccaatgagcggcagtaacagccctcatgggagccccacctctcctctggacagtaatatgctgctggtcataattgtttctgttggcgtcatcaccatcgtggtggttgtgattatcgctgtcttttgtacccgtcgtaccacctctcaccagaaaaagaaacgagctgcctgcaaatcagtgaatggctctcataagtacaaagggaattccaaagatgtgaaacctccagatctctggatccatcatgagagactggagctgaaacccattgataagtctccagacccaaaccccatcatgactgatactccaattcctcgcaactctcaagatatcacaccagttgacaactccatggacagcaatatccatcaaaggcgaaattcatacagagggcatgagtcagaggacagcatgtctacactggctggaaggcgaggaatgagaccaaaaatgatgatgccctttgactcccagccaccccagcctgtgattagtgcccatcccatccattccctcgataaccctcaccatcatttccactccagcagcctcgcttctccagctcgcagtcatctctaccacccgggcagcccatggcccattggcacatccatgtccctttcagacagggccaattccacagaatccgttcgaaatacccccagcactgacaccatgccagcctcttcgtctcaaacatgctgcactgatcaccaggaccctgaaggtgctaccagctcctcttacttggccagctcccaagaggaagattcaggccagagtcttcccactgcccatgttcgcccttcccacccattgaagagcttcgccgtgccagcaatcccgcctccaggacctcccacctatgatcctgcattgccaagcacaccattactgtcccagcaagctctgaaccatcacattcactcagtgaagacagcctccatcgggactctaggaaggagccggcctcctatgccagtggttgttcccagtgcccctgaagtgcaggagaccacaaggatgttggaagactccgagagtagctatgaaccagatgagctgaccaaagagatggcccacctggaaggactaatgaaggacctaaacgctatcacaacagcatgacgaccttcaccaggacctgacttcaaacctgagtctggaagtcttggaacttacccttgaaaacaaggaattgtacagagtacgagaggacagcacttgagaacacagaatgagccagcagactggccagcgcctctgtgtagggctggctccaggcatggccacctgccttcccctggtcagcctggaagaagcctgtgtcgaggcagcttccctttgcctgctgatattctgcaggactgggcaccatgggccaaaattttgtgtccagggaagaggcgagaagtgcaacctgcatttcactttgtggtcaggccgtgtctttgtgctgtgactgcatcacctttatggagtgtagacattggcatttatgtacaattttatttgtgtcttattttattttaccttcaaaaacaaaaacgccatccaaaaccaaggaagtccttggtgttctccacaagtggttgacatttgactgcttgttccaattatgtatggaaagtctttgacagtgtgggtcgttcctggggttggcttgttttttggtttcatttttattttttaattctgagtcattgcatcctctaccagctgttaatccatcactctgagggggaggaaatgttgcattgctgtttgtaagctttttttattatttttttattataattattaaaggcctgactctttcctctcatcactgtgagattacagatctatttgaattgaatgaaatgtaacattgaaaagacttgtttgttgctttctgtgcagtttcagtattggggcgggtggggggctgggggttggtaataggaaatggaggggctgctgaggtcctgtgaatgtttctgtcattgtactttcttccagaagcctgcagagaatggaagcatcttctttattgtcctttcctggcatgtccatccttattgtcactacgttgcaactggagtttgatttggatctggttttaaaattcttctgtgcaatagatgggtttgaggatttagcggccctgatgtcttggtcatagcctggtaagaatgtccatgctgaggagccagatgttgtatttctaactgcctgagtcacacagaatagggtaagagcctgaccccattctgtaaatcagaaagcaaggatggagaccctttcctgctgctattattggctctctttgaggaagttggaggttaaggaaggaacttgtttgtttccgtatacgactccttcttctctctagttcagtcttcagccagtccagcgctctcttccacacttcagagccccttcagagaaagcattagcaggaatgagacaaggcagagctgcagtgccccctgaggcttccacacatctttctgaatattatttttcaagtaacaagggcagggacagcggaaacagctgcccaccccccccatcccagcagctcagctaagccctgatgagaatgaagccacaggagttgtctgaggtgaacccagccgctcagccacacatggaagccattgcctttgcacatagttcttgggttctttttcctaaaaaggtaaggagctgaggtgtgtggttttttaatattaagaatatataatggaaaacacacgactgacgctcaggcatcttcccctactccccaacagatccccagaagacagcgtggaaggcagtgtagacagtaaatcgggcttcagttctatagccaagaagagatcagctgctgaaaccaccagtgggtaccccaggccacctgcctttgaacttggggatttgccatgtttgatcttgtcacatacttgcttttttacaagatgaactctttgtatttatgatttggggggcaatgaaaggtgcaatgcaggaactgctgctgccgagctcgctggtcacatgggggtgccaggcgggattctggaaaaccagtgcacttaaactgatcctgaagagagctgtcccagcactctggccaccaggagggccagattccccagaaactaccttttgcccaaagaacatgctcagtatttggggcatttcctcccacaaaccctgactgcttctgttacctcagggccttggtacctggatactgccacagaattggggcgggtgggggaggggcctatttttaaataaaataactgttcaaagttgggggttttttaaaaaattaagaaaaaggaaagctattctgtattgcaccttttcacaatttaatacattttcttacattttcctgtgattttcgaaactaaaccattgtgtgtcctgtagtgtcctggttgagctgccgctcagcagcttcctcggggggatttggaacacctgtgtctgtcgccgcactgcctgtgggaggggcccagagggctgctgggactggcgtctgtacacacttgtttggccttttctgtagttgatgctgtaaactctatggctttttaaaaacgatttcatgtttttatttagtattggaaatccaatacacttttttaatccaatcaaac

SEQ ID NO: 13735 - DNA, 5558 bp, Homo sapiens
  source 1..5558: mol_type = unassigned DNA
gctactcccaccccgccccgccccgtcattgtccccgtcggtctcttttctcttccgtcctaaaagctctgcgagccgctcccttctcccggtgccccgcgtctgtccatcctcagtgggtcagacgagcaggatggagggctgcatgggggaggagtcgtttcagatgtgggagctcaatcggcgcctggaggcctacctggcccgggtcaaggcgctggaggagcagaatgagctgctcagcgcggagctcggggggctccgggcacaatccgcggacacctcctggcgggcgcatgccgacgacgagctggcggccctgcgggccctcgttgaccaacgctggcgggagaagcacgcggccgaggtggcgcgcgacaacctggctgaagagctggagggcgtggcaggccgatgccagcagctgcggctggcccgggagcggacgacggaggaggtagcccgcaaccggcgcgccgtcgaggcagagaaatgcgcccgggcctggctgagtagccaggtggcagagctggagcgcgagctagaggctctacgcgtggcgcacgaggaggagcgcgtcggcctgaacgcgcaggctgcctgtgccccccgctgccccgcgccgccccgcgggcctcccgcgccggccccggaggtagaggagctggcaaggcgactgggcgaggcgtggcgcggggcagtgcgcggctaccaggagcgcgtggcacacatggagacgtcgctgggccaggcccgcgagcggctgggccgggcggtgcagggtgcccgcgagggccgcctggagctgcagcagctccaggctgagcgcggaggcctcctggagcgcagggcagcgttggaacagaggttggagggccgctggcaggagcggctgcgggctactgaaaagttccagctggctgtggaggccctggagcaggagaaacagggcctacagagccagatcgctcaggtcctggaaggtcggcagcagctggcgcacctcaagatgtccctcagcctggaggtggccacgtacaggaccctcctggaggctgagaactcccggctgcaaacacctggcggtggctccaagacttccctcagctttcaggaccccaagctggagctgcaattccctaggaccccagagggccggcgtcttggatctttgctcccagtcctgagcccaacttccctcccctcacccttgcctgctacccttgagacacctgtgccagcctttcttaagaaccaagaattcctccaggcccgtacccctaccttggccagcacccccatcccccccacacctcaggcaccctctcctgctgtagatgcagagatcagagcccaggatgctcctctctctctgctccagacacagggtgggaggaaacaggctccagagcccctgcgggctgaagccagggtggccattcctgccagcgtcctgcctggaccagaggagcctgggggccagcggcaagaggccagtacaggccagtccccagaggaccatgcctccttggcaccacccctcagccctgaccactccagtttagaggctaaggatggagaatccggtgggtctagagtgttcagcatatgccgaggggaaggtgaagggcaaatctgggggttggtagagaaagaaacagccatagagggcaaagtggtaagcagcttgcagcaggaaatatgggaagaagaggatctaaacaggaaggaaatccaggactcccaggttcctttggaaaaagaaaccctgaagtctctgggagaggagattcaagagtcactgaagactctggaaaaccagagccatgagacactagaaagggagaatcaagaatgtccgaggtctttagaagaagacttagaaacactaaaaagtctagaaaaggaaaataaagagctattaaaggatgtggaggtagtgagacctctagaaaaagaggctgtaggccaacttaagcctacaggaaaagaggacacacagacattgcaatccctgcaaaaggagaatcaagaactaatgaaatctcttgaaggtaatctagagacatttttatttccaggaacggaaaatcaagaattagtaagttctctgcaagagaacttagagtcattgacagctctggaaaaggagaatcaagagccactgagatctccagaagtaggggatgaggaggcactgagacctctgacaaaggagaatcaggaacccctgaggtctcttgaagatgagaacaaagaggcctttagatctctagaaaaagagaaccaggagccactgaagactctagaagaagaggaccagagtattgtgagacctctagaaacagagaatcacaaatcactgaggtctttagaagaacaggaccaagagacattgagaactcttgaaaaagagactcaacagcgacggaggtctctaggggaacaggatcagatgacattaagacccccagaaaaagtggatctagaaccactgaagtctcttgaccaggagatagctagacctcttgaaaatgagaatcaagagttcttaaagtcactcaaagaagagagcgtagaggcagtaaaatctttagaaacagagatcctagaatcactgaagtctgcgggacaagagaacctggaaacactgaaatctccagaaactcaagcaccactgtggactccagaagaaataaatcagggggcaatgaatcctctagaaaaggaaattcaagaaccactggagtctgtggaagtgaaccaagagacattcagactcctggaagaggagaatcaggaatcattgagatctctgggagcatggaacctggagaatttgagatctccagaggaggtagacaaggaaagtcaaaggaatctggaagaggaagagaacctgggaaagggagagtaccaagagtcactgaggtctctggaggaggagggacaggagctgccgcagtctgcagatgtgcagaggtgggaagatacggtggagaaggaccaagaactggctcaggaaagccctcctgggatggctggagtggaaaatgaggatgaggcagagctgaatctgagggagcaggatggcttcactgggaaggaggaggtggtagagcagggagagctgaatgccacagaggaggtctggatcccaggcgaggggcacccagagagccctgagcccaaagagcagagaggcctggttgagggagccagtgtgaagggaggggctgagggcctccaggaccctgaagggcaatcacaacaggtgggggccccaggcctccaggctccccaggggctgccagaggcgatagagcccctggtggaagatgatgtggccccagggggtgaccaagcctccccagaggtcatgttggggtcagagcctgccatgggtgagtctgctgcgggagctgagccaggcccggggcagggggtgggagggctgggggacccaggccatctgaccagggaagaggtgatggaaccacccctggaagaggagagtttggaggcaaagagggttcagggcttggaagggcctagaaaggacctagaggaggcaggtggtctggggacagagttctccgagctgcctgggaagagcagagacccttgggagcctcccagggagggtagggaggagtcagaggctgaggcccccaggggagcagaggaggcgttccctgctgagaccctgggccacactggaagtgatgccccttcaccttggcctctggggtcagaggaagctgaggaggatgtaccaccagtgctggtctcccccagcccaacgtacaccccgatcctggaagatgcccctgggcctcagcctcaggctgaagggagtcaggaggctagctggggggtgcaggggagggctgaagccctggggaaagtagagagcgagcaggaggagttgggttctggggagatccccgagggcccccaggaggaaggggaggagagcagagaagagagcgaggaggatgagctcggggagacccttccagactccactcccctgggcttctacctcaggtcccccacctcccccaggtgggaccccactggagagcagaggccaccccctcaaggggagactggaaaggagggctgggatcctgctgtcctggcttccgagggccttgaggccccaccctcagaaaaggaggagggggaggagggagaagaggagtgtggccgtgactctgacctgtcagaagaatttgaggacctggggactgaggcaccttttcttcctggggtccctggggaggtggcagaacctctgggccaggtgccccagctgctactggatcctgcagcctgggatcgagatggggagtccgatgggtttgcagatgaggaagaaagtggggaggagggagaggaggatcaggaggaggggagggagccaggggctgggcggtgggggccagggtcttctgttggcagcctccaggccctgagtagctcccagagaggggaattcctggagtctgattctgtgagtgtcagtgtcccctgggatgacagcttgaggggtgcagtggctggtgcccccaagactgccctggaaacggagtcccaggacagtgctgagccttctggctcagaggaagagtctgaccctgtttccttggagagggaggacaaagtccctggccctctagagatccccagtgggatggaggatgcaggcccaggggcagacatcattggtgttaatggccagggtcccaacttggaggggaagtcacagcatgtgaatgggggagtgatgaacgggctggagcagtctgaggaagtggggcaaggaatgccgctagtctctgagggagaccgagggagcccctttcaggaggaggaggggagtgctctgaagacctcttgggcaggggctcctgttcacctgggccagggtcagttcctgaagttcactcagagggaaggagatagagagtcctggtcctcaggggaggactaggaaaagaccatctgcccggcactggggacttaggggtgcggggaggggaaggacgcctccaagcccgctccctgctcaggagcagcactcttaacttacgatctcttgacatatggtttctggctgagaggcctggcccgctaaggtgaaaaggggtgtggcaaaggagcctactccaagaatggaggctgtaggaatataacctcccaccctgcaaagggaatctcttgcctgctccatctcataggctaagtcagctgaatcccgatagtactaggtccccttccctccgcatcccgtcagctggaaaaggcctgtggcccagaggcttctccaaagggagggtgacatgctggcttttgtgcccaagctcaccagccctgcgccacctcactgcagtagtgcaccatctcactgcagtagcacgccctcctgggccgtctggcctgtggctaatggaggtgacggcactcccatgtgctgactccccccatccctgccacgctgtggccctgcctggctagtccctgcctgaataaagtaatgcctccgcttcaaa

SEQ ID NO: 13736 - DNA, 2357 bp, Homo sapiens
  source 1..2357: mol_type = unassigned DNA
gggtgtgatgcgagcgtcacggtggggatgctgctggctgcgcggcgctgagggccagcgagagcgagagcccgcccggggcggaggacggactcatccggatctggctgcagcgtgggctcggagctcccccttcctctcggtctccctctcggcccccctttatttccttcttgctttgcgtctttaacacctctcgaccctgtcctccccccgccactggaagtcttcccgtctctaaatggaattagtggagcccggagcctctggtgtaacgcacagacatgatccatgggcgcagcgtgcttcacattgtagcaagtttaatcatcctccatttgtctggggcaaccaagaaaggaacagaaaagcaaaccacctcagaaacacagaagtcagtgcagtgtggaacttggacaaaacatgcagagggaggtatctttacctctcccaactatcccagcaagtatccccctgaccgggaatgcatctacatcatagaagccgctccaagacagtgcattgaactttactttgatgaaaagtactctattgaaccgtcttgggagtgcaaatttgatcatattgaagttcgagatggaccttttggcttttctccaataattggacgtttctgtggacaacaaaatccacctgtcataaaatccagtggaagatttctatggattaaattttttgctgatggagagctggaatctatgggattttcagctcgatacaatttcacacctgatcctgactttaaggaccttggagctttgaaaccattaccagcgtgtgagtttgagatgggcggttccgaaggaattgtggagtctatacaaattatgaaggaaggcaaagctactgctagcgaggctgttgattgcaagtggtacatccgagcacctccacggtccaagatttacttacgattcttggactatgagatgcagaattcaaatgagtgcaagaggaattttgtggctgtgtatgatggaagcagttccgtggaggatttgaaagctaagttctgtagcactgtggctaatgatgtcatgctacgcacgggtcttggggtgatccgcatgtgggcagatgagggcagtcgaaacagccgatttcagatgctcttcacatcctttcaagaacctccttgtgaaggcaacacattcttctgccatagtaacatgtgtattaataatactttggtctgcaatggactccagaactgtgtgtatccttgggatgaaaatcactgtaaagagaagaggaaaaccagcctgctggaccagctgaccaacaccagtgggactgtcattggcgtgacttcctgcatcgtgatcatcctcattatcatctctgtcatcgtacagatcaaacagcctcgtaaaaagtatgtccaaaggaaatcagactttgaccagacagttttccaggaggtatttgaacctcctcattatgagttatgcactctcagagggacaggagctacagctgactttgcagatgtggcagatgactttgaaaattaccataaactgcggaggtcatcttccaaatgcattcatgaccatcactgtggatcacagctgtccagcactaaaggcagccgcagtaacctcagcacaagagatgcttctatcttgacagagatgcccacacagccaggaaaacccctcatcccacccatgaacagaagaaatatccttgtcatgaaacacagctactcgcaagatgctgcagatgcctgtgacatagatgaaatcgaagaggtgccgaccaccagtcacaggctgtccagacacgataaagccgtccagcggttctgcctcattgggtctctaagcaaacatgaatctgaatacaacacaactagggtctagaaagaaaattcaagatgaggaaactgaagagttttagtaacttttttaagattacacaataaacaatgatgaatcaagctttgaagccaacctcaccaaccacaagatcaaccaacactcttcaccaatgtgtaatataaccacgttaatattcaacatagtacgtactgctgaaagaagttgatacttattcatattaaccccgtagttttgtgtttcctcatctgtaaaagtatgtattataacaccttctctccaccttacagcgtgtgaggttcaaatgaccattcattggaagatattttttatatcctataatgcattataaaaataaatcatttttcctaaatcatgtgtagacttcattttatgatcgacatggaacaaaagtatcatctataaagagtaacaatgtagagtaacccccctcagaacttgtccaccataaaatatatgactttccaaatccaa

SEQ ID NO: 13737 - DNA, 629 bp, Homo sapiens
  source 1..629: mol_type = unassigned DNA
ctagggtctagaaagaaaattcaagacagcttgagaatagtgcgttcctgaatgattttgaacatgctacagtgaaaagtgacagtgtggaccatggaatcaccagctagaggttatggactatacacacctattattatattctgattaaatacaggaaaaagtaacaagtaaaattactagattgcaataaaaaaattcattttttggtctttcctgtatacccctgatttcctttttgttttatatcaaagaaagtactgagtttcagaaatcctttttgaagtcaggtattttaccattcatactctacagtagaaatgtttttgattaagcactcagcaatatgaccaaattgacagtttgagaaaataccctgcatgtcagtactggatatttgagttgggaaaatatcctttttgttagacacattgtgaaaagcatgcattgtcaaatactgttgttactcttccatttctttatgtcatatgcttgctacttacgactttttatataaatatatataaaatgtataataatttcctaatttgagttaagagaaatgttttcttccattagagtgattaaaaaactgactcacataaatacacattttatgtcaactcttt

SEQ ID NO: 13738 - DNA, 3058 bp, Homo sapiens
  source 1..3058: mol_type = unassigned DNA
atgacggaccccttcttcctgccttcaatgcctcagcggaagatccccaagggctggagcgaggagcgctgccgctggacatcctcccggggaggctgctccgacctgctgcgcggcgcgtctgagactggggactgagccaccccgccgccgccggcgccgccgccgccgcccgctccgtcgctgccgtcggtctggactggcccccacctcgctgcgccctctccccggccccggccccggctcggggcgtcccggggctcgccctgcgaccgccgcctcccgcgcgccgcgtcctcccgaccccgcggcggcgacgatgcccgggaggagggtcctgacggcggcggcgcggatggtggcggccggcgcccgggtgtgatgcgagcgtcacggtggggatgctgctggctgcgcggcgctgagggccagcgagagcgagagcccgcccggggcggaggacggactcatccggatctggctgcagcgtgggctcggagctcccccttcctctcggtctccctctcggcccccctttatttccttcttgctttgcgtctttaacacctctcgaccctgtcctccccccgccactggaagtcttcccgtctctaaatggaattagtggagcccggagcctctggtgtaacgcacagacatgatccatgggcgcagcgtgcttcacattgtagcaagtttaatcatcctccatttgtctggggcaaccaagaaaggaacagaaaagcaaaccacctcagaaacacagaagtcagtgcagtgtggaacttggacaaaacatgcagagggaggtatctttacctctcccaactatcccagcaagtatccccctgaccgggaatgcatctacatcatagaagccgctccaagacagtgcattgaactttactttgatgaaaagtactctattgaaccgtcttgggagtgcaaatttgatcatattgaagttcgagatggaccttttggcttttctccaataattggacgtttctgtggacaacaaaatccacctgtcataaaatccagtggaagatttctatggattaaattttttgctgatggagagctggaatctatgggattttcagctcgatacaatttcacacctgatcctgactttaaggaccttggagctttgaaaccattaccagcgtgtgagtttgagatgggcggttccgaaggaattgtggagtctatacaaattatgaaggaaggcaaagctactgctagcgaggctgttgattgcaagtggtacatccgagcacctccacggtccaagatttacttacgattcttggactatgagatgcagaattcaaatgagtgcaagaggaattttgtggctgtgtatgatggaagcagttccgtggaggatttgaaagctaagttctgtagcactgtggctaatgatgtcatgctacgcacgggtcttggggtgatccgcatgtgggcagatgagggcagtcgaaacagccgatttcagatgctcttcacatcctttcaagaacctccttgtgaaggcaacacattcttctgccatagtaacatgtgtattaataatactttggtctgcaatggactccagaactgtgtgtatccttgggatgaaaatcactgtaaagagaagaggaaaaccagcctgctggaccagctgaccaacaccagtgggactgtcattggcgtgacttcctgcatcgtgatcatcctcattatcatctctgtcatcgtacagatcaaacagcctcgtaaaaagtatgtccaaaggaaatcagactttgaccagacagttttccaggaggtatttgaacctcctcattatgagttatgcactctcagagggacaggagctacagctgactttgcagatgtggcagatgactttgaaaattaccataaactgcggaggtcatcttccaaatgcattcatgaccatcactgtggatcacagctgtccagcactaaaggcagccgcagtaacctcagcacaagagatgcttctatcttgacagagatgcccacacagccaggaaaacccctcatcccacccatgaacagaagaaatatccttgtcatgaaacacagctactcgcaagatgctgcagatgcctgtgacatagatgaaatcgaagaggtgccgaccaccagtcacaggctgtccagacacgataaagccgtccagcggttctgcctcattgggtctctaagcaaacatgaatctgaatacaacacaactagggtctagaaagaaaattcaagagaagaactatttatacaaacatggggactgtgaaaagaaaattctatagtgaattgtgaaaagtggacatatttctaaattcattccactgcctttatccaaacttaagaattacagacatttgttattccttcggcaagacatccccgctgcacactgatatgttcatttcgtaatttggttgctggccaccaagtgctccttagtttttaaatacattttgagattaactggaaacttgaagaagaaattagttcccgattaagactatcccaactttatttttattgtcagtttcacttttgtttctatgttgttttatgtctttgttatataattgtacattgtgtgatatgtgaaaaaaaaacacgaatttggatgaaccttgtgttacatgtacattgttttcattatatagacagcttgagaatagtgcgttcctgaatgattttgaacatgctacagtgaaaagtgacagtgtggaccatggaatcaccagctagaggttatggactatacacacctattattatattctgattaaatacaggaaaaagtaacaagtaaaattactagattgcaataaaaaaattcattttttggtctttcctgtatacccctgatttcctttttgttttatatcaaagaaagtactgagtttcagaaatcctttttgaagtcaggtattttaccattcatactctacagtagaaatgtttttgattaagcactcagcaatatgaccaaattgacagtttgagaaaataccctgcatgtcagtac

SEQ ID NO: 13739 - DNA, 408 bp, Homo sapiens
  source 1..408: mol_type = unassigned DNA
ctgtcctccccccgccactggaagtcttcccgtctctaaatggaattagtggagcccggagcctctggtgtaacgcacagacatgatccatgggcgcagcgtgcttcacattgtagcaagtttaatcatcctccatttgtctggggcaaccaagaaaggaacagaaaagcaaaccacctcagaaacacagaagtcagtgcagtgtggaacttggacaaaacatgcagagggaggtatctttacctctcccaactatcccagcaagtatccccctgaccgggaatgcatctacatcatagaagatttacttacgattcttggactatgagatgcagaattcaaatgagtgcaagaggaattttgtggctgtgtatgatggaagcagttccgtggaggatttgaaagcta

SEQ ID NO: 13740 - DNA, 1849 bp, Homo sapiens
  source 1..1849: mol_type = unassigned DNA
acagccacactgcagtatgtcaggaacagtcatggagctgttctcattgtttgcctctccttttcctcctttttaccttctggcccctctcttcattcagagatgctggcagagccattccctaaggttgtagcaagtttaatcatcctccatttgtctggggcaaccaagaaaggaacagaaaagcaaaccacctcagaaacacagaagtcagtgcagtgtggaacttggacaaaacatgcagagggaggtatctttacctctcccaactatcccagcaagtatccccctgaccgggaatgcatctacatcatagaagccgctccaagacagtgcattgaactttactttgatgaaaagtactctattgaaccgtcttgggagtgcaaatttgatcatattgaagttcgagatggaccttttggcttttctccaataattggacgtttctgtggacaacaaaatccacctgtcataaaatccagtggaagatttctatggattaaattttttgctgatggagagctggaatctatgggattttcagctcgatacaatttcacacctgaataaaaggcaaactccttagcaggatctacagagtgtttcgtgatctctccttctccatcatctcatctctggatgctgtggtgcccagaacgttgatctaacaccatcttgaagcacacatgctgatctccaggtgcaccacgatttgtgcccttgaaaatgctgtttgctcaatctttctggagaaagtttgccacatattcggacttagtaaattagaactcctaccttgaaacccagatgaaggttcaattttccccaggattcctttcctcaccattctcctatgtgagggacttcttgtattataatcttttaatataatattatattttatgtaatattgtgttaaattatattgttttatgtaatatattattttaaatgttattttatatatgatattaaaagattataattatataatctttttcgataatttattcttgtattacaatctttttattataatagtctccactctccccaaaatattgtgaattcttcagctgaggagttttgctttagtttcttatcgccatggactgggaattaacatgtatttaacacattttgctcaaacaatcaaacagtaaaagctgaagagagcgtattattattcgcccattccgagagaaagttgaagatgactgaagaactaaaaatacataaatgaattaagtaattataaacataaatttcctgtagctccaacatgactttgatctgagtaatagtgttgtgaaatagattactacatgattttcattgcttttatattatatatagtaattaatattcagaatagttgattaactttcttaagtgtcacataatttaaaaatgaaattgctgtttgccccagatatgtttttctgtgttctttttaaatttcagtgaaattttcttatactcccttcattaaatctattatctggtttctaaacctttacctatttaatgtctcttttcctttctttctaaaaagtaactggttaaactacagttttgtcatttatgaaattttttctgttattattgtagggatagtcaatattatcattttaaggatagttaaaacttattttgcaattaatacgtattttacagtacactaatatgcatatatgttgtattttattaaaatattaaaatgttttttaaacaaaaatattgtccgaagctctaaataccagagtattgattttaaagtctgccaagacaataatacaagtaacacaactaagcctttctttaaataataaaacgagtatctaaa

SEQ ID NO: 13741 - DNA, 575 bp, Homo sapiens
  source 1..575: mol_type = unassigned DNA
agtgcgcaggaaccccccgggggtggaggatagcgtgcagttcagggatggacacgtgcggcagagattggcccaagcgagggcgcaggtggaaagcgggagagcgcggatgatacctagtggggccagaggagtcttcctcttctaggggctcccggagctcggcgggcccctgttcgcagtacaggaggtagcagaaggcacacctgaagccagcgctggagggaagggcgagggtcagcttccacccctttccgccctggagaccgctgatgtcgctttatgggtttgtagcaagtttaatcatcctccatttgtctggggcaaccaagaaaggaacagaaaagcaaaccacctcagaaacacagaagtcagtgcagtgtggaacttggacaaaacatgcagagggaggtatctttacctctcccaactatcccagcaagtatccccctgaccgggaatgcatctacatcatagaagccgctccaagacagtgcattgaactttactttgatgaaaagtactctattgaaccgtcttgggagtgcaaatttgatcatattgaagttcgagat

SEQ ID NO: 13742 - DNA, 307 bp, Homo sapiens
  source 1..307: mol_type = unassigned DNA
ccaagccatgactaaggagcccatttgatagcagaggtggcgcgcagcccggcgagccgatgacggaccccttcttcctgccttcaatgcctcagcggaagatccccaagggctggagcgaggagcgctgccgctggacatcctcccggggaggctgctccgacctgctgcgcggcgcgtctgagactggggactgagccaccccgccgccgccggcgccgccgccgccgcccgctccgtcgctgccgtcggtctggactggcccccacctcgctgcgccctctccccggccccggccccggctcgg

SEQ ID NO: 13743 - DNA, 2273 bp, Homo sapiens
  source 1..2273: mol_type = unassigned DNA
gttgtcgcggaggcctgcgtgagtgaggcctggcgtgccctggaaacattcccctgagttgaagaaagactcacagttttcagcatccagttaccctctgagcatcaggcagaacccgccggccccaaaaccaggcccccttggcacatgtgggcccgagtgagtccagcatgaggaggtgccgcttctgagcagagctcaggttgtctctgggaggaggagcgagcgttgggtgcggtggccgctgcgttggcagccctgtccctgagcggaacgcaggtcgtctctgggaggaggagcgagggttggacgcagtggccgctgcggtggcagccctgtccccaggcgtggactctgccctcagcttcacagtcaccgaagaaatgaagttacaggaggggcacaccgtccttttgtctctgcctttgaggttggcgggaactgaaactgagcatgggggtccctcgtaccccttcacggacagtgctcttcgagcgggagaggacgggcctgacctaccgcgtgccctcgctgctccccgtgccccccgggcccaccctgctggcctttgtggagcagcggctcagccctgacgactcccacgcccaccgcctggtgctgaggaggggcacgctggccgggggctccgtgcggtggggtgccctgcacgtgctggggacagcagccctggcggagcaccggtccatgaacccctgccctgtgcacgatgctggcacgggcaccgtcttcctcttcttcatcgcggtgctgggccacacgcctgaggccgtgcagatcgccacgggaaggaacgccgcgcgcctctgctgtgtggccagccgtgacgccggcctctcgtggggcagcgcccgggacctcaccgaggaggccatcggtggtgccgtgcaggactgggccacattcgctgtgggtcccggccacggtgtgcagctgccctcaggccgcctgctggtacccgcctacacctaccgcgtggaccgccgagagtgttttggcaagatctgccggaccagccctcactccttcgccttctacagcgatgaccacggccgcacctggcgctgtggaggcctcgtgcccaacctgcgctcaggcgagtgccagctggcagcggtggacggtgggcaggccggcagcttcctctactgcaatgcccggagcccactgggcagccgtgtgcaggcgctcagcactgacgagggcacctccttcctgcccgcagagcgcgtggcttccctgcccgagactgcctggggctgccagggcagcatcgtgggcttcccagcccccgcccccaacaggccacgggatgacagttggtcagtgggccccgggagtcccctccagcctccactcctcggtcctggagtccacgaacccccagaggaggctgctgtagacccccgtggaggccaggtgcctggtgggcccttcagccgtctgcagcctcggggggatggccccaggcagcctggccccaggcctggggtcagtggggatgtggggtcctggaccctggcactccccatgccctttgctgccccgccccagagccccacgtggctgctgtactcccacccagtggggcgcagggctcggctacacatgggtatccgcctgagccagtccccgctggacccgcgcagctggacagagccctgggtgatctacgagggccccagcggctactccgacctggcgtccatcgggccggcccctgaggggggcctggtttttgcctgcctgtacgagagcggggccaggacctcctatgatgagatttccttttgtacattctccctgcgtgaggtcctggagaacgtgcccgccagccccaaaccgcccaaccttggggacaagcctcgggggtgctgctggccctcctgacaggccttctggccgtgcccatgccccttgggtgcctggggcagaggggtggaatacgttggggtgccccacgatagctgtggggggggctcttagtgcaggatcctgtggattagaaacaagttgctcctcagagctctcaagcagggactgctctttaggaaggggagcagcggctgggagtgagcagggcagggtgggggcagggtgggggcacgaagtgggccctgggtgacccccacagctcccttccgaggctgcagggccaggcgcgggaccgcaggtagcccagggtgttgtgggtggcagcacttgtttactggctgctttctggctcgaaataaaggaatcgtgcttgtgtcggg

SEQ ID NO: 13744 - DNA, 860 bp, Homo sapiens
  source 1..860: mol_type = unassigned DNA
gccgctgcgttggcagccctgtccctgagcggaacgcaggtcgtctctgggaggaggagcgagggttggacgcagtggccgctgcggtggcagccctgtccccaggcgtggactctgccctcagcttcacagtcaccgaagaaatgaagttacaggaggggcacaccgtccttttgtctctgcctttgaggttggcgggaactgaaactgcagagcatgggggtccctcgtaccccttcacggacagtgctcttcgagcgggagaggacgggcctgacctaccgcgtgccctcgctgctccccgtgccccccgggcccaccctgctggcctttgtggagcagcggctcagccctgacgactcccacgcccaccgcctggtgctgaggaggggcacgctggccgggggctccgtgcggactgggccacattcgctgtgggtcccggccacggtgtgcagctgccctcaggccgcctgctggtacccgcctacacctaccgcgtggaccgccgagagtgttttggcaagatctgccggaccagccctcactccttcgccttctacagcgatgaccacggccgcacctggcgctgtggaggcctcgtgcccaacctgcgctcaggcgagtgccagctggcagcggtggacggtgggcaggccggcagcttcctctactgcaatgcccggagcccactgggcagccgtgtgcaggcgctcagcactgacgagggcacctccttcctgcccgcagagcgcgtggcttccctgcccgagactgcctggggctgccagggcagcatcgtgggcttcccagcccccgcccccaacaggccacgggatgacagttggtcagtgggcccc

SEQ ID NO: 13745 - DNA, 1907 bp, Homo sapiens
  source 1..1907: mol_type = unassigned DNA
agcttcacagtcaccgaagaaatgaagttacaggaggggcacaccgtccttttgtctctgcctttgaggttggcgggaactgaaactgcagagcatgggggtccctcgtaccccttcacggacagtgctcttcgagcgggagaggacgggcctgacctaccgcgtgccctcgctgctccccgtgccccccgggcccaccctgctggcctttgtggagcagcggctcagccctgacgactcccacgcccaccgcctggtgctgaggaggggcacgctggccgggggctccgtgcggtggggtgccctgcacgtgctggggacagcagccctggcggagcaccggtccatgaacccctgccctgtgcacgatgctggcacgggcaccgtcttcctcttcttcatcgcggtgctgggccacacgcctgaggccgtgcagatcgccacgggaaggaacgccgcgcgcctctgctgtgtggccagccgtgacgccggcctctcgtggggcagcgcccgggacctcaccgaggaggccatcggtggtgccgtgcaggactgggccacattcgctgtgggtcccggccacggtgtgcagctgccctcaggccgcctgctggtacccgcctacacctaccgcgtggaccgccgagagtgttttggcaagatctgccggaccagccctcactccttcgccttctacagcgatgaccacggccgcacctggcgctgtggaggcctcgtgcccaacctgcgctcaggcgagtgccagctggcagcggtggacggtgggcaggccggcagcttcctctactgcaatgcccggagcccactgggcagccgtgtgcaggcgctcagcactgacgagggcacctccttcctgcccgcagagcgcgtggcttccctgcccgagactgcctggggctgccagggcagcatcgtgggcttcccagcccccgcccccaacaggccacgggatgacagttggtcagtgggccccgggagtcccctccagcctccactcctcggtcctggagtccacgaacccccagaggaggctgctgtagacccccgtggaggccaggtgcctggtgggcccttcagccgtctgcagcctcggggggatggccccaggcagcctggccccaggcctggggtcagtggggatgtggggtcctggaccctggcactccccatgccctttgctgccccgccccagagccccacgtggctgctgtactcccacccagtggggcgcagggctcggctacacatgggtatccgcctgagccagtccccgctggacccgcgcagctggacagagccctgggtgatctacgagggccccagcggctactccgacctggcgtccatcgggccggcccctgaggggggcctggtttttgcctgcctgtacgagagcggggccaggacctcctatgatgagatttccttttgtacattctccctgcgtgaggtcctggagaacgtgcccgccagccccaaaccgcccaaccttggggacaagcctcgggggtgctgctggccctcctgacaggccttctggccgtgcccatgccccttgggtgcctggggcagaggggtggaatacgttggggtgccccacgatagctgtggggggggctcttagtgcaggatcctgtggattagaaacaagttgctcctcagagctctcaagcagggactgctctttaggaaggggagcagcggctgggagtgagcagggcagggtgggggcagggtgggggcacgaagtgggccctgggtgacccccacagctcccttccgaggctgcagggccaggcgcgggaccgcaggtagcccagggtgttgtgggtggcagcacttgtttactggctgctttctggctcgaaataaaggaatcgtgcttg

SEQ ID NO: 13746 - DNA, 536 bp, Homo sapiens
  source 1..536: mol_type = unassigned DNA
acagtcaccgaagaaatgaagttacaggaggggcacaccgtccttttgtctctgcctttgaggttggcgggaactgaaactgcagagcatgggggtccctcgtaccccttcacggacagtgctcttcgagcgggagaggacgggcctgacctaccgcgtgccctcgctgctccccgtgccccccgggcccaccctgctggcctttgtggagcagcggctcagccctgacgactcccacgcccaccgcctggtgctgaggaggggcacgctggccgggggctccgtgcgggtgagtgagtggccgggggctctgtgtgggtgtagtggccggatctgctggggctgcacaccccgggatggggcgggggtggcggcggcaggcagatgcccgaggtagagatgagcaaaccaggctcagcgatcctgggtgccctgcggggggctgtgcccaggtccctggacgtcctggtcagcggaacttcctcctctgggcagtggggtgccctgcacgtgctggggacagcagccctggcgga

SEQ ID NO: 13747 - DNA, 2281 bp, Homo sapiens
  source 1..2281: mol_type = unassigned DNA
acagtcaccgaagaaatgaagttacaggaggggcacaccgtccttttgtctctgcctttgaggttggcgggaactgaaactgagcatgggggtccctcgtaccccttcacggacagtgctcttcgagcgggagaggacgggcctgacctaccgcgtgccctcgctgctccccgtgccccccgggcccaccctgctggcctttgtggagcagcggctcagccctgacgactcccacgcccaccgcctggtgctgaggaggggcacgctggccgggggctccgtgcggtggggtgccctgcacgtgctggggacagcagccctggcggagcaccggtccatgaacccctgccctgtgcacgatgctggcacgggcaccgtcttcctcttcttcatcgcggtgctgggccacacgcctgaggccgtgcagatcgccacgggaaggaacgccgcgcgcctctgctgtgtggccagccgtgacgccggcctctcgtggggcagcgcccgggacctcaccgaggaggccatcggtggtgccgtgcaggaggagaaggctggacgctgaggtgtctctcagctcccaaaccaacagccaccccgccccaccccttcctcttattctttactcccttctcaccctgcccagggcctggccaggcctcacccacaactttccctccaccccatcctctgtggccacctgaccccggcccgtgggagctacagcagggagtgcagcagacacatggccaacccagggaccccactgcagggcctcatgccccccgcctgccctccgctctctctgtgtgggcagcgctcaccagcctccctgggtgccgtccacctgggctcggctgctaagggctgtgagaggcttgttcagcctgggaggactcagggcggctgggatgagtcgtgtggaagggcggtcagagtgcgatggtcctaacccgaggcaccagcccctccttccccgtccccctgtgccttcctccagccccccgacctcggggacccagcagcccctcccacctctgccctcctccctgcagactgggccacattcgctgtgggtcccggccacggtgtgcagctgccctcaggccgcctgctggtacccgcctacacctaccgcgtggaccgccgagagtgttttggcaagatctgccggaccagccctcactccttcgccttctacagcgatgaccacggccgcacctggcgctgtggaggcctcgtgcccaacctgcgctcagagcgcgtggcttccctgcccgagactgcctggggctgccagggcagcatcgtgggcttcccagcccccgcccccaacaggccacgggatgacagttggtcagtgggccccgggagtcccctccagcctccactcctcggtcctggagtccacgaacccccagaggaggctgctgtagacccccgtggaggccaggtgcctggtgggcccttcagccgtctgcagcctcggggggatggccccaggcagcctggccccaggcctggggtcagtggggatgtggggtcctggaccctggcactccccatgccctttgctgccccgccccagagccccacgtggctgctgtactcccacccagtggggcgcagggctcggctacacatgggtatccgcctgagccagtccccgctggacccgcgcagctggacagagccctgggtgatctacgagggccccagcggctactccgacctggcgtccatcgggccggcccctgaggggggcctggtttttgcctgcctgtacgagagcggggccaggacctcctatgatgagatttccttttgtacattctccctgcgtgaggtcctggagaacgtgcccgccagccccaaaccgcccaaccttggggacaagcctcgggggtgctgctggccctcctgacaggccttctggccgtgcccatgccccttgggtgcctggggcagaggggtggaatacgttggggtgccccacgatagctgtggggggggctcttagtgcaggatcctgtggattagaaacaagttgctcctcagagctctcaagcagggactgctctttaggaaggggagcagcggctgggagtgagcagggcagggtgggggcagggtgggggcacgaagtgggccctgggtgacccccacagctcccttccgaggctgcagggccaggcgcgggaccgcaggtagcccagggtgttgtgggtggcagcacttgtttactggctgctttctggctcgaaataaaggaatcgtgcttgtg

SEQ ID NO: 13748 - DNA, 3013 bp, Homo sapiens
  source 1..3013: mol_type = unassigned DNA
acagtcaccgaagaaatgaagttacaggaggggcacaccgtccttttgtctctgcctttgaggttggcgggaactgaaactgcagagcatgggggtccctcgtaccccttcacggacagtgctcttcgagcgggagaggacgggcctgacctaccgcgtgccctcgctgctccccgtgccccccgggcccaccctgctggcctttgtggagcagcggctcagccctgacgactcccacgcccaccgcctggtgctgaggaggggcacgctggccgggggctccgtgcgggtgagtgagtggccgggggctctgtgtgggtgtagtggccggatctgctggggctgcacaccccgggatggggcgggggtggcggcggcaggcagatgcccgaggtagagatgagcaaaccaggctcagcgatcctgggtgccctgcggggggctgtgcccaggtccctggacgtcctggtcagcggaacttcctcctctgggcagtggggtgccctgcacgtgctggggacagcagccctggcggagcaccggtccatgaacccctgccctgtgcacgatgctggcacgggcaccgtcttcctcttcttcatcgcggtgctgggccacacgcctgaggccgtgcagatcgccacgggaaggaacgccgcgcgcctctgctgtgtggccagccgtgacgccggcctctcgtggggcagcgcccgggacctcaccgaggaggccatcggtggtgccgtgcagggtaggcgggcagggtgccggtctgggtccctttgattggccacggtccacatggaagggagattccagcgggaaattgccattctgccccacccctgtctccagccacaagggaaccaaccatccctttccccaggactgttctgcgcctcccgtcccaggcaaatccctctccccaggaccgtcctgagcctcccgtcccagacaaatccctctccccaggactgttctgcgcctcccgtcccaggcaaatccctctccccaggaccgtcctgcacctcccgtcccaggcaaatgggtattgatcacccccagtcacccagtgggcaggagcaggccctctatggctgacccgactctctctcatcccccccgctaatctctttatctgcagaggagaaggctggacgctgaggtgtctctcagctcccaaaccaacagccaccccgccccaccccttcctcttattctttactcccttctcaccctgcccagggcctggccaggcctcacccacaactttccctccaccccatcctctgtggccacctgaccccggcccgtgggagctacagcagggagtgcagcagacacatggccaacccagggaccccactgcagggcctcatgccccccgcctgccctccgctctctctgtgtgggcagcgctcaccagcctccctgggtgccgtccacctgggctcggctgctaagggctgtgagaggcttgttcagcctgggaggactcagggcggctgggatgagtcgtgtggaagggcggtcagagtgcgatggtcctaacccgaggcaccagcccctccttccccgtccccctgtgccttcctccagccccccgacctcggggacccagcagcccctcccacctctgccctcctccctgcagactgggccacattcgctgtgggtcccggccacggtgtgcagctgccctcaggccgcctgctggtacccgcctacacctaccgcgtggaccgccgagagtgttttggcaagatctgccggaccagccctcactccttcgccttctacagcgatgaccacggccgcacctggcgctgtggaggcctcgtgcccaacctgcgctcaggcgagtgccagctggcagcggtggacggtgggcaggccggcagcttcctctactgcaatgcccggagcccactgggcagccgtgtgcaggcgctcagcactgacgagggcacctccttcctgcccgcagagcgcgtggcttccctgcccgagactgcctggggctgccagggcagcatcgtgggcttcccagcccccgcccccaacaggccacgggatgacagttggtcagtgggccccgggagtcccctccagcctccactcctcggtcctggagtccacgaacccccagaggaggctgctgtagacccccgtggaggccaggtgcctggtgggcccttcagccgtctgcagcctcggggggatggccccaggcagcctggccccaggcctggggtcagtggggatgtggggtcctggaccctggcactccccatgccctttgctgccccgccccagagccccacgtggctgctgtactcccacccagtggggcgcagggctcggctacacatgggtatccgcctgagccagtccccgctggacccgcgcagctggacagagccctgggtgatctacgagggccccagcggctactccgacctggcgtccatcgggccggcccctgaggggggcctggtttttgcctgcctgtacgagagcggggccaggacctcctatgatgagatttccttttgtacattctccctgcgtgaggtcctggagaacgtgcccgccagccccaaaccgcccaaccttggggacaagcctcgggggtgctgctggccctcctgacaggccttctggccgtgcccatgccccttgggtgcctggggcagaggggtggaatacgttggggtgccccacgatagctgtggggggggctcttagtgcaggatcctgtggattagaaacaagttgctcctcagagctctcaagcagggactgctctttaggaaggggagcagcggctgggagtgagcagggcagggtgggggcagggtgggggcacgaagtgggccctgggtgacccccacagctcccttccgaggctgcagggccaggcgcgggaccgcaggtagcccagggtgttgtgggtggcagcacttgtttactggctgctttctggctcgaaataaaggaatcgtgcttgtgt

SEQ ID NO: 13749 - DNA, 753 bp, Homo sapiens
  source 1..753: mol_type = unassigned DNA
cttttgtctctgcctttgaggttggcgggaactgaaactgattgaaaacagtgggcttgaaaagcctggagcagagggagtgaggcctgccccccaccccagctctgcgggcacaccctggccagacagccctgctccagacccggcctgtgtctcagggtggcccaggaggggactttgcaagagcatgggggtccctcgtaccccttcacggacagtgctcttcgagcgggagaggacgggcctgacctaccgcgtgccctcgctgctccccgtgccccccgggcccaccctgctggcctttgtggagcagcggctcagccctgacgactcccacgcccaccgcctggtgctgaggaggggcacgctggccgggggctccgtgcggtggggtgccctgcacgtgctggggacagcagccctggcggagcaccggtccatgaacccctgccctgtgcacgatgctggcacgggcaccgtcttcctcttcttcatcgcggtgctgggccacacgcctgaggccgtgcagatcgccacgggaaggaacgccgcgcgcctctgctgtgtggccagccgtgacgccggcctctcgtggggcagcgcccgggacctcaccgaggaggccatcggtggtgccgtgcaggactgggccacattcgctgtgggtcccggccacggtgtgcagctgccctcaggccgcctgctggtacccgcctacacctaccgcgtggaccgccgagagtgttttggcaa

SEQ ID NO: 13750 - DNA, 2352 bp, Homo sapiens
  source 1..2352: mol_type = unassigned DNA
attgcgatggggtgctggcctgccaggagcacagatacagagctagagcccagtgaggcctgtgctgtgaggggctgtgctgtgccaggggaggccccgcacccgggaagcccagaggagagtgtgcactcacggagccctcctggcagggccgcgtctctggagcagcagacccgtgtccctctgggaggtcaactgcggcctcacagctgggcctgtcccagcacagcccttgttggagggcgcacccccgtgtcctcagcaccccagtgttgagtgccttgacctgcagaggggagcctgtgctggtcccgggcgtctgtgtggctcctgggtgcccatctgcacccctggccctgctctgggcttcagtggagccgtgccaccgtgggagtgtccagggtcctgacgtagccctgagacgtggccagctccctggcctgctgcccgcacagtgggcccttgtctctgctctgggtcaggcgaggcagccacccatgatgagctctgcagccttcccaaggtggctgagcatgggggtccctcgtaccccttcacggacagtgctcttcgagcgggagaggacgggcctgacctaccgcgtgccctcgctgctccccgtgccccccgggcccaccctgctggcctttgtggagcagcggctcagccctgacgactcccacgcccaccgcctggtgctgaggaggggcacgctggccgggggctccgtgcggtggggtgccctgcacgtgctggggacagcagccctggcggagcaccggtccatgaacccctgccctgtgcacgatgctggcacgggcaccgtcttcctcttcttcatcgcggtgctgggccacacgcctgaggccgtgcagatcgccacgggaaggaacgccgcgcgcctctgctgtgtggccagccgtgacgccggcctctcgtggggcagcgcccgggacctcaccgaggaggccatcggtggtgccgtgcaggactgggccacattcgctgtgggtcccggccacggtgtgcagctgccctcaggccgcctgctggtacccgcctacacctaccgcgtggaccgccgagagtgttttggcaagatctgccggaccagccctcactccttcgccttctacagcgatgaccacggccgcacctggcgctgtggaggcctcgtgcccaacctgcgctcaggcgagtgccagctggcagcggtggacggtgggcaggccggcagcttcctctactgcaatgcccggagcccactgggcagccgtgtgcaggcgctcagcactgacgagggcacctccttcctgcccgcagagcgcgtggcttccctgcccgagactgcctggggctgccagggcagcatcgtgggcttcccagcccccgcccccaacaggccacgggatgacagttggtcagtgggccccgggagtcccctccagcctccactcctcggtcctggagtccacgaacccccagaggaggctgctgtagacccccgtggaggccaggtgcctggtgggcccttcagccgtctgcagcctcggggggatggccccaggcagcctggccccaggcctggggtcagtggggatgtggggtcctggaccctggcactccccatgccctttgctgccccgccccagagccccacgtggctgctgtactcccacccagtggggcgcagggctcggctacacatgggtatccgcctgagccagtccccgctggacccgcgcagctggacagagccctgggtgatctacgagggccccagcggctactccgacctggcgtccatcgggccggcccctgaggggggcctggtttttgcctgcctgtacgagagcggggccaggacctcctatgatgagatttccttttgtacattctccctgcgtgaggtcctggagaacgtgcccgccagccccaaaccgcccaaccttggggacaagcctcgggggtgctgctggccctcctgacaggccttctggccgtgcccatgccccttgggtgcctggggcagaggggtggaatacgttggggtgccccacgatagctgtggggggggctcttagtgcaggatcctgtggattagaaacaagttgctcctcagagctctcaagcagggactgctctttaggaaggggagcagcggctgggagtgagcagggcagggtgggggcagggtgggggcacgaagtgggccctgggtgacccccacagctcccttccgaggctgcagggccaggcgcgggaccgcaggtagcccagggtgttgtgggtggcagcacttgtttactggctgctttctggctcgaaataaaggaatcgtgcttgtgtcgg

SEQ ID NO: 13751 - DNA, 2526 bp, Homo sapiens
  source 1..2526: mol_type = unassigned DNA
gcgatggggtgctggcctgccaggagcacagatacagagctagagcccagtgaggcctgtgctgtgaggggctgtgctgtgccaggggaggccccgcacccgggaagcccagaggagagtgtgcactcacggagccctcctggcagggccgcgtctctggagcagcagacccgtgtccctctgggaggtcaactgcggcctcacagctgggcctgtcccagcacagcccttgttggagggcgcacccccgtgtcctcagcaccccagtgttgagtgccttgacctgcagaggggagcctgtgctggtcccgggcgtctgtgtggctcctgggtgcccatctgcacccctggccctgctctgggcttcagtggagccgtgccaccgtgggagtgtccagggtcctgacgtagccctgagacgtggccagctccctggcctgctgcccgcacagtgggcccttgtctctgctctgggtcaggcgaggcagccacccatgatgagctctgcagccttcccaaggtggctgccccgcatccaggtgccccgtgtgcccggcctgggcggctggccgtggatctgaccgctcctgcatggtggaggaccagcgttcccactgtctgcagctgtgccacctccctgtgccgggctgtgcgtgctcacgctcggctccgtctgcctttgtgcgatcagactgagagaccccccagagcatgggggtccctcgtaccccttcacggacagtgctcttcgagcgggagaggacgggcctgacctaccgcgtgccctcgctgctccccgtgccccccgggcccaccctgctggcctttgtggagcagcggctcagccctgacgactcccacgcccaccgcctggtgctgaggaggggcacgctggccgggggctccgtgcggtggggtgccctgcacgtgctggggacagcagccctggcggagcaccggtccatgaacccctgccctgtgcacgatgctggcacgggcaccgtcttcctcttcttcatcgcggtgctgggccacacgcctgaggccgtgcagatcgccacgggaaggaacgccgcgcgcctctgctgtgtggccagccgtgacgccggcctctcgtggggcagcgcccgggacctcaccgaggaggccatcggtggtgccgtgcaggactgggccacattcgctgtgggtcccggccacggtgtgcagctgccctcaggccgcctgctggtacccgcctacacctaccgcgtggaccgccgagagtgttttggcaagatctgccggaccagccctcactccttcgccttctacagcgatgaccacggccgcacctggcgctgtggaggcctcgtgcccaacctgcgctcaggcgagtgccagctggcagcggtggacggtgggcaggccggcagcttcctctactgcaatgcccggagcccactgggcagccgtgtgcaggcgctcagcactgacgagggcacctccttcctgcccgcagagcgcgtggcttccctgcccgagactgcctggggctgccagggcagcatcgtgggcttcccagcccccgcccccaacaggccacgggatgacagttggtcagtgggccccgggagtcccctccagcctccactcctcggtcctggagtccacgaacccccagaggaggctgctgtagacccccgtggaggccaggtgcctggtgggcccttcagccgtctgcagcctcggggggatggccccaggcagcctggccccaggcctggggtcagtggggatgtggggtcctggaccctggcactccccatgccctttgctgccccgccccagagccccacgtggctgctgtactcccacccagtggggcgcagggctcggctacacatgggtatccgcctgagccagtccccgctggacccgcgcagctggacagagccctgggtgatctacgagggccccagcggctactccgacctggcgtccatcgggccggcccctgaggggggcctggtttttgcctgcctgtacgagagcggggccaggacctcctatgatgagatttccttttgtacattctccctgcgtgaggtcctggagaacgtgcccgccagccccaaaccgcccaaccttggggacaagcctcgggggtgctgctggccctcctgacaggccttctggccgtgcccatgccccttgggtgcctggggcagaggggtggaatacgttggggtgccccacgatagctgtggggggggctcttagtgcaggatcctgtggattagaaacaagttgctcctcagagctctcaagcagggactgctctttaggaaggggagcagcggctgggagtgagcagggcagggtgggggcagggtgggggcacgaagtgggccctgggtgacccccacagctcccttccgaggctgcagggccaggcgcgggaccgcaggtagcccagggtgttgtgggtggcagcacttgtttactggctgctttctggctcgaaataaaggaatcgtgcttgtg

SEQ ID NO: 13752 - DNA, 2288 bp, Homo sapiens
  source 1..2288: mol_type = unassigned DNA
gaggggctgtgctgtgccaggggaggccccgcacccgggaagcccagaggagagtgtgcactcacggagccctcctggcagggccgcgtctctggagcagcagacccgtgtccctctgggaggtcaactgcggcctcacagctgggcctgtcccagcacagcccttgttggagggcgcacccccgtgtcctcagcaccccagtgttgagtgccttgacctgcagaggggagcctgtgctggtcccgggcgtctgtgtggctcctgggtgcccatctgcacccctggccctgctctgggcttcagtggagccgtgccaccgtgggagtgtccagggtcctgacgtagccctgagacgtggccagctccctggcctgctgcccgcacagtgggcccttgtctctgctctgggtcaggcgaggcagccacccatgatgagctctgcagccttcccaaggtggctgcagagcatgggggtccctcgtaccccttcacggacagtgctcttcgagcgggagaggacgggcctgacctaccgcgtgccctcgctgctccccgtgccccccgggcccaccctgctggcctttgtggagcagcggctcagccctgacgactcccacgcccaccgcctggtgctgaggaggggcacgctggccgggggctccgtgcggtggggtgccctgcacgtgctggggacagcagccctggcggagcaccggtccatgaacccctgccctgtgcacgatgctggcacgggcaccgtcttcctcttcttcatcgcggtgctgggccacacgcctgaggccgtgcagatcgccacgggaaggaacgccgcgcgcctctgctgtgtggccagccgtgacgccggcctctcgtggggcagcgcccgggacctcaccgaggaggccatcggtggtgccgtgcaggactgggccacattcgctgtgggtcccggccacggtgtgcagctgccctcaggccgcctgctggtacccgcctacacctaccgcgtggaccgccgagagtgttttggcaagatctgccggaccagccctcactccttcgccttctacagcgatgaccacggccgcacctggcgctgtggaggcctcgtgcccaacctgcgctcaggcgagtgccagctggcagcggtggacggtgggcaggccggcagcttcctctactgcaatgcccggagcccactgggcagccgtgtgcaggcgctcagcactgacgagggcacctccttcctgcccgcagagcgcgtggcttccctgcccgagactgcctggggctgccagggcagcatcgtgggcttcccagcccccgcccccaacaggccacgggatgacagttggtcagtgggccccgggagtcccctccagcctccactcctcggtcctggagtccacgaacccccagaggaggctgctgtagacccccgtggaggccaggtgcctggtgggcccttcagccgtctgcagcctcggggggatggccccaggcagcctggccccaggcctggggtcagtggggatgtggggtcctggaccctggcactccccatgccctttgctgccccgccccagagccccacgtggctgctgtactcccacccagtggggcgcagggctcggctacacatgggtatccgcctgagccagtccccgctggacccgcgcagctggacagagccctgggtgatctacgagggccccagcggctactccgacctggcgtccatcgggccggcccctgaggggggcctggtttttgcctgcctgtacgagagcggggccaggacctcctatgatgagatttccttttgtacattctccctgcgtgaggtcctggagaacgtgcccgccagccccaaaccgcccaaccttggggacaagcctcgggggtgctgctggccctcctgacaggccttctggccgtgcccatgccccttgggtgcctggggcagaggggtggaatacgttggggtgccccacgatagctgtggggggggctcttagtgcaggatcctgtggattagaaacaagttgctcctcagagctctcaagcagggactgctctttaggaaggggagcagcggctgggagtgagcagggcagggtgggggcagggtgggggcacgaagtgggccctgggtgacccccacagctcccttccgaggctgcagggccaggcgcgggaccgcaggtagcccagggtgttgtgggtggcagcacttgtttactggctgctttctggctcgaaataaaggaatcgtgcttgtgtcggg

SEQ ID NO: 13753 - DNA, 451 bp, Homo sapiens
  source 1..451: mol_type = unassigned DNA
gcccttgtctctgctctgggtcaggcgaggcagccacccatgatgagctctgcagccttcccaaggtggctgccccgcatccaggtgccccgtgtgcccggcctgggcggctggccgtggatctgaccgctcctgcatggtggaggaccagcgttcccactgtctgcagctgtgccacctccctgtgccgggctgtgcgtgctcacgctcggctccgtctgcctttgtgcgatcagactgagagaccccccaggcaggtcccgcctgcaacaagcagaccccatgcgtgccccaaatgccccctcacccgggccctgccctggtgggtgttgcctgggagcaaactcccagaatggccgccgggccccactcggctttggagcttctgattcctgtgggcgcttctcagagcatgggggtccctcgtaccccttcacggacagtgctcttc

SEQ ID NO: 13754 - DNA, 484 bp, Homo sapiens
  source 1..484: mol_type = unassigned DNA
gtctctgctctgggtcaggcgaggcagccacccatgatgagctctgcagccttcccaaggtggctgccccgcatccaggtgccccgtgtgcccggcctgggcggctggccgtggatctgaccgctcctgcatggtggaggaccagcgttcccactgtctgcagctgtgccacctccctgtgccgggctgtgcgtgctcacgctcggctccgtctgcctttgtgcgatcagactgagagaccccccagcagagcatgggggtccctcgtaccccttcacggacagtgctcttcgagcgggagaggacgggcctgacctaccgcgtgccctcgctgctccccgtgccccccgggcccaccctgctggcctttgtggagcagcggctcagccctgacgactcccacgcccaccgcctggtgctgaggaggggcacgctggccgggggctccgtgcggtggggtgccctgcacgtgctggggacagca

SEQ ID NO: 13755 - DNA, 676 bp, Homo sapiens
  source 1..676: mol_type = unassigned DNA
gtctctgctctgggtcaggcgaggcagccacccatgatgagctctgcagccttcccaaggtggctgagcatgggggtccctcgtaccccttcacggacagtgctcttcgagcgggagaggacgggcctgacctaccgcgtgccctcgctgctccccgtgccccccgggcccaccctgctggcctttgtggagcagcggctcagccctgacgactcccacgcccaccgcctggtgctgaggaggggcacgctggccgggggctccgtgcggactgggccacattcgctgtgggtcccggccacggtgtgcagctgccctcaggccgcctgctggtacccgcctacacctaccgcgtggaccgccgagagtgttttggcaagatctgccggaccagccctcactccttcgccttctacagcgatgaccacggccgcacctggcgctgtggaggcctcgtgcccaacctgcgctcaggcgagtgccagctggcagcggtggacggtgggcaggccggcagcttcctctactgcaatgcccggagcccactgggcagccgtgtgcaggcgctcagcactgacgagggcacctccttcctgcccgcagagcgcgtggcttccctgcccgagactgcctggggctgccagggcagcatcgtgggcttcccagcccccgcccc

SEQ ID NO: 13756 - DNA, 845 bp, Homo sapiens
  source 1..845: mol_type = unassigned DNA
tctctgctctgggtcaggcgaggcagccacccatgatgagctctgcagccttcccaagcagagcatgggggtccctcgtaccccttcacggacagtgctcttcgagcgggagaggacgggcctgacctaccgcgtgccctcgctgctccccgtgccccccgggcccaccctgctggcctttgtggagcagcggctcagccctgacgactcccacgcccaccgcctggtgctgaggaggggcacgctggccgggggctccgtgcggtggggtgccctgcacgtgctggggacagcagccctggcggagcaccggtccatgaacccctgccctgtgcacgatgctggcacgggcaccgtcttcctcttcttcatcgcggtgctgggccacacgcctgaggccgtgcagatcgccacgggaaggaacgccgcgcgcctctgctgtgtggccagccgtgacgccggcctctcgtggggcagcgcccgggacctcaccgaggaggccatcggtggtgccgtgcaggactgggccacattcgctgtgggtcccggccacggtgtgcagctgccctcaggccgcctgctggtacccgcctacacctaccgcgtggaccgccgagagtgttttggcaagatctgccggaccagccctcactccttcgccttctacagcgatgaccacggccgcacctggcgctgtggaggcctcgtgcccaacctgcgctcaggcgagtgccagctggcagcggtggacggtgggcaggccggcagcttcctctactgcaatgcccggagcccactgggcagccgtgtgcaggcgctcagcactgacgagggcacctccttcc

SEQ ID NO: 13757 - DNA, 491 bp, Homo sapiens
  source 1..491: mol_type = unassigned DNA
gtcaggcgaggcagccacccatgatgagctctgcagccttcccaaggtggctgccccgcatccaggtgccccgtgtgcccggcctgggcggctggccgtggatctgaccgctcctgcatggtggaggaccagcgttcccactgtctgcagctgtgccacctccctgtgccgggctgtgcgtgctcacgctcggctccgtctgcctttgtgcgatcagactgagagaccccccaggcaggtcccgcctgcaacaagcagaccccatgcgtgccccaaatgccccctcacccgggccctgccctggtgggtgttgcctgggagcaaactcccagaatggccgccgggccccactcggctttggagcttctgattcctgtgggcgcttctcaggtcagggccctgcaggtgggaagcaccaggcactggaatgagggcactgtggggccagctgcctgcaggcaggggtctgatcaccaagcacctgtcccctg

SEQ ID NO: 13758 - DNA, 541 bp, Homo sapiens
  source 1..541: mol_type = unassigned DNA
acccatgatgagctctgcagccttcccaaggtggctgcagagcatgggggtccctcgtaccccttcacggacagtgctcttcgagcgggagaggacgggcctgacctaccgcgtgccctcgctgctccccgtgccccccgggcccaccctgctggcctttgtggagcagcggctcagccctgacgactcccacgcccaccgcctggtgctgaggaggggcacgctggccgggggctccgtgcgggtgagtgagtggccgggggctctgtgtgggtgtagtggccggatctgctggggctgcacaccccgggatggggcgggggtggcggcggcaggcagatgcccgaggtagagatgagcaaaccaggctcagcgatcctgggtgccctgcggggggctgtgcccaggtccctggacgtcctggtcagcggaacttcctcctctgggcagtggggtgccctgcacgtgctggggacagcagccctggcggagcaccggtccatgaacccctgccctgtgcacgatgctggcacgggcaccg

SEQ ID NO: 13759 - DNA, 505 bp, Homo sapiens
  source 1..505: mol_type = unassigned DNA
acggtgctgtggcctctattctggggacactgagctcctccttgctcgaggttttgggtcctcattgtccacatgacctcctgctgggcgaattctgggatgaccctgtgtcctgggcacatggctggcagggtcccgggggctctctggccagcctcccctgcaccctggcaccaaccagcctggccgaggagcatgggggtccctcgtaccccttcacggacagtgctcttcgagcgggagaggacgggcctgacctaccgcgtgccctcgctgctccccgtgccccccgggcccaccctgctggcctttgtggagcagcggctcagccctgacgactcccacgcccaccgcctggtgctgaggaggggcacgctggccgggggctccgtgcggtggggtgccctgcacgtgctggggacagcagccctggcggagcaccggtccatgaacccctgccctgtgcacgatgctggcacgggcaccgtcttcctcttcttcatcg

SEQ ID NO: 13760 - DNA, 2273 bp, Homo sapiens; identical to SEQ ID NO: 13743
  source 1..2273: mol_type = unassigned DNA

SEQ ID NO: 13761 - DNA, 860 bp, Homo sapiens; identical to SEQ ID NO: 13744
  source 1..860: mol_type = unassigned DNA

SEQ ID NO: 13762 - DNA, 1907 bp, Homo sapiens; identical to SEQ ID NO: 13745
  source 1..1907: mol_type = unassigned DNA

SEQ ID NO: 13763 - DNA, 536 bp, Homo sapiens; identical to SEQ ID NO: 13746
  source 1..536: mol_type = unassigned DNA

SEQ ID NO: 13764 - DNA, 2281 bp, Homo sapiens; identical to SEQ ID NO: 13747
  source 1..2281: mol_type = unassigned DNA

SEQ ID NO: 13765 - DNA, 3013 bp, Homo sapiens; identical to SEQ ID NO: 13748
  source 1..3013: mol_type = unassigned DNA

SEQ ID NO: 13766 - DNA, 753 bp, Homo sapiens; identical to SEQ ID NO: 13749
  source 1..753: mol_type = unassigned DNA

SEQ ID NO: 13767 - DNA, 2352 bp, Homo sapiens; identical to SEQ ID NO: 13750
  source 1..2352: mol_type = unassigned DNA

SEQ ID NO: 13768 - DNA, 2526 bp, Homo sapiens; identical to SEQ ID NO: 13751
  source 1..2526: mol_type = unassigned DNA

SEQ ID NO: 13769 - DNA, 2288 bp, Homo sapiens; identical to SEQ ID NO: 13752
  source 1..2288: mol_type = unassigned DNA

SEQ ID NO: 13770 - DNA, 451 bp, Homo sapiens; identical to SEQ ID NO: 13753
  source 1..451: mol_type = unassigned DNA

SEQ ID NO: 13771 - DNA, 484 bp, Homo sapiens; identical to SEQ ID NO: 13754
  source 1..484: mol_type = unassigned DNA

SEQ ID NO: 13772 - DNA, 676 bp, Homo sapiens; identical to SEQ ID NO: 13755
  source 1..676: mol_type = unassigned DNA

SEQ ID NO: 13773 - DNA, 845 bp, Homo sapiens; identical to SEQ ID NO: 13756
  source 1..845: mol_type = unassigned DNA

SEQ ID NO: 13774 - DNA, 491 bp, Homo sapiens; identical to SEQ ID NO: 13757
  source 1..491: mol_type = unassigned DNA

SEQ ID NO: 13775 - DNA, 541 bp, Homo sapiens; identical to SEQ ID NO: 13758
  source 1..541: mol_type = unassigned DNA

SEQ ID NO: 13776 - DNA, 505 bp, Homo sapiens; identical to SEQ ID NO: 13759
  source 1..505: mol_type = unassigned DNA

SEQ ID NO: 13777 - DNA, 2934 bp, Homo sapiens
  source 1..2934: mol_type = unassigned DNA
gttgaaattctgcctctgagaagctaacagtcttcctgtggtcgccactcctccccagcagccccctccttgccaaggacggtccagaaggagccccactggggcctccccgctcagcaaagcagacctcacctcccactaccagcttgaagtcacagcagccagaggaaattctgccaccattttcccaggtctgcagcccctccagctgggaacctgctcctggagccatccctctgcaaacagagagcccagagtgcctcggggaaaattggctgaataaaagagcgatcaggacgccacggctccgcctgaagcgatggcccagccctacccccccgcccagtacccccctccgccacagaacggcatccctgccgagtacgccccgcccccaccgcaccccacgcaggactactccggccagaccccggtccccacagagcatggcatgaccctgtacacaccagcacagacccaccccgagcagccaggctccgaggccagcacacagcccatcgccgggacccagacagtgccgacagacgaggcggcacagacggacagccagccgctccacccctccgaccctacagagaagcagcagcccaagcggctacacgtctccaacatccccttccggttcagggaccccgacttgcggcaaatgttcgggcaattcggaaaaattttagacgtggagatcatttttaacgagcggggctccaagggttttgggtttgtaacttttgaaactagctcagatgctgaccgagcccgggagaagctgaatgggacgatcgtagagggacggaaaattgaggtcaataatgccacggcccgagtgatgaccaacaagaagacggggaacccctacaccaacggctggaagctaaatccagtggtcggcgcagtctacgggcctgaattctatgcagtgacggggttcccctaccccaccaccggcacagccgttgcctaccggggcgcacatcttcggggccggggccgggccgtgtataatacatttcgggctgcgccacccccaccccccatcccgacttacggagcggcactggagcaaacgcttgttaaaatgccagtcccatgggcggggctggcaccgtgccccctccctcctcagcagacaccggagccggcctaccccacctctccagcgttcccaccactttcttgtccgtttgcttccagggtcgtgtatcaggatggattttatggtgctgagatttatggaggctacgcagcctacagatacgctcagcccgctgcagcggcggcagcctacagcgacagttacggcagagtctacgcagctgccgacccgtaccatcacaccatcgggcccgcggcgacctacagcattggaaccatgtgaaaccttccaccgtttccttctcggaccatgaagggcaaaaacaaaaaaacaaaaaaaatcacaaaacaaaaaaaacaaaaaaagatgttaagatccaagcaacaaaaaaaaaaccaaccaaaccaagaggcatccaaccaagtccaagtcccgcgtcctggccacacgcccgcaccgagggagcacgccggcaggggcgccgaggagcggccccaggacaggacggccccaccgcgtcctggctggcagcacagtgggaacacgcccctccgtctcaggcagtgggggagttggaggggaaggggcctcccttgtgggacccgtggggggctctgttttccatccagtcttcctttcccagcccccaactcccaagacagacagtgtggagcccagcggcggcggagcaggcccgggcctgagcaggcaggcgctgctagcaagacttgatctttgtggccagctgtgccagggggccggcggggctgaggggtgcgggcagctttcatcccaggggctccactgggccccgtcaccctcctgtcgcgtcccctgcgtcccacctccctcctgcccggcagtcccgcccgtgcccccagcctggcgaggaagccgtccaacagtagccccggggccagctcccaacagaaagggctgacgtggctccaggactcaggggcgctccatgggaggacgaaggaagcccagccagccaggagccactcctcacacctccaagtgtggccaagtgggccctgaggccaaggacttacttgctcttcctggccatctctccctttctggaggaggcccggggcctgtgtacaccaaggctgacctcgtgctgcctgctgggacccagccctccctgccgctcccctgtgagcccagtccaccgtgggcgcccagggccagggacgggccagcgcccggctgcatcgcgaggttgggagtcacagtggctgtgggcctggacgggcacagccagagcaggggcccatgggaagggcaagggatggggaagcctgggccggccccttccctgctcccaaggcaggtgtccaggtggcgggagcagcaccaaggacagccaggcttacccggtgggaggagcaggagcagagcaggtggcagggaggaacccctggcgaggcagggagcactgaagtagggaagcagcaaaaaatacaggctcccaacgtggctccactgtctcatgaagtgtcaaaaatttaaaaatacacctcactttctattcagcatcagctattgaaatggaattctccttttctattcccgttgtacatagccccacgccctgcctccggctttgtcctctgtacagagccccctgtcccctctgctgttccggacccttttcttgcagcagctcaaccccccgactcactcagatccccaggactgcagccgagccccgggcttcctttcttaccattctgtatgcttccaaggtgtgaccattcaaactaacagtattattaagattattaataaagatttctttcttcaaaccagga

SEQ ID NO: 13778 - DNA, 1143 bp, Homo sapiens
  source 1..1143: mol_type = unassigned DNA
agagcccagagtgcctcggggaaaattggctgaataaaagagcgatcaggacgccacggctccgcctgaagcgatggcccagccctacccccccgcccagtacccccctccgccacagaacggcatccctgccgagtacgccccgcccccaccgcaccccacgcaggactactccggccagaccccggtccccacagagcatggcatgaccctgtacacaccagcacagacccaccccgagcagccaggctccgaggccagcacacagcccatcgccgggacccagacagtgccgcagacagacgaggcggcacagacggacagccagccgctccacccctccgaccctacagagaagcagcagcccaagcggctacacgtctccaacatccccttccggttcagggaccccgacttgcggcaaatgttcgggcaattcggaaaaattttagacgtggagatcatttttaacgagcggggctccaaggtcaataatgccacggcccgagtgatgaccaacaagaagacggggaacccctacaccaacggctggaagctaaatccagtggtcggcgcagtctacgggcctgaattctatgcagtgacggggttcccctaccccaccaccggcacagccgttgcctaccggggcgcacatcttcggggccggggccgggccgtgtataatacatttcgggctgcgccacccccaccccccatcccgacttacggagcggcactggagcaaacgcttgttaaaatgccagtcccatgggcggggctggcaccgtgccccctccctcctcagcagacaccggagccggcctaccccacctctccagcgttcccaccactttcttgtccgtttgcttccagggtcgtgtatcaggatggattttatggtgctgagatttatggaggctacgcagcctacagatacgctcagcccgctgcagcggcggcagcctacagcgacagttacggcagagtctacgcagctgccgacccgtaccatcacaccatcgggcccgcggcgacctacagcattggaaccatgtgaaaccttccaccgtttccttctcggaccatgaagggcaaaaacaaaaaaacaaaaaaaatcacaaaacaaaaaaaacaaaaaaa

SEQ ID NO: 13779 - DNA, 1201 bp, Homo sapiens
  source 1..1201: mol_type = unassigned DNA
ctgtgcctctccagggctgtttcttcatctgcaaaatggggagggtgtggtggctcactgggcagggaggaccccgtgagtttcgaacagtctgtgtggctcacacacagtgttgaggaaaaccagcccatccttattatcattcccagtccaaatgccctttcctcctcgacctgctcccaggccaccctcccggacagccgctctgggggaagatgaggacgggaggaaagtgagagcaggactcagcacggggaagagggagcaggacggggactttggcaggcagtggggagagcttatgggcagagtccaagcgcctttcctgcagcctctggccacctggagctcggatggtggggctgtgctgagtctgactccagaaaccctcatcccagctgtgctcaggggggtagataacaagttccactttccctctccagttctcttctgggaggtgggtaccccaggcttcgggggatgacgcccaggggtgagggttgctcaggggcaggctgaggaggatcacaattgggaaagaatcctagcagacccccaggcagaagagtcaggaaggagtagaccctggtgttttgaactcagcacttgtccgggcagtgtgggaaaggggggcccggcgcggggaggcgccctgggaatgttcccaagggctccaccggtgtcgctggggttcccaggcatacgttttggtgggaaaagggtcggggaaggcagtgactaggtctctgtgcctttgttttaggctggaagctaaatccagtggtcggcgcagtctacgggcctgaattctatgcagtgacggggttcccctaccccaccaccggcacagccgttgcctaccggggcgcacatcttcggggccggggccgggccgtgtataatacatttcgggctgcgccacccccaccccccatcccgacttacggagcggtcgtgtatcaggatggattttatggtgctgagatttatggaggctacgcagcctacagatacgctcagcccgctgcagcggcggcagcctacagcgacagttacggcagagtctacgcagctgccgacccgtaccatcacaccatcgggcccgcggcgacctacagcattggaaccatgtgaaaccttccaccgtttccttctcggaccatgaagggcaaaaacaaaaaaacaaaaaaaatcacaaaac

SEQ ID NO: 13780 - DNA, 1519 bp, Homo sapiens
  source 1..1519: mol_type = unassigned DNA
gatacagcagcagctggtgctcctggccaggctgtgcgtgctctctctgcctctctctctcggactctctgctctctctctctgactctctcctctctctctgttggcctggtgaaatgttcttggctgtaggcacacagagccttggactcaaggctgttggagtcgaggacaccttgacttcggtcctggaggttgaaattctgcctctgagaagctaacagtcttcctgtggtcgccactcctccccagcagccccctccttgccaaggacggtccagaaggagccccactggggcctccccgctcagcaaagcagacctcacctcccactaccagcttgaagtcacagcagccagaggaaattctgccaccattttcccaggtctgcagcccctccagctgggaacctgctcctggagccatccctctgcaaacagagagcccagagtgcctcggggaaaattggctgaataaaagagcgatcaggacgccacggctccgcctgaagcgatggcccagccctacccccccgcccagtacccccctccgccacagaacggcatccctgccgagtacgccccgcccccaccgcaccccacgcaggactactccggccagaccccggtccccacagagcatggcatgaccctgtacacaccagcacagacccaccccgagcagccaggctccgaggccagcacacagcccatcgccgggacccagacagtgccgcagacagacgaggcggcacagacggacagccagccgctccacccctccgaccctacagagaagcagcagcccaagcggctacacgtctccaacatccccttccggttcagggaccccgacttgcggcaaatgttcgggcaattcggaaaaattttagacgtggagatcatttttaacgagcggggctccaagggttttgggtttgtaacttttgaaactagctcagatgctgaccgagcccgggagaagctgaatgggacgatcgtagagggacggaaaattgaggtcaataatgccacggcccgagtgatgaccaacaagaagacggggaacccctacaccaacggctggaagctaaatccagtggtcggcgcagtctacgggcctgaattctatgcagtgacggggttcccctaccccaccaccggcacagccgttgcctaccggggcgcacatcttcggggccggggccgggccgtgtataatacatttcgggctgcgccacccccaccccccatcccgacttacggagcggtcgtgtatcaggatggattttatggtgctgagatttatggaggctacgcagcctacagatacgctcagcccgctgcagcggcggcagcctacagcgacagttacggcagagtctacgcagctgccgacccgtaccatcacaccatcgggcccgcggcgacctacagcattggaaccatgtgaaaccttccaccgtttccttctcggaccatgaagggcaaaaacaaaaaaacaaaaaaaatcacaaaac

SEQ ID NO: 13781 - DNA, 3072 bp, Homo sapiens
  source 1..3072: mol_type = unassigned DNA
cttacacatctcaaattctttttaaaaatttgggagtgttcccactttgcaagcatcccgagtgcgtcctgggtgtgactcttctgtgatctggcacttggcacaggaagtaaaagcggtagacatttttatagggtacaggtgatcaaccagcggggctgcaaaatctctggaaccagctgcccactctgcacccaagggccacacccaccgctgtctgggcagaagtgagaattcaggggagcatggaaatcagaacagacccatctctgaatggcctcgggctatgcggctcatgaggggcacggaacctacaccagtgaaacatcagggaatggagggaggtgggaacctttgcccacctttgcagcaagagccgtttcatctcaatctcttcatcagcctgggcacagagggctgcagtgggacggccctgggttctctgcaggttggcaccgaagccaacccatgggctctggtggcgagtgctgcgtgacttggcttcaacactacccaacactctggaattcatcagttgggggtggaggtttccattgtagaaaacaaacccaccaggtttgcccaggtgttaactatttacggtagaaacaggccagccaggcagtctcaggctgtctctgccatctggggttccagacagtgaaatggaggcagcagagacaggtggaggctcccagagaggcagaattgacaggggagggcacccaggaagccagaatcaccggtggaggcatccaggaagccagaattgacaggtgaaggtgcccagggccatctgaagcacacatgcagcctccaagtctcactcgcccagagtggacccagaagagtcactggatggagccccggggagtctgggcttggggtcagggtctccaggactctgctccatcatgggccttctagtaagaagagtcagttcttcggactggaggtcttcccagaaaacaaaacatttctttcagcctgatgcagtggctcatgcctgtaatcccagcactttgggaggctaaggtggcaggatcccttgagcccaggacttcaagaccagcctgagcaacacagggagaccctgtctctacagatagtttttaaaattagctgtgggtgtagtggcaggcacctgtggcccaagctactcgggaggctgaagtaggaggatcgcttgagcccaggaggtcgaggctgcagtgagccgtgatcgtccactgcactccagcctgggcaacagagcaagaaactgtgcccccctacccccaaaaaaagtttcttccttcctaacctgggatttatctttttggaagattccaaagtcccagcaatggcgtccagacacaaggttgtgtgatggtgggccggggatgcggggtggggtgaagacttggccagagggaggaacataccccgaccctccgtcctcactgcctccagtctgcctgccctgcagtggggttgttagaatctgggtcaggggttcacacatggcctgggcccactgccaccctctccagatgtatctccccagctggccagtgggctctcgtccctgctgttcctccccacccagtgcaaagggacaaggagccgggcccacggggcatgctgtagagataagacctgggtacactgaggaggggtaaggggctgggcctcgtcaagaagccctcctgcccaacctgtcggaatgcctggagccggagcccactgcaaggcagctggtgtcccccgcagaggcctccaggtggagcaggtctttgctctgctcctgggttcccccggggagaggaagactggcccacctgcaggaagggagaggctgggatgccgattacaggctgggatccctggctctgccactccccagctgctgacgggaggttgctgtgcctctccagggctgtttcttcatctgcaaaatggggagggtgtggtggctcactgggcagggaggaccccgtgagtttcgaacagtctgtgtggctcacacacagtgttgaggaaaaccagcccatccttattatcattcccagtccaaatgccctttcctcctcgacctgctcccaggccaccctcccggacagccgctctgggggaagatgaggacgggaggaaagtgagagcaggactcagcacggggaagagggagcaggacggggactttggcaggcagtggggagagcttatgggcagagtccaagcgcctttcctgcagcctctggccacctggagctcggatggtggggctgtgctgagtctgactccagaaaccctcatcccagctgtgctcaggggggtagataacaagttccactttccctctccagttctcttctgggaggtgggtaccccaggcttcgggggatgacgcccaggggtgagggttgctcaggggcaggctgaggaggatcacaattgggaaagaatcctagcagacccccaggcagaagagtcaggaaggagtagaccctggtgttttgaactcagcacttgtccgggcagtgtgggaaaggggggcccggcgcggggaggcgccctgggaatgttcccaagggctccaccggtgtcgctggggttcccaggcatacgttttggtgggaaaagggtcggggaaggcagtgactaggtctctgtgcctttgttttaggctggaagctaaatccagtggtcggcgcagtctacgggcctgaattctatgcagtgacggggttcccctaccccaccaccggcacagccgttgcctaccggggcgcacatcttcggggccggggccgggccgtgtataatacatttcgggctgcgccacccccaccccccatcccgacttacggagcggtcgtgtatcaggatggattttatggtgctgagatttatggaggctacgcagcctacagatacgctcagcccgctgcagcggcggcagcctacagcgacagttacggcagagtctacgcagctgccgacccgtaccatcacaccatcgggcccgcggcgacctacagcattggaaccatgtgaaaccttccaccgtttccttctcggaccatgaagggc

SEQ ID NO: 13782 - DNA, 877 bp, Homo sapiens
  source 1..877: mol_type = unassigned DNA
gggtcgtgtatcaggatggattttatggtgctgagatttatggaggctacgcagcctacagatacgctcagcccgctgcagcggcggcagcctacagcgacagttacggcagagtctacgcagctgccgacccgtaccatcacaccatcgggcccgcggcgacctacagcattggaaccatggctagcctctgccgaggagggtacagccgcttcaccccctactagcaagagacccagcccctaacagcattcacactgactgcctattacacaccaaacccaacagcccaaaaccaggcacagccaccagaagacagtgcacccctcccggtcagcgacacgcacggctggccccctgcaactctaaaatctatagattatttctctccagccagttggtctccccaccccacctgtgctggtgtgtgtgtctttgaccctggtttttcctgtatgtctgcaaccgtgatttcctattttgactttgttgatgttgtactacccaagccattgcaggtacggtgtgcacaccgtggggtccaggctgggccaggagaccaggcagcccccaacctgggagtagcggtagcgccctatgagggcaagagccacatttcctggcctcccaggctgcacagaacaacagaaacgcctggcagggcctcccccaaagccacccgaccagccccgtgccatggccctagtgtccagcaccctgacgcagggagggaggggctccaggcacccagtgtgggtctccccggcctgagggtgctcccgcaggccttcacccagccaaccacaggagtagccactgcccctcctcgccccattcagctgaaactaatatttttcattaaattttattgacgata

SEQ ID NO: 13783 - DNA, 611 bp, Homo sapiens
  source 1..611: mol_type = unassigned DNA
ggtcggcgcagtctacgggcctgaattctatgcagtgacggggttcccctaccccaccaccggcacagccgttgcctaccggggcgcacatcttcggggccggggccgggccgtgtataatacatttcgggctgcgccacccccaccccccatcccgacttacggagcggtcgtgtatcaggatggattttatggtgctgagatttatggaggctacgcagcctacagatacgctcagcccgctgcagcggcggcagcctacagcgacagttacggcagagtctacgcagctgccgacccgtaccatcacaccatcgggcccgcggcgacctacagcattggaaccatggctagcctctgccgaggagggtacagccgcttcaccccctactagcaagagacccagcccctaacagcattcacactgactgcctattacacaccaaacccaacagcccaaaaccaggcacagccaccagaagacagtgcacccctcccggtcagcgacacgcacggctggccccctgcaactctaaaatctatagattatttctctccagccagttggtctccccaccccacctgtgctggtgtgtgtgtctttgaccctg

SEQ ID NO: 13784 - DNA, 1547 bp, Homo sapiens
  source 1..1547: mol_type = unassigned DNA
agaagccgagggatgcagccaggggcacctcgcatggacgcctgccgcccgcctcagccctctgccctggggacacatggctgtgctggcagcagcaggttgaaattctgcctctgagaagctaacagtcttcctgtggtcgccactcctccccagcagccccctccttgccaaggacggtccagaaggagccccactggggcctccccgctcagcaaagcagacctcacctcccactaccagcttgaagtcacagcagccagaggaaattctgccaccattttcccaggtctgcagcccctccagctgggaacctgctcctggagccatccctctgcaaacagagagcccagagtgcctcggggaaaattggctgaataaaagagcgatcaggacgccacggctccgcctgaagcgatggcccagccctacccccccgcccagtacccccctccgccacagaacggcatccctgccgagtacgccccgcccccaccgcaccccacgcaggactactccggccagaccccggtccccacagagcatggcatgaccctgtacacaccagcacagacccaccccgagcagccaggctccgaggccagcacacagcccatcgccgggacccagacagtgccgcagacagacgaggcggcacagacggacagccagccgctccacccctccgaccctacagagaagcagcagcccaagcggctacacgtctccaacatccccttccggttcagggaccccgacttgcggcaaatgttcgggcaattcggaaaaattttagacgtggagatcatttttaacgagcggggctccaagggttttgggtttgtaacttttgaaactagctcagatgctgaccgagcccgggagaagctgaatgggacgatcgtagagggacggaaaattgaggtcaataatgccacggcccgagtgatgaccaacaagaagacggggaacccctacaccaacggctggaagctaaatccagtggtcggcgcagtctacgggcctgaattctatgcagtgacggggttcccctaccccaccaccggcacagccgttgcctaccggggcgcacatcttcggggccggggccgggccgtgtataatacatttcgggctgcgccacccccaccccccatcccgacttacggagcggtcgtgtatcaggatggattttatggtgctgagatttatggaggctacgcagcctacagatacgctcagcccgctgcagcggcggcagcctacagcgacagttacggcagagtctacgcagctgccgacccgtaccatcacaccatcgggcccgcggcgacctacagcattggaaccatggtaaggagcccaggcccgcccagccctgggtgccagtcctaacagctgggcatgggtggtgaggcccttgggggagaggccgagccctctgaccaatgccttggtcccggagactttggaaggaccacggcctggatgtgagttagggtgaggggagggctggcccctcacgccctctcagttgcggggaagca

SEQ ID NO: 13785 - DNA, 260 bp, Homo sapiens
  source 1..260: mol_type = unassigned DNA
ggaggaggagagagaccgggagggcgcccgggaggcagggcgcgcgcacactccgagggacgcagcgagcgcagagccgccgccgggcgcccccctgccgccccatgctgtgctccatggcgaactcgggctgcctcctgctgtccaactccggcagcatgctcccgcactccgtgccctgcccgcccgccttcctctacctccaacagagcgatcaggacgccacggctccgcctgaagcgatggcccagccctacccc

SEQ ID NO: 13786 - DNA, 154 bp, Homo sapiens
  source 1..154: mol_type = unassigned DNA
agatgaacagctgaccgtgttttcaaagataccacctggggaaacagccagaagctggaagtcatcccaagagagaagtcagccaggggttggagaccccagcagaagagcgatcaggacgccacggctccgcctgaagcgatggcccagccct

SEQ ID NO: 13787 - DNA, 2694 bp, Homo sapiens
  source 1..2694: mol_type = unassigned DNA
gtgagcaggagacagggagggctgaaggctgtgcagcaccctggtatggggtgagtgagggtgcctagagggcgcccacagaaggggctcctgactcggactgaggggcagggaggtctccttggatgaaggggtgcctgggctagggctgcaggctggctggcccttgccaagagaggacaagagggagccattccgtgtagagggcatagtggctgcaaaggcctcagggagctgagggcatgtggcgtgctctgggtagcacatgactgagtgtgcgcctggactgggcatccgggatggggtcaccaagagcctcgtggacgatggagaagttgcaaggggatttgctgatgggcagccctgcccagcagcgactccactgggcttgttccttgtccgttccttgaacaacttgaagtcacagcagccagaggaaattctgccaccattttcccaggtctgcagcccctccagctgggaacctgctcctggagccatccctctgcaaacagagagcccagagtgcctcggggaaaattggctgaataaaaggtataaagactttctctatttttcctgaatagtttttgacagatatgagcatgttgaacatcttgggagctgctgataatgaaagccaggagtttctggggtttcccagccactggagggaggaagagtttgggggctgtggagggaaggcttggcgccgtttagcacctctgtgtcgtgttctctcttgtcccccatggatgagcccaaaatgtgctgggaaaggcaggactgggagccggaggggctgaaagggaaatggataaatggggtaaggatggaggacgattgtttttaggcaattctggctggcctgagaagcaatgtcactgccttcctgatcctttccctcccccaaccccaaggtcccccaccccaggtgctccgcgcatggccacccattcctcaggcagccccagcttgctggtccagggtggtccaactcatctccatggcctggtctcctcggggaaggggcttcggataccagctcagttcccagtgttgaccctcgctgggggactggctactactgcctgagcccattggtccattgctctgtacctccaacccccattacccacctgtggctgaccccctccacagattcacttgcagagtttactttggggagattattatacaagtatgatgcttctggaccttcaatggggttgtgtcctgataaacccatcataaggtgaaaatattgtaagtcaaaaataaatttaatggaccgggcttggtggctcatgcttgtaatctcaacattttgggaggccaaggtgggcagatcacctgaggtcaggagttcaagaccagcctggccaacatggcgaaaccctatctctactaaaaaatacaaaaattagccgggcatggtggcgggtgcctgtagtcccagctactggtaggccgaggcaggagaatcacttgaacccgggaggcggaggttgcatgagctgagatcacaccactgcactccagcctggtcaacagagcaagactccatctcaaaaaaaaaaaaaaaaaaaaaaaaaaaaagcacttaatgcccccaataaacccaacaaacataaagttgaaaaattcaaagtcaatcgtaagtcaaaccttcgtaagttggagatcatctgtaatgtatatttagtgtgaacaaaattagaaaatgcagccatcggccctcaggtggcctctcttcgctaggtcctgggttttgggtggtgtgtgcacaaggccagcgctgcgtttttcaaaaatcaggaccggaaactagatccgtcagcgtatgaagtcttcttcagccaaaactagaaaagttgggcactcttttttgtaccgcgtttgccctaagcccgcccttggctcagaagtgggcactgaccagatggcctggagctagacctgacattagaactagacctgggctagacctgagccgggtgcttccgtcctagaagcaggtcacctcggagccactcagggctgcgggcagaggcagctcgggctctgctgccggctctccggctttctagcaggaagaggacaaagagacagagcccagggggtccccttcacatggcctcaggcttcccacagtgggccgtgtgtaacagggtcccccgtaccgagtggctgcctgtgtgtgtcagggttagatgcagttttccgtgggagtagacaggaaggccgccgggtgttggcctcacaggcgcccgcaagtgttcaccacgaggagggcagcagccgtcacagccgcctcctgagatgccaccgctgtaaactgaatctattttacagggaagcatcggaaggagcccccaggtgagtcacttgtagaataaagaattcatttgccgggccgggcgcggtggctcacgcctgtaatcccagcactttgggaggccaaggcgggcgtatcacctgaggtcaggagttcaagaccagcctggccaatgtagtgaaaccccgtctctactaaaaatacaaaaattagccgggcatggtgacaggcacctataatcccagctacatgggaggctgaggcacgagaatcacttgaacccgggaggcagaggttgcagtgagccgagattgcaccacttactccagcctgggcaacagagcaaaactccgtct

SEQ ID NO: 13788 - DNA, 321 bp, Homo sapiens
  source 1..321: mol_type = unassigned DNA
cagcttgaagtcacagcagccagaggaaattctgccaccattttcccaggtctgcagcccctccagctgggaacctgctcctggagccatccctctgcaaacaggtgtcctctcccggagaagctagccacaactctcccagcaccgcctctgtgctttctgtgctcgcccatcgtgaagccagcctatgcctccagtctcttctctaccaggagggagcagctaaaagctgagatttgttgcaatttacttttgtcccccacccatgccttcacagtgcccggcacttatttggtgtttaataaactgcccattaaatgc

SEQ ID NO: 13789 - DNA, 2934 bp, Homo sapiens; identical to SEQ ID NO: 13777
  source 1..2934: mol_type = unassigned DNA

SEQ ID NO: 13790 - DNA, 1143 bp, Homo sapiens; identical to SEQ ID NO: 13778
  source 1..1143: mol_type = unassigned DNA

SEQ ID NO: 13791 - DNA, 1201 bp, Homo sapiens; identical to SEQ ID NO: 13779
  source 1..1201: mol_type = unassigned DNA

SEQ ID NO: 13792 - DNA, 1519 bp, Homo sapiens; identical to SEQ ID NO: 13780
  source 1..1519: mol_type = unassigned DNA

SEQ ID NO: 13793 - DNA, 3072 bp, Homo sapiens; identical to SEQ ID NO: 13781
  source 1..3072: mol_type = unassigned DNA

SEQ ID NO: 13794 - DNA, 877 bp, Homo sapiens; identical to SEQ ID NO: 13782
  source 1..877: mol_type = unassigned DNA

SEQ ID NO: 13795 - DNA, 611 bp, Homo sapiens; identical to SEQ ID NO: 13783
  source 1..611: mol_type = unassigned DNA

SEQ ID NO: 13796 - DNA, 1547 bp, Homo sapiens; identical to SEQ ID NO: 13784
  source 1..1547: mol_type = unassigned DNA

SEQ ID NO: 13797 - DNA, 260 bp, Homo sapiens; identical to SEQ ID NO: 13785
  source 1..260: mol_type = unassigned DNA

SEQ ID NO: 13798 - DNA, 154 bp, Homo sapiens; identical to SEQ ID NO: 13786
  source 1..154: mol_type = unassigned DNA

SEQ ID NO: 13799 - DNA, 2694 bp, Homo sapiens; identical to SEQ ID NO: 13787
  source 1..2694: mol_type = unassigned DNA

SEQ ID NO: 13800 - DNA, 321 bp, Homo sapiens; identical to SEQ ID NO: 13788
  source 1..321: mol_type = unassigned DNA

SEQ ID NO: 13801 - DNA, 4314 bp, Homo sapiens
  source 1..4314: mol_type = unassigned DNA
cgaacgcccacgccagcgaccctgactctatggccccgggggagcgcgccggagccgccgcgccgcccacccccagccggaaccctagcgtcccggggagcaagcggggagccccgggcgtccccggccccggcccagggccctgcttgtggcccccgctcccgccacggggcatgggaggcaggtagcccagcctgcgccaggacacccgtggcgggcggaacccgccaaggaccgcgaagtccagagaaaggaagctgaggagctgcccgcccgcccccggctgcagccccagcagggccctcccccggtggcgcgcacccgcgcgcgcacactcgcacaccgcacctcagcgcctgcccggcctcgcccccacccgcgagcgccgaacctcctggggccggatgccatgggtaacaacttctccagtatcccctcgctgccccgaggaaacccgagccgcgcgccgcggggccacccccagaacctcaaagactctatcgggggccccttccccgtcacttctcaccgatgccaccacaagcagaagcactgtccggcagtgctgcccagcggggggctcccagccacgccgctgctcttccacccgcacaccaagggctcccagatcctcatggacctcagccacaaggctgtcaagaggcaggccagcttctgcaacgccatcaccttcagcaaccgcccggtcctcatctacgagcaagtcaggctgaagatcaccaagaagcagtgctgctggagcggggccctgcggctgggcttcaccagcaaggacccgtcccgcatccaccctgactcgctgcccaagtacgcctgccccgacctggtgtcccagagtggcttctgggccaaggcgctgcctgaggagtttgccaatgagggcaacatcatcgcattctgggtggacaagaagggccgtgtcttccaccgcatcaacgactcggctgttatgctgttcttcagcggggtccgcacggccgacccgctctgggccctggtggacgtctacggcctcacgcggggcgtccagctgcttgatagcgagctggtgctcccggactgtctgcggccgcgctccttcaccgccctgcggcggccgtcgctgcggcgcgaggcggacgacgcgcgcctctcggtgagcctatgcgacctcaacgtgccgggcgcggacggcgacgaggccgcgccggccgccggctgccccatcccgcagaactcactcaactcgcagcacagccgcgcgctgccggcgcagctcgacggcgacctgcgtttccacgccctgcgcgccggcgcgcacgtccgcatcctcgacgagcagacggtggcgcgcgtggagcacgggcgcgacgagcgcgcgctcgtcttcaccagccggcccgtgcgcgtggccgagaccatcttcgtcaaggtcacgcgctcgggtggcgcgcggcccggcgcgctgtcgttcggcgtcaccacgtgcgaccccggcacgctgcggccggccgacctgcctttcagccctgaggccctggtggaccgcaaggaattctgggccgtgtgccgcgtgcccgggcccctgcacagcggcgacatcctgggcctggtggtcaacgccgacggcgagctgcacctcagccacaatggcgcggccgccggcatgcagctgtgcgtggacgcctcgcagccgctttggatgctcttcggcctgcacgggaccatcacgcagatccgcatcctcggctccactatcctggccgagcggggtatcccatcactcccctgctcccctgcctccacgccaacctcgcccagtgccctgggcagccgcctgtctgaccccttgctcagcacgtgcagctctggccctctgggtagctctgctggtgggacagcccccaattcgccagtgagcctgcccgagtcgccagtgaccccaggtctgggccagtggagcgatgagtgcaccatttgctatgaacacgcggtggacacggtcatctacacatgtggccacatgtgcctctgctacgcctgtggcctgcgcctcaagaaggctctgcacgcctgctgccccatctgccgccgccccatcaaggacatcatcaagacctaccgcagctcctagcccgttgcggtggcccatcccgcatacccatcttctcgggcttcagcccagtcccagctgaggaacaagccagtggggccccttctcttcctcattttggaaacttttcctcctctattaaacatgggaaactgaagcccttgaaggtttggggagaggggggtatcaggcagggagggggcagaggcaaatcaccgggcagagggaggggaggagaggaggccgcactctccctgtctctcccgtctctgcacccagctcctctctgcatgctgagggctaaattgggatctcagcctgccctaatctttccccatctgaggcaggtttctaggaggtgtctgtagtccatgtggcacctttgtgagaattagaaaacatgtaccttcctctgggcagctgcagccctgagccaggacatgtggcctggctagtgcagcatggagtggattttaggctcatttgccctctcagccaactgcccttgagcagtgtacagcctgctcaacaaccgccctgggcaggccgctcctgagctgctgtctccctctctgacctatgcctaccttctctttcttcgttccctgcccactgggcatggcagctgggggtgagaggctggtggttgcctcccgtcctgggcaggctgcagcctcatgccatgtctctctcccactacctgatgggcacatggacaggctgcagagggctccaggttctgggcccctggctgagaaggggaggatcctgtcctggctgtagccttcctgccccaatcatctcgctggatgccattgcccaggggtagcccttcggtatgggctggggagaagggttggtcttctgccagggtccctaagaacaggtttgcagctaccctctctgaccttttccccatatcttgtgctgtccagggcctaggctgatagtcagagcctgtggcacacctgggatgggccagggccctgggtggggaggtgtgggttccctgggccaagaccagcctttttcctcagtttaattaatttatttatttggtttgtggttttgggttttttttgtttgtttgtttgtaggtgagttcccatcctctgggcccctagaaatgctgcctttgtgtgtggggtacctgggaaagggtgtggctgaggcagtcataatgcagtatcttcccctgactccagccacaaagctcatacccagccctaccaatcatgaactggaactccataaggaggggccaaattgggaggccttttggcaaacagtgtctattttacagagaggcaaaccaagcctccttagtgccctggggctgatggtcacccagagccatagagcacccttcctcctgggccagagctgggttatcatggttggcttaggtacctcaggtggcccaggaggtcccccctccataaggacgtcaaacttccaggagggccagtgttcctagtgtgggccaggaacaggacagggagaccttgtgatggcggggcagggagcctgttcgtagggaagatgaggaggcaagggctgcctctcacacctccaggttctctaagttctggggagggagcgccccacctgctgaggtcggtcctctcagccctgcctgccctggcctgggctctcccagcctcccagccctctgccccctcagatggctttttgtttttgtttttttttgcatccatcagagactgcacctctgtgtggcaggcagggcatgggttttagtcctggccactgaccagctgtgtggccctggccgagtcgtagccccctggagcccagcttccatttctataaaatggttgtttcgggagagaggggcaggctttctgtgtgactcgggagttcttccgtgagggctgccagggggtggtgtgccaggacctcaggctgggcctttgtgctggccttgcagtgggtgtgtggggaagtcactgtcccactatgggtctccactacccagtcactgaccctgggagaccccttctgtgtgggagggagcgggggctggctagcgggccccccagccagggatcccagaggctgagggttggggagaggaagccatcatctcattacctctgtcagtgcaggggtggctgctgcttcccttgtgcacttgggtcgctgtgattgtgaataaaagtgatttcgtaccagcctga

SEQ ID NO: 13802 - DNA, 746 bp, Homo sapiens
  source 1..746: mol_type = unassigned DNA
gggggcgcgggaggggcctcggccctgccatgccggtctccgcccgcgggggaggagacgggggaggaggaggggagcagccggccggggcgactcggtgaccagccggccggcccagcagaggtggctgcactgcccgtcgccggagatggggggacagatcacccggagcactctccacgactctatcgggggccccttccccgtcacttctcaccgatgccaccacaagcagaagcactgtccggcagtgctgcccagcggggggctcccagccacgccgctgctcttccacccgcacaccaagggctcccagatcctcatggacctcagccacaaggctgtcaagaggcaggccagcttctgcaacgccatcaccttcagcaaccgcccggtcctcatctacgagcaagtcaggctgaagatcaccaagaagcagtgctgctggagcggggccctgcggctgggcttcaccagcaaggacccgtcccgcatccaccctgactcgctgcccaagtacgcctgccccgacctggtgtcccagagtggcttctgggccaaggcgctgcctgaggagtttgccaatgagggcaacatcatcgcattctgggtggacaagaagggccgtgtcttccaccgcatcaacgactcggctgttatgctgttcttcagcggggtccgcacggccgacccgctctgggccctggtggacgtctacggcctcacgcggggcgtccagctgcttg

SEQ ID NO: 13803 - DNA, 628 bp, Homo sapiens
  source 1..628: mol_type = unassigned DNA
ggtcaggctggtcttgaattcctgacctcgtgatccacctgtgtcggcctcccaaagtgctgggtttacaggtgtgagccaccgcgcttggctgattgtattttctttagggccttggactttcggcttgattcgggccaaacattttggattgctgcgttaaaactctatcgggggccccttccccgtcacttctcaccgatgccaccacaagcagaagcactgtccggcagtgctgcccagcggggggctcccagccacgccgctgctcttccacccgcacaccaagggctcccagatcctcatggacctcagccacaaggctgtcaagaggcaggccagcttctgcaacgccatcaccttcagcaaccgcccggtcctcatctacgagcaagtcaggctgaagatcaccaagaagcagtgctgctggagcggggccctgcggctgggcttcaccagcaaggacccgtcccgcatccaccctgactcgctgcccaagtacgcctgccccgacctggtgtcccagagtggcttctgggccaaggcgctgcctgaggagtttgccaatgagggcaacatcatcgcattctgggtggacaagaagggccgtgtcttccaccgcatcaac

SEQ ID NO: 13804 - DNA, 447 bp, Homo sapiens
  source 1..447: mol_type = unassigned DNA
cgcattctgggtggacaagaagggccgtgtcttccaccgcatcaacgactcggctgttatgctgttcttcagcggggtccgcacggccgacccgctctgggccctggtggacgtctacggcctcacgcggggcgtccagctgcttggtctggatacccgacaagagcggggacagtggccctcctgtgccttccagagtcgagcttacaagagctcaaggcatcaaggatcaactgcacatgttgggcacagataggccaccagggccccagcagtgctggtacaaggaagaggggcagtgcagcgcccaggatgccagattcagtggggaaggtcggtctgcctgccttatagttccccggaggctcccgagggctttgtctggttcagttattcctgtgcactctagttttctaccacaatgaatatatatcaagttgaaccata

SEQ ID NO: 13805 - DNA, 578 bp, Homo sapiens
  source 1..578: mol_type = unassigned DNA
atataacctgagcgcccgcgcggccacgacacgaggaattcgcccacgcaggaggcgcggcgtccggaggccccagggttatgagactatcactgctcaggacctactaacaacaaagggtctgatgaagaataaaagagccaatgcaacatcttgtggaacaccaggactgagaactcttgttgttaccattgcaaagaggcgttctggcgtcagatgcacagtgatttgtatggtggcataatcattggctcctggccaggcattatgtttcagaggacactattgtcaagaaccattcaactagaaatctgcactgtatgcactcaaaagttgagatcatctgccttcctatgacaggaagaattctgtgctggcaattgactcatggactctcttcacatacactaaggcttggtccagtggctctgatggaattaactgtgcagccaaactagtggcattgacaagacagggccacagtctctggggacttcaggagaaattgctaattttaaaatgcagagtattatgttaatgctggattaaatcttcagatacattaaatgtggatttgg

SEQ ID NO: 13806 - DNA, 2852 bp, Homo sapiens
  source 1..2852: mol_type = unassigned DNA
tgggccactttcttctggccacaaaggggccggaatggagcgctccgcggcatacaaatgggcaggtcacgtggttccaggctcttggctggaccgggaagaccatatggcgcatgccggggaggaaggaggaggggcgggggtaggggtggagggtgaggggagcggttgtcggaggagggcgggagacgagcaaggcgtggggagaagtggggaggaggggagaacggggagcgcacagcctggacgcgtgcgcaggcgtcaggcgcatagacctgctagcccctcagctagcggccccgcccgcgcttagcatcactaactgggctatataacctgagcgcccgcgcggccacgacacgaggaattcgcccacgcaggaggcgcggcgtccggaggccccagggttatgagactatcactgctcaggacctactaacaacaaaggaaatcgaaacatgaccaaatcgtacagcgagagtgggctgatgggcgagcctcagccccaaggtcctccaagctggacagacgagtgtctcagttctcaggacgaggagcacgaggcagacaagaaggaggacgacctcgaaaccatgaacgcagaggaggactcactgaggaacgggggagaggaggaggacgaagatgaggacctggaagaggaggaagaagaggaagaggaggatgacgatcaaaagcccaagagacgcggccccaaaaagaagaagatgactaaggctcgcctggagcgttttaaattgagacgcatgaaggctaacgcccgggagcggaaccgcatgcacggactgaacgcggcgctagacaacctgcgcaaggtggtgccttgctattctaagacgcagaagctgtccaaaatcgagactctgcgcttggccaagaactacatctgggctctgtcggagatcctgcgctcaggcaaaagcccagacctggtctccttcgttcagacgctttgcaagggcttatcccaacccaccaccaacctggttgcgggctgcctgcaactcaatcctcggacttttctgcctgagcagaaccaggacatgcccccccacctgccgacggccagcgcttccttccctgtacacccctactcctaccagtcgcctgggctgcccagtccgccttacggtaccatggacagctcccatgtcttccacgttaagcctccgccgcacgcctacagcgcagcgctggagcccttctttgaaagccctctgactgattgcaccagcccttcctttgatggacccctcagcccgccgctcagcatcaatggcaacttctctttcaaacacgaaccgtccgccgagtttgagaaaaattatgcctttaccatgcactatcctgcagcgacactggcaggggcccaaagccacggatcaatcttctcaggcaccgctgcccctcgctgcgagatccccatagacaatattatgtccttcgatagccattcacatcatgagcgagtcatgagtgcccagctcaatgccatatttcatgattagaggcacgccagtttcaccatttccgggaaacgaacccactgtgcttacagtgactgtcgtgtttacaaaaggcagccctttgggtactactgctgcaaagtgcaaatactccaagcttcaagtgatatatgtatttattgtcattactgcctttggaagaaacaggggatcaaagttcctgttcaccttatgtattattttctatagctcttctatttaaaaaataaaaaaatacagtaaagtttaaaaaatacaccacgaatttggtgtggctgtattcagatcgtattaattatctgatcgggataacaaaatcacaagcaataattaggatctatgcaatttttaaactagtaatgggccaattaaaatatatataaatatatatttttcaaccagcattttactacttgttacctttcccatgctgaattattttgttgtgattttgtacagaatttttaatgactttttataatgtggatttcctattttaaaaccatgcagcttcatcaatttttatacatatcagaaaagtagaattatatctaatttatacaaaataatttaactaatttaaaccagcagaaaagtgcttagaaagttattgtgttgccttagcacttctttcctctccaattgtaaaaaaaaaaaaaaaaaaaaaaaaaaaaaaaaaattgcacaatttgagcaattcatttcactttaaagtctttccgtctccctaaaataaaaaccagaatcataattttcaagagaagaaaaaattaagagatacattccctatcaaaacatatcaattcaacacattacttgcacaagcttgtatatacatattataaataaatgccaacatacccttctttaaatcaaaagctgcttgactatcacatacaatttgcactgttactttttagtcttttactcctttgcattccatgattttacagagaatctgaagctattgatgtttccagaaaatataaatgcatgattttatacatagtcacaaaaatggtggtttgtcatatattcatgtaataaatctgagcctaaatctaatcaggttgttaatgttgggatttatatctatagtagtcaattagtacagtagcttaaataaattcaaaccatttaattcataattagaacaatagctattgcatgtaaaatgcagtccagaataagtgctgtttgagatgtgatgctggtaccactggaatcgatctgtactgtaattttgtttgtaatcctgtatattatggtgtaatgcacaatttagaaaacattcatccagttgcaataaaatagtattgaaagtga

SEQ ID NO: 13807 - DNA, 2131 bp, Homo sapiens
  source 1..2131: mol_type = unassigned DNA
agtctaaccttctgtgttgatgcatgaaggctggtacccacttacagggatgccagatgatcagtgcagaatgaaggtcccaagagagaggatcacatggctctctctgccctgtgacgtcactagcagatggcatgggtaccagctctggcagttggcatcaatgtcactttttagagatcaatgagatagtgcagatatacacagatctagagactccaggagacgatgcgacactcagcctgaaaagatttggaagacccaaaatgaaaactgattattgaatgaaattaaaacctaaggtaatttaagattagagaaccatgttaacactaccgtttgatgagtctgttgtaatgccagaatcccagatgtgcagaaagttttctagagaatgcgaggaccagaagcaaattaagaagccagaaagcttttccaaacagattgtccttcgaggaaagagcatcaaaagggcccctggagaagaaaccgagaaagaagaagaggaggaagacagggaagaggaagatgaaaatgggttgcctagaaggaggggtcttaggaaaaaaaagacaacaaagctgcgattggaaagggtcaagttcaggagacaggaagcgaacgcgcgcgagaggaacaggatgcacggcctcaacgacgctctggacaacttaagaaaagtggtcccctgttattctaaaacccagaaactgtccaaaatagagactttacgactggccaaaaactacatctgggcactttctgaaattctgagaatcggcaagagaccagatctgctcacattcgtccaaaacttatgcaaaggtctttcccagccaactacaaacttggtggcaggctgcttgcagctcaacgccaggagtttcctgatgggtcagggtggggaggctgcacaccacacaaggtcaccctactctaccttctacccaccctaccacagccctgagctcaccactcccccagggcatgggactcttgataattccaagtccatgaaaccctacaattattgcagtgcgtatgaatccttctatgaaagtacttcccctgagtgtgccagccctcagtttgaaggtcccttaagtcctcccccaattaactataatgggatattttccctgaagcaagaagaaaccttggactatggtaaaaattacaattacggcatgcattactgtgcagtgccacccaggggtccccttgggcagggtgccatgttcaggttgcccaccgacagccacttcccttacgacttacatctgcgcagccaatctctcacaatgcaagatgaattaaatgcagtttttcataattaatgaggaaaatgaaaataaacagtggtcattcacctcccctgtctaattaagacaaagcagatgcttgtgggctgagtaattggcacaactctatctaaggtgtttactagtttctgaagtgtgtttcaactattgtgagaattttctatgtaataataaatctcttttcgtatgagaacttcttttcctttccttttgtctgtgaagcactgtgattctgtttctactggaaagatttttttctttttaattttcttttaaacttatttaatttgtttgaacaaggtgtctaagaatatactgttgaataaagacatgcacacagcataattcaatgtctattttggttgtacagtaattataaaatgcatgttattaaaaccagatgagtaaaatgatgtgtttataattattaggaattatatattatgtatcttttaaaaattgaaattttaaaatatggagaatatcactaagctgacaatgatattgggagatgaatttgcaacaatataaaaagctatgcaattttctttttattaaggatgaatctaaatgcattcaattggtaactattcctcttcaagtatttgcagatggggcaacatgatatttgggtagctgatgtcataattcggggacaattatctcaatcatcaagaaaaaaatttcagcacttgttttgtattattcagaaattaactgtacaggtttgttatcacaatgtataattgtgtttttccaccccacatttttaaggcaattaaatatagatatttccactcgtaaaggac

SEQ ID NO: 13808 - DNA, 1263 bp, Homo sapiens
  source 1..1263: mol_type = unassigned DNA
ggaacagctgcagccggcgctgggcccgcctggaatgcgggaacaggctgcacaccaggacttttatggaaacttgctgctggagacggcggcggcggcggcggcagcggcagccagaggactcccagcggctggagcagaagtgttagcggccagagctcccagacccctacccacagccaggcgggacgcgcacagtccctccacgcggaaagaagtaccttcgccggtcaccggctcctgcagggtgcaaatatatacagagcttcataatcagcccaagaccacatagagcaaacatgaatgatatttcccaaaaggctgagattaaagaaatgcttgcttctgatgatgaggaagatgtatcttctaaagtagaaaaggcttatgttccaaaattaacaggaactgtgaagggtagatttgctgaaatggagaaacaaagacaagaggaacaaaggaagagaacggaggaggaacgaaaacgcagaattgagcaggatatgttagaaaagaggaaaatacagcgtgaattagcaaaaagggctgaacagattgaggacataaacaatacgggaactgaatcagcatcagaggaaggagatgattcactacttataactgtggtacctgtcaaatcatataaaacatctggaaaaatgaaaaagaattttgaggatctagaaaaagaacgtgaagagaaagaaaggatcaagtacgaggaagataaaagaataagatatgaagaacaacgaccatctctcaaggaagcaaagtgtctttcattagttatggatgatgaaatagaaagtgaagcaaaaaaagaatcactttctcccggaaaattgaaactaacttttgaagaactggagcgacaaagacaagaaaaccgaaagaagcaagctgaagaggaagcaagaaaacgtttagaagaagagaagcgtgcttttgaagaagcaaggcggcaaatggtaaatgaagatgaggaaaaccaagacacagcaaaaatttttaaagggtaccgccctggtaaactcaaactcagttttgaagaaatggaaaggcaaagaagagaagatgaaaaaaggaaagcagaagaagaagccagaaggagaatagaggaagaaaagaaggcgtttgctgaagcaaggagaaatatggtagtagatgatgactccccagagatgtataagacaatctctcaagaatttcttacaccgggaaaactggaaattaattttgaagaattattaaaacaaaaaa

SEQ ID NO: 13809 - DNA, 2607 bp, Homo sapiens
  source 1..2607: mol_type = unassigned DNA
agaggactcccagcggctggagcagaagtgttagcggccagagctcccagacccctacccacagccaggcgggacgcgcacagtccctccacgcggaaagaagtaccttcgccggtcaccggctcctgcagggtgcaaatatatacagagcttcataatcagcccaagaccacatagagcaaacatgaatgatatttcccaaaaggctgagattctgctttcttcatctaaacctgtcccaaaaacctatgtaccaaaacttggcaagggtgatgtaaaggataagtttgaagccatgcagagagccagggaagaaagaaatcaaaggagatctagagacgaaaaacaaagaagaaaagaacaatatattagagagagagaatggaacaggagaaagcaggagattaaagaaatgcttgcttctgatgatgaggaagatgtatcttctaaagtagaaaaggcttatgttccaaaattaacaggaactgtgaagggtagatttgctgaaatggagaaacaaagacaagaggaacaaaggaagagaacggaggaggaacgaaaacgcagaattgagcaggatatgttagaaaagaggaaaatacagcgtgaattagcaaaaagggctgaacagattgaggacataaacaatacgggaactgaatcagcatcagaggaaggagatgattcactacttataactgtggtacctgtcaaatcatataaaacatctggaaaaatgaaaaagaattttgaggatctagaaaaagaacgtgaagagaaagaaaggatcaagtacgaggaagataaaagaataagatatgaagaacaacgaccatctctcaaggaagcaaagtgtctttcattagttatggatgatgaaatagaaagtgaagcaaaaaaagaatcactttctcccggaaaattgaaactaacttttgaagaactggagcgacaaagacaagaaaaccgaaagaagcaagctgaagaggaagcaagaaaacgtttagaagaagagaagcgtgcttttgaagaagcaaggcggcaaatggtaaatgaagatgaggaaaaccaagacacagcaaaaatttttaaagggtaccgccctggtaaactcaaactcagttttgaagaaatggaaaggcaaagaagagaagatgaaaaaaggaaagcagaagaagaagccagaaggagaatagaggaagaaaagaaggcgtttgctgaagcaaggagaaatatggtagtagatgatgactccccagagatgtataagacaatctctcaagaatttcttacaccgggaaaactggaaattaattttgaagaattattaaaacaaaaaatggaagaagaaaaacgacgaacagaggaggaacggaagcataagctagaaatggagaaacaagaatttgaacaactgagacaggaaatgggagaggaagaggaagaaaatgaaacctttggattgagcagagaatatgaagaactgatcaaattaaaaaggagtggctctattcaagctaaaaacctaaaaagcaagtttgaaaaaattggacagttgtctgaaaaagaaatacagaaaaaaatagaagaagagcgagcaagaaggagagcaattgaccttgaaattaaagagcgagaagctgaaaattttcatgaggaagatgatgttgatgttaggcctgcaagaaaaagcgaggctccatttactcacaaagtgaatatgaaagctagatttgaacaaatggctaaggcaagagaagaagaagaacaaagaagaattgaagaacaaaagttactacgcatgcagtttgaacaaagggaaattgatgcagcactacaaaagaaaagagaagaggaggaggaggaagaaggtagcatcatgaatggctccactgctgaagatgaagagcaaaccagatcaggagctccatggttcaagaagcctcttaaaaacacatcagttgtagacagtgagccagtcagatttacggttaaagtaacaggagaacccaaaccagaaattacatggtggtttgaaggagaaatactgcaggatggagaagactatcaatatattgaaaggggagaaacttactgcctttacttaccagaaactttcccagaagatggaggagagtatatgtgtaaagcagtcaacaataaaggatctgcagctagtacctgtattcttaccattgaaagtaagaattaatcactctttttatcttttattctattaatttttttttccttaaaatcacttttcttcttctcttttttagctgatgactactagctcccctcccctctccctggaactttctctttcactccaactttcttactacatccatcttttctgtggcggggccaaaaaaggaaaccaggagtgccactatgctgacttcttattccttttcataacagtcttcaaagcacagctcatctaaagaatgcctacttcttttccaaataagcatcagatttatcgcctattatgcagtaacagtcaataaaatgtacttatgggggggaattactcaattattctatcagaacctattataaagactgtatttcccatagacgtttacagcaactatgttt

SEQ ID NO: 13810 - DNA, 1456 bp, Homo sapiens
  source 1..1456: mol_type = unassigned DNA
cggccagagctcccagacccctacccacagccaggcgggacgcgcacagtccctccacgcggaaagaagtaccttcgccggtcaccggctcctgcagggtgcaaatatatacagagcttcataatcagcccaagaccacatagagcaaacatgaatgatatttcccaaaaggctgagattctgctttcttcatctaaacctgtcccaaaaacctatgtaccaaaacttggcaagggtgatgtaaaggataagtttgaagccatgcagagagccagggaagaaagaaatcaaaggagatctagagacgaaaaacaaagaagaaaagaacaatatattagagagagagaatggaacaggagaaagcaggagattaaagaaatgcttgcttctgatgatgaggaagatgtatcttctaaagtagaaaaggcttatgttccaaaattaacaggaactgtgaagggtagatttgctgaaatggagaaacaaagacaagaggaacaaaggaagagaacggaggaggaacgaaaacgcagaattgagcaggatatgttagaaaagaggaaaatacagcgtgaattagcaaaaagggctgaacaggaaggagatgattcactacttataactgtggtacctgtcaaatcatataaaacatctggaaaaatgaaaaagaattttgaggatctagaaaaagaacgtgaagagaaagaaaggatcaagtacgaggaagataaaagaataagatatgaagaacaacgaccatctctcaaggaagcaaagtgtctttcattagttatggatgatgaaatagaaagtgaagcaaaaaaagaatcactttctcccggaaaattgaaactaacttttgaagaactggagcgacaaagacaagaaaaccgaaagaagcaagctgaagaggaagcaagaaaacgtttagaagaagagaagcgtgcttttgaagaagcaaggcggcaaatggtaaatgaagatgaggaaaaccaagacacagcaaaaatttttaaagggtaccgccctggtaaactcaaactcagttttgaagaaatggaaaggcaaagaagagaagatgaaaaaaggaaagcagaagaagaagccagaaggagaatagaggaagaaaagaaggcgtttgctgaagcaaggagaaatatggtagtagatgatgactccccagagatgtataagacaatctctcaagaatttcttacaccgggaaaactggaaattaattttgaagaattattaaaacaaaaaatggaagaagaaaaacgacgaacagaggaggaacggaagcataagctagaaatggagaaacaagaatttgaacaactgagacaggaaatgggagaggaagaggaagaaaatgaaacctttggattgagcagagaatatgaagaactgatcaaattaaaaaggagtggctctattcaagctaaaaacctaaaaa

SEQ ID NO: 13811 - DNA, 2712 bp, Homo sapiens
  source 1..2712: mol_type = unassigned DNA
ctgtgaagggtagatttgctgaaatggagaaacaaagacaagaggaacaaaggaagagaacggaggaggaacgaaaacgcagaattgagcaggatatgttagaaaagaggaaaatacagcgtgaattagcaaaaagggctgaacagattgaggacataaacaatacgggaactgaatcagcatcagaggaaggagatgattcactacttataactgtggtacctgtcaaatcatataaaacatctggaaaaatgaaaaagaattttgaggatctagaaaaagaacgtgaagagaaagaaaggatcaagtacgaggaagataaaagaataagatatgaagaacaacgaccatctctcaaggaagcaaagtgtctttcattagttatggatgatgaaatagaaagtgaagcaaaaaaagaatcactttctcccggaaaattgaaactaacttttgaagaactggagcgacaaagacaagaaaaccgaaagaagcaagctgaagaggaagcaagaaaacgtttagaagaagagaagcgtgcttttgaagaagcaaggcggcaaatggtaaatgaagatgaggaaaaccaagacacagcaaaaatttttaaagggtaccgccctggtaaactcaaactcagttttgaagaaatggaaaggcaaagaagagaagatgaaaaaaggaaagcagaagaagaagccagaaggagaatagaggaagaaaagaaggcgtttgctgaagcaaggagaaatatggtagtagatgatgactccccagagatgtataagacaatctctcaagaatttcttacaccgggaaaactggaaattaattttgaagaattattaaaacaaaaaatggaagaagaaaaacgacgaacagaggaggaacggaagcataagctagaaatggagaaacaagaatttgaacaactgagacaggaaatgggagaggaagaggaagaaaatgaaacctttggattgagcagagaatatgaagaactgatcaaattaaaaaggagtggctctattcaagctaaaaacctaaaaagcaagtttgaaaaaattggacagttgtctgaaaaagaaatacagaaaaaaatagaagaagagcgagcaagaaggagagcaattgaccttgaaattaaagagcgagaagctgaaaattttcatgaggaagatgatgttgatgttaggcctgcaagaaaaagcgaggctccatttactcacaaagtgaatatgaaagctagatttgaacaaatggctaaggcaagagaagaagaagaacaaagaagaattgaagaacaaaagttactacgcatgcagtttgaacaaagggaaattgatgcagcactacaaaagaaaagagaagaggaggaggaggaagaaggtagcatcatgaatggctccactgctgaagatgaagagcaaaccagatcaggagctccatggttcaagaagcctcttaaaaacacatcagttgtagacagtgagccagtcagatttacggttaaagtaacaggagaacccaaaccagaaattacatggtggtttgaaggagaaatactgcaggatggagaagactatcaatatattgaaaggggagaaacttactgcctttacttaccagaaactttcccagaagatggaggagagtatatgtgtaaagcagtcaacaataaaggatctgcagctagtacctgtattcttaccattgaaactgatgactactagctcccctcccctctccctggaactttctctttcactccaactttcttactacatccatcttttctgtggcggggccaaaaaaggaaaccaggagtgccactatgctgacttcttattccttttcataacagtcttcaaagcacagctcatctaaagaatgcctacttcttttccaaataagcatcagatttatcgcctattatgcagtaacagtcaataaaatgtacttatgggggggaattactcaattattctatcagaacctattataaagactgtatttcccatagacgtttacagcaactatgtttaaaaaacaaaaacaaaaaaaaaacacacaaacctaagtagaatacattattttgcatgaaggaatgtcatttctgagctttttacacctaaaattaggctgaaatagctgagataattaatttggaacctatcaatttgagtggactttttctttagtagtacaccattttggttgttgtagtttcaaagtctttctgaagcagatatattgggattggagcggggtggggaaaactgtcactcctttcagaggaaaaggggaggagcatggagaaaaacaaaaattaaaggacttaaagaatggctatacagtgttgagtgttgaggatattaaacatgttatttttcaaacgtatgtaatatatattaaatttataaagcaaatttatgttgtgatcttgcctgaacaaattatattttaatgaaaaaactttctattaatagttcacgcaagagaaaacactttcaacatagtcgaaggcttcaagatctaagtgtatcagacttagggaaaaagtggcacaaccttcgatttaaaattctagtctttaaaatgagtttgtaaataattagctattacgttctattaagttgttttatattttaattttctggaagacaattttattttacaacgtgaacccaaataaagtaacttctgtatttaaaa

SEQ ID NO: 13812 - DNA, 859 bp, Homo sapiens
  source 1..859: mol_type = unassigned DNA
acgaccatctctcaaggaagcaaagtgtctttcattagttatggtaaatttttgtttgtttgttttctaagaaacaaatcaaggcagtttaagttagcagcattttcctttatgactaaaaggtgggttttcataacgttttcttaggatgatgaaatagaaagtgaagcaaaaaaagaatcactttctcccggaaaattgaaactaacttttgaagaactggagcgacaaagacaagaaaaccgaaagaagcaagctgaagaggaagcaagaaaacgtttagaagaagagaagcgtgcttttgaagaagcaaggcggcaaatggtaaatgaagatgaggaaaaccaagacacagcaaaaatttttaaagggtaccgccctggtaaactcaaactcagttttgaagaaatggaaaggcaaagaagagaagatgaaaaaaggaaagcagaagaagaagccagaaggagaatagaggaagaaaagaaggcgtttgctgaagcaaggagaaatatggtagtagatgatgactccccagagatgtataagacaatctctcaagaatttcttacaccgggaaaactggaaattaattttgaagaattattaaaacaaaaaatggaagaagaaaaacgacgaacagaggaggaacggaagcataagctagaaatggagaaacaagaatttgaacaactgagacaggaaatgggagaggaagaggaagaaaatgaaacctttggattgagcagagaatatgaagaactgatcaaattaaaaaggagtggctctattcaagctaaaaacctaaaaagcaagtttgaaaaaattggacagttgtctgaaaaagaaatacagaaaaaaa

SEQ ID NO: 13813 - DNA, 1972 bp, Homo sapiens
  source 1..1972: mol_type = unassigned DNA
gtaatttatccaggaataagtattgtaatttcataccatagcttagttcatgcatatgtaaaatttaaaaatttcaggcaatctttgaattgtaaaccacttaaacattgtttctgagttgaaatagttctgtggtaaagcctggattaccttgataaaacttggagcaaatgaataataccccttgcctctctcattcccctgtgtgtatttcaaccacagagtcacagttcaggccagagggttatgttataccgcgcccggcctataatcttttgttttttttgagatggagtctcgctgtcacccaggctggagtacaatggtgcaatctcggctcactgcaacttccacctcctgggttcacgtgattctcctgcctcagcctccccactacttgggaggctgaggcaggagaatcgcttgaatctgggaggcagaggttgtagtgagctgagatcacatcattgcactccagcctgggcaataagagtgaaactccatctcaaaaaacaaaaacaaaaactaaaaacaaacaaaaaaaagaaatcccagtttcttcaagaaatagtccctttttagtatgtgtaattctggccagagtgataaaataattattttaaataggtagtagatgatgactccccagagatgtataagacaatctctcaagaatttcttacaccgggaaaactggaaattaattttgaagaattattaaaacaaaaaatggaagaagaaaaacgacgaacagaggaggaacggaagcataagctagaaatggagaaacaagaatttgaacaactgagacaggaaatgggagaggaagaggaagaaaatgaaacctttggattgagcagagaatatgaagaactgatcaaattaaaaaggagtggctctattcaagctaaaaacctaaaaagcaagtttgaaaaaattggacagttgtctgaaaaagaaatacagaaaaaaatagaagaagagcgagcaagaaggagagcaattgaccttgaaattaaagagcgagaagctgaaaattttcatgaggaagatgatgttgatgttaggcctgcaagaaaaagcgaggctccatttactcacaaagtgaatatgaaagctagatttgaacaaatggctaaggcaagagaagaagaagaacaaagaagaattgaagaacaaaagttactacgcatgcagtttgaacaaagggaaattgatgcagcactacaaaagaaaagagaagaggaggaggaggaagaaggtagcatcatgaatggctccactgctgaagatgaagagcaaaccagatcaggagctccatggttcaagaagcctcttaaaaacacatcagttgtagacagtgagccagtcagatttacggttaaagtaacaggagaacccaaaccagaaattacatggtggtttgaaggagaaatactgcaggatggagaagactatcaatatattgaaaggggagaaacttactgcctttacttaccagaaactttcccagaagatggaggagagtatatgtgtaaagcagtcaacaataaaggatctgcagctagtacctgtattcttaccattgaaagtaagaattaatcactctttttatcttttattctattaatttttttttccttaaaatcacttttcttcttctcttttttagctgatgactactagctcccctcccctctccctggaactttctctttcactccaactttcttactacatccatcttttctgtggcggggccaaaaaaggaaaccaggagtgccactatgctgacttcttattccttttcataacagtcttcaaagcacagctcatctaaagaatgcctacttcttttccaaataagcatcagatttatcgcctattatgcagtaacagtcaataaaatgtacttatgggggggaattactcaattattctatcagaacctattataaagactgtatttccc

SEQ ID NO: 13814 - DNA, 791 bp, Homo sapiens
  source 1..791: mol_type = unassigned DNA
gcattctgacctttttcagttaagtgctatcaaaaccaagcagagttggtaggacaaacaggctaggatcccagtgatattgtgatctttacatttggagaaaaagtctataactaagagaatgcttcataaatgtatctatcacttttcctgaactggagagttagaaaaaatctgagtgtctgcagtgtagcaaaaatatgcattataaacatgttaatcattttgtgcttctaaacacctttagaactagtaacgcttctttgtttttagaaggcaagcaattgttaatcttggcccactttcttgcaggaagatgatgttgatgttaggcctgcaagaaaaagcgaggctccatttactcacaaagtgaatatgaaagctagatttgaacaaatggctaaggcaagagaagaagaagaacaaagaagaattgaagaacaaaagttactacgcatgcagtttgaacaaagggaaattgatgcagcactacaaaagaaaagagaagaggaggaggaggaagaaggtagcatcatgaatggctccactgctgaagatgaagagcaaaccagatcaggagctccatggttcaagaagcctcttaaaaacacatcagttgtagacagtgagccagtcagatttacggttaaagtaacaggagaacccaaaccagaaattacatggtggtttgaaggagaaatactgcaggatggagaagactatcaatatattgaaaggggagaaacttactgcctttacttaccagaaactttcccagaagatggaggaga

SEQ ID NO: 13815 - DNA, 3195 bp, Homo sapiens
  source 1..3195: mol_type = unassigned DNA
aacagctgcagccggcgctgggcccgcctggaatgcgggaacaggctgcacaccaggacttttatggaaacttgctgctggagacggcggcggcggcggcggcagcggcagccagaggactcccagcggctggagcagaagtgttagcggccagagctcccagacccctacccacagccaggcgggacgcgcacagtccctccacgcggaaagaagtaccttcgccggtcaccggctcctgcagggtgcaaatatatacagagcttcataatcagcccaagaccacatagagcaaacatgaatgatatttcccaaaaggctgagattaaagaaatgcttgcttctgatgatgaggaagatgtatcttctaaagtagaaaaggcttatgttccaaaattaacaggaactgtgaagggtagatttgctgaaatggagaaacaaagacaagaggaacaaaggaagagaacggaggaggaacgaaaacgcagaattgagcaggatatgttagaaaagaggaaaatacagcgtgaattagcaaaaagggctgaacagattgaggacataaacaatacgggaactgaatcagcatcagaggaaggagatgattcactacttataactgtggtacctgtcaaatcatataaaacatctggaaaaatgaaaaagaattttgaggatctagaaaaagaacgtgaagagaaagaaaggatcaagtacgaggaagataaaagaataagatatgaagaacaacgaccatctctcaaggaagcaaagtgtctttcattagttatggatgatgaaatagaaagtgaagcaaaaaaagaatcactttctcccggaaaattgaaactaacttttgaagaactggagcgacaaagacaagaaaaccgaaagaagcaagctgaagaggaagcaagaaaacgtttagaagaagagaagcgtgcttttgaagaagcaaggcggcaaatggtaaatgaagatgaggaaaaccaagacacagcaaaaatttttaaagggtaccgccctggtaaactcaaactcagttttgaagaaatggaaaggcaaagaagagaagatgaaaaaaggaaagcagaagaagaagccagaaggagaatagaggaagaaaagaaggcgtttgctgaagcaaggagaaatatggtagtagatgatgactccccagagatgtataagacaatctctcaagaatttcttacaccgggaaaactggaaattaattttgaagaattattaaaacaaaaaatggaagaagaaaaacgacgaacagaggaggaacggaagcataagctagaaatggagaaacaagaatttgaacaactgagacaggaaatgggagaggaagaggaagaaaatgaaacctttggattgagcagagaatatgaagaactgatcaaattaaaaaggagtggctctattcaagctaaaaacctaaaaagcaagtttgaaaaaattggacagttgtctgaaaaagaaatacagaaaaaaatagaagaagagcgagcaagaaggagagcaattgaccttgaaattaaagagcgagaagctgaaaattttcatgaggaagatgatgttgatgttaggcctgcaagaaaaagcgaggctccatttactcacaaagtgaatatgaaagctagatttgaacaaatggctaaggcaagagaagaagaagaacaaagaagaattgaagaacaaaagttactacgcatgcagtttgaacaaagggaaattgatgcagcactacaaaagaaaagagaagaggaggaggaggaagaaggtagcatcatgaatggctccactgctgaagatgaagagcaaaccagatcaggagctccatggttcaagaagcctcttaaaaacacatcagttgtagacagtgagccagtcagatttacggttaaagtaacaggagaacccaaaccagaaattacatggtggtttgaaggagaaatactgcaggatggagaagactatcaatatattgaaaggggagaaacttactgcctttacttaccagaaactttcccagaagatggaggagagtatatgtgtaaagcagtcaacaataaaggatctgcagctagtacctgtattcttaccattgaaagtaagaattaatcactctttttatcttttattctattaatttttttttccttaaaatcacttttcttcttctcttttttagctgatgactactagctcccctcccctctccctggaactttctctttcactccaactttcttactacatccatcttttctgtggcggggccaaaaaaggaaaccaggagtgccactatgctgacttcttattccttttcataacagtcttcaaagcacagctcatctaaagaatgcctacttcttttccaaataagcatcagatttatcgcctattatgcagtaacagtcaataaaatgtacttatgggggggaattactcaattattctatcagaacctattataaagactgtatttcccatagacgtttacagcaactatgtttaaaaaacaaaaacaaaaaaaaaacacacaaacctaagtagaatacattattttgcatgaaggaatgtcatttctgagctttttacacctaaaattaggctgaaatagctgagataattaatttggaacctatcaatttgagtggactttttctttagtagtacaccattttggttgttgtagtttcaaagtctttctgaagcagatatattgggattggagcggggtggggaaaactgtcactcctttcagaggaaaaggggaggagcatggagaaaaacaaaaattaaaggacttaaagaatggctatacagtgttgagtgttgaggatattaaacatgttatttttcaaacgtatgtaatatatattaaatttataaagcaaatttatgttgtgatcttgcctgaacaaattatattttaatgaaaaaactttctattaatagttcacgcaagagaaaacactttcaacatagtcgaaggcttcaagatctaagtgtatcagacttagggaaaaagtggcacaaccttcgatttaaaattctagtctttaaaatgagtttgtaaataattagctattacgttctattaagttgttttatattttaattttctggaagacaattttattttacaacgtgaacccaaataaagtaacttctgtattt

SEQ ID NO: 13816 - DNA, 5602 bp, Homo sapiens
  source 1..5602: mol_type = unassigned DNA
gtgaactaaagagtcgccgcagacaagcaggcccccagatggagaaccagcctgtgaggtggcgggccctgccaggcctcccacgccctcctgggctccccgcagccccctggctcctccttggcgtgctgctgctgcccgggaccctgcgactggcaggaggacagtcagtgacccacaccggcctgcccatcatggcctccctggccaacacagctatctccttcagctgcaggatcacctatccatacactccccaattcaaggttttcacagtcagctactttcatgaagatctccagggacagaggagccctaagaagccaacaaactgccaccctggactgggcacagagaaccagagccacaccctggactgccaggtcacccttgtgctgccgggagcatcggccactggcacctactactgctctgtccactggccacactccacggtgagaggcagcggcaccttcatcctggtcagagacgcagggtaccgagagcccccgcagagtccacagaagctcctgctctttggcttcaccggcctcctgagtgtcctgagtgtagtgggcacggccctgctgctctggaacaagaagcggatgcggggtccagggaaggaccccaccaggaagtgcccagatccaagatctgccagcagccccaagcagcatccttcagaatctgtctacacagctctgcagcgccgcgagaccgaggtctatgcctgcatcgagaatgaggatggcagctcacccaccgccaagcagagccccctctcccaggagagaccgcatagattcgaagatgatggcgaacttaacctggtctatgaaaatctctaggatgggctccaccgctcatagagcttgccctgggtcagaggaccggggcagcccctgccaccaaaggacttgatctgagttgggagtaaggcccccagggacaccccatcatttcaccctcacattcaaggcccttcctgtcttggccggccccactgcccccccattctatgccccaaccaccaaggctttcccatcttggggcctttgcccaggctgttccttctgccaggcaggcccttcctcccttggcccaaccagcaaagcgcccctcagtcttcaagggctttcctggatgccacccttgcccagagccctgctcactgcctcatgctgacagagcagcatgctctcttggcaccagcctgcacctcagccagtagggcagcctctgagctgagggaggaccctgcaggggcgcctagcagtgctgtgtggggagccgaggtatggaggagctggggagcagctatgcaaatccctacctacccagctgggccagaggcacgaggcagccaggcagggtgggagcaggggctggcgtgggaggtctgggggacagacaaggatgatggacccctcagaggcaagactaggatcagggacagatctggaggcccaggacatggctgagaggtggtcagcaggctgggggcatggagcagagagggcttgggtacaagctggagaggaaggagattctggcatgttggggtgagggcagagggacagatgaggggaggagggtgctggctaaacaggaactgaatgaatggcctgaagctccctctcccaagggttcccactcccattggcctggccctgtacgtgcactctgtcatctccttggtcaccctctgctccaggccttctccaccacaggacctcagctgtccctccttctacccaaggtggagtcccccaaagtcccttctgtctggcctatcctgtgcccaccacctgtggcttcatccagccctcctcctctatctttatctgccataggccgcagccctggccccctgtggattgaggtcccaagtggtccagctgtggggtttggtgctgggaccctcaatggcagccggaaggtccctctgaggcagaagctcaagccccatggggacagtggctccccagtgcctggccctgagccatttctgctgtttcaggtgcccacatcaccctcatttcctcctcgcagtagccctgcaccgtggccagaaacccatccacaggcaggcagtggctggggtccgggtgccccgggctgttgggctctgcttcctccctctgctcccccatgtctccctgagttctcccacctttgctcatttgtaaaatgggcaggtcaatcttcccaccccaccgtgtgggctgccccaaccccaaatgtgcccagggaggggggggaacccaaggcacaggccccgcccctgcccccaagcagcactgggctactggctcacagaagcacctttggttctgcaggtcatgcccctccctgcagggaagggaaagctggtggtagaggctgggcacagactgacgtccagaagaagtcccttggccctgctagggtggcaccagacttctctggtcccacaggacagccagtggcctcccaacttggttctgggcccccgcctgcaagcacacatggcaaggagggctttagcaggctcacataaccgagtggcaaggcccctgctcccagaggctggatttgaatgaactccgggcctgtttggggaggtgaagctgccaggtgtgcacaggggcctcccaggctcctggctccaccagccaaggaggtgggggcaagggtcagggcaatgggggacaatgccgctcagggtgcagtgagctcccctgggaaaaccgaagccagcaagaccaggagagggccacctcactgggcctgcctcccccacctcctgggcctctctgacctcagctcctagaccctggacccttggctgggactcagcattttccagtctttttcaggggtagacaggggagcctgggttaaactttaccactgtgccctggcccaggcatcaccaacacggcctccctgcagctgccctgccaccgacagaccccgattaaacccacacctggccttggcctcccctgctctataccttgcatggtttttgcctcacttggaataaaattccaactcctccctgtggcgtaggaggttcttgggggctgacccatcacccctctggtggacagagacattgccagcgtggtggtcgtctgtgcttggttcagggcaaggctgggaggcagtgggtgctgaggtcttcagtgagcaaggagagaggcagggaggaggaggaggaggaggagagcacagcatgaaaggacgggaccctaaagggctttggcccaagggagggtggggcaagaatgttctgagacttctgtgggcagcaaagaggactgagcacctgttctccagcccccaggactgagagcctgcagagacaagctggcacagggcgaggggtggcagggaacttcagggtgggaggtgcatggggcaggcgggaggaggaagaacagagaggggacagagagggtatgaatgggagctcctggggtgcaggcttgctttccactatgaatgggtggaggagggaagagaagaaaattgcttttgagacccacccaggctgggtggcctcagggcctcccttgaatccctgctccacctcccacagccttgtggacttgggcaagtcactggccacctgagcctcagtttgcagtgacagtcaagacagctcaggccaggcgtagtggcttatgcctgtaatcccagcatgttgggaggccgaggcgggtggatcacttgaggccaggagtttgagaccagcctggccaacgtggtgaaaccccgtctctactaaaaatacaaaaattagcctggtgtggtggcacgcacctgtagtcccagctactcgagaggctaaggcaggagaatctcttgaacctgggagacagaggttgcagtgagccgaagtggcaccactgcacaccagcctgggctacagagcacgctctgtccaaataaacaaacaaacaaacactactcagtgtctcagaaaggacagaaggggactccctggctcaggcagaagctcagtgggtgtgcatttccttcaagactcgtccttcagaaggaataggcttctggggcagtacagaggagtctaagtgagaggcaggcctccctgggagctgggcccaggctctctgcagccatgcctttaaggagtgcctacggggtagcacgatcagatggacaggccagggctgcccagagctgggggtgggagcaaggtaagcagagaggtgagggaaggagggtgctggcttagcaggagctgaatgaatgggcctggaggggaaaagctaagggggatggggtggcttgagtggagtaggtgaggcctaggtgaaggggagctgtggaccttccaggacggacggatgtgagcagtcctgagtggggactggagttagggtggggaagggaagccccaggcagcccctgcaggcccctgcccctgggccctaccgcagcagggcagccctgtctctgggtctcagctgatgcttccctctgcccactggcccctgacctggtgggatttcccaccatctctcccggcccagcctgccctgccctcctaggtcttcccaacctcccctctgcagaaacatctcagccacgtctggcacccccaggcatccctgcctgcctctaggaagttgaccccttcaatgggtttcagcctccaaccccacccccgcttgactcctgctctgtcagcacttgcttgagaaaatcatcctgggaaaccagcttctgggagcaggggccttgccactcggttctgcgagcctgctgaagccctccttgccacgtgtgcttgcaggcgggggcccagaactaagctaggaggccactggctgtcctgtgggaccagggaagtctggtgccaccctagcagagggcccatggacttcttctggaggtcagtctgtgcccagcctctaccaccagtccagaacttgcagtgggtgcggtaaacggtggcccctcctcagcaaacatttccaggggattctggcagcagagtttccatgggaacatgtgctggttctgcgctgaacccggtgtggctggggttcccttcacagccaatattgcaggaactgagcctggtggcctcggccagggtaggcagtgctctttggccacccagtgtcacaaacctgaactcaagttacaggcaaaacctgcttttcctttttctttctctctctctctctttttttttttgttaaagcacattctaatgtaaagtccatgctccattctaaagatgcctctgggatttcagggatggatttttatgtagttcaatagttttcttggcagacagcttatgcaggagaggtgggccgttggctcagtccagccaggctgagtggcgtcactccattccttgcaatgccaggggatgtcatttgtccacctgagggggcttccccagtctcccttccctgacctgtggtcagaatgatggcctcagccttgactgagcgcgggtcaggccagactctctgaacttggtgttggcgtgtgttttgtgtgtgtctggaggtgacatatgtgggtgacagaagcatatgttacagtgaaacattaaaactacagcaaagtg

SEQ ID NO: 13817 - DNA, 671 bp, Homo sapiens
  source 1..671: mol_type = unassigned DNA
cccagatggagaaccagcctgtgaggtggcgggccctgccaggcctcccacgccctcctgggctccccgcagccccctggctcctccttggcgtgctgctgctgcccgggaccctgcgactggcaggaggacagtcagtgacccacaccggcctgcccatcatggcctccctggccaacacagctatctccttcagctgcaggatcacctatccatacactccccaattcaaggttttcacagtcagctactttcatgaagatctccagggacagaggagccctaagaagccaacaaactgccaccctggactgggcacagagaaccagagccacaccctggactgccaggtcacccttgtgctgccgggagcatcggccactggcacctactactgctctgtccactggccacactccacggtgagaggcagcggcaccttcatcctggtcagagagacaagatttcgccatgttggccaggctggtctcgaatcctgacctcaagtgatccgcccacctcagcctccaagagtgttgggattacaggcatgagccagcacacccagccagttttcatcacattctcaaaggagtgatgatcccaaaagttatgagtgagcccatcaccaaagccctgattctctgacctacctctgcgatcccctggaa

SEQ ID NO: 13818 - DNA, 7525 bp, Homo sapiens
  source 1..7525: mol_type = unassigned DNA
agcaggaagctcgcgccgccgtcgccgccgccgctcagcttccccgggcgcgtccaggacccgctgcgccaggcgcgccgtccccggacccggcgtgcgtccctacgaggaaagggaccccgccgctcgagccgcctccgccagccccactgcgaggggtcccagagccagccgcgcccgccctcgcccccggccccgcagccttcccgccctgcgcgccatgaacgcccccgagcggcagccccaacccgacggcggggacgccccaggccacgagcctgggggcagcccccaagacgagcttgacttctccatcctcttcgactatgagtatttgaatccgaacgaagaagagccgaatgcacataaggtcgccagcccaccctccggacccgcataccccgatgatgtcctggactatggcctcaagccatacagcccccttgctagtctctctggcgagccccccggccgattcggagagccggatagggtagggccgcagaagtttctgagcgcggccaagccagcaggggcctcgggcctgagccctcggatcgagatcactccgtcccacgaactgatccaggcagtggggcccctccgcatgagagacgcgggcctcctggtggagcagccgcccctggccggggtggccgccagcccgaggttcaccctgcccgtgcccggcttcgagggctaccgcgagccgctttgcttgagccccgctagcagcggctcctctgccagcttcatttctgacaccttctccccctacacctcgccctgcgtctcgcccaataacggcgggcccgacgacctgtgtccgcagtttcaaaacatccctgctcattattcccccagaacctcgccaataatgtcacctcgaaccagcctcgccgaggacagctgcctgggccgccactcgcccgtgccccgtccggcctcccgctcctcatcgcctggtgccaagcggaggcattcgtgcgccgaggccttggttgccctgccgcccggagcctcaccccagcgctcccggagcccctcgccgcagccctcatctcacgtggcaccccaggaccacggctccccggctgggtacccccctgtggctggctctgccgtgatcatggatgccctgaacagcctcgccacggactcgccttgtgggatcccccccaagatgtggaagaccagccctgacccctcgccggtgtctgccgccccatccaaggccggcctgcctcgccacatctacccggccgtggagttcctggggccctgcgagcagggcgagaggagaaactcggctccagaatccatcctgctggttccgcccacttggcccaagccgctggtgcctgccattcccatctgcagcatcccagtgactgcatccctccctccacttgagtggccgctgtccagtcagtcaggctcttacgagctgcggatcgaggtgcagcccaagccacatcaccgggcccactatgagacagaaggcagccgaggggctgtcaaagctccaactggaggccaccctgtggttcagctccatggctacatggaaaacaagcctctgggacttcagatcttcattgggacagctgatgagcggatccttaagccgcacgccttctaccaggtgcaccgaatcacggggaaaactgtcaccaccaccagctatgagaagatagtgggcaacaccaaagtcctggagatacccttggagcccaaaaacaacatgagggcaaccatcgactgtgcggggatcttgaagcttagaaacgccgacattgagctgcggaaaggcgagacggacattggaagaaagaacacgcgggtgagactggttttccgagttcacatcccagagtccagtggcagaatcgtctctttacagactgcatctaaccccatcgagtgctcccagcgatctgctcacgagctgcccatggttgaaagacaagacacagacagctgcctggtctatggcggccagcaaatgatcctcacggggcagaactttacatccgagtccaaagttgtgtttactgagaagaccacagatggacagcaaatttgggagatggaagccacggtggataaggacaagagccagcccaacatgctttttgttgagatccctgaatatcggaacaagcatatccgcacacctgtaaaagtgaacttctacgtcatcaatgggaagagaaaacgaagtcagcctcagcactttacctaccacccagtcccagccatcaagacggagcccacggatgaatatgaccccactctgatctgcagccccacccatggaggcctggggagccagccttactacccccagcacccgatggtggccgagtccccctcctgcctcgtggccaccatggctccctgccagcagttccgcacggggctctcatcccctgacgcccgctaccagcaacagaacccagcggccgtactctaccagcggagcaagagcctgagccccagcctgctgggctatcagcagccggccctcatggccgccccgctgtcccttgcggacgctcaccgctctgtgctggtgcacgccggctcccagggccagagctcagccctgctccacccctctccgaccaaccagcaggcctcgcctgtgatccactactcacccaccaaccagcagctgcgctgcggaagccaccaggagttccagcacatcatgtactgcgagaatttcgcaccaggcaccaccagacctggcccgcccccggtcagtcaaggtcagaggctgagcccgggttcctaccccacagtcattcagcagcagaatgccacgagccaaagagccgccaaaaacggacccccggtcagtgaccaaaaggaagtattacctgcgggggtgaccattaaacaggagcagaacttggaccagacctacttggatgatgagctgatagacacacaccttagctggatacaaaacatattatgaaacagaatgactgtgatctttgatccgagaaatcaaagttaaagttaatgaaattatcaggaaggagttttcaggacctcctgccagaaatcagacgtaaaagaagccattatagcaagacaccttctgtatctgacccctcggagccctccacagcccctcaccttctgtctcctttcatgttcatctcccagcccggagtccacacgcggatcaatgtatgggcactaagcggactctcacttaaggagctcgccacctccctctaaacaccagagagaactcttcttttcggtttatgttttaaatcccagagagcatcctggttgatcttaatggtgttccgtccaaatagtaagcacctgctgaccaaaagcacattctacatgagacaggacactggaactctcctgagaacagagtgactggagcttggggggatggacgggggacagaagatgtgggcactgtgattaaaccccagcccttgcgttcgtttttccaggtcacagatacagctcctgtaccttttgaaggcaaggagttctcagagcaaccaaaggaacgtgacccaagagcccagcttacaggctgaagaaacccaaaaccctcgatagagacagaaactgaactgtcagtccttagagctcgcccagtccatgccacaactgggccacagctaaagctttatttttgaattctcattccaaaaccaaactgtcttgcccagacaagatcacctgttaagacttcttggcgttaagttatgacatgtatacgcgtttgttattattattttttctgctttaaaaggctgaccagggcacctagccctggagctgtcttggcgagctgttctttaacccctgcagcacgcagtcctgctaacacaatttccatagacttggggggctgacccaggctgcagagagcaagcacctgtctgctgcagctgtacaacctggatgctttgcaaggttccggcttgctttcttcctagcagccagagtgcttttccgtaaagcggtggagaatctcaagcatgtgcatttaattgaggaatagcagaagggctaaagcaaccaagaaaagaagtgtgggtatttttgttaagtaaaacagcccaagtgcttctggaggtgggtttctaccaagatagaggaaaagggctgaattccctctaagtgggacagccgagctcaggatgtgcttcccagcttcactggttaatttgacctgaacctatttaaagatcccttctgcccctgaagacctatccgcactcaaattctaacatgaagaaatctactcgaatgcatcctttactttgaatgagctctattcggttgcatgttatatgtgatttccttcctcccaactgtttccactgagcgcacccagtctcccctagtcttcctctgtgggtgtgatttttgtgatttttacaaacaaaacccttgaagttcttggcagatgtgtttgtttctgtttgcatgtactgcagataccccaggacaagcgggggattcatttttcagccattcagttgtttcctcaataatccgcagcaaagtgaaaatattcttagcactcagactgtacttagagtgttttctcagtccagtctgtacagtctgtaggcagaaggcctcagaagaaagtcatggccactcagtgcccactgtgggctttgtaagtcctggctctcccgtcaaggttacccagaggtaaaagcttcctgggagtggggccaggtgtgtttggcactccagatagaaggcaaaatgctcagattcgggcctgtgcacttgtatgcaacctgtcggtcgatacctagcatttatttttccctgacaatgaacgacctttccctcacccaccctaagctcaaagagtttagcaaaattctcttttaaataaacagaatgccagtaagaggttgacccctaccatggaacttctgggatgctaaatacttcctcatgaacaaaataagttccttattataagttccttatactagcagcttcacctaaagaattttctctccagcaatattgacttcactggggaaaagccaagagtgtgtggtgagtgatttgttctcactcgacctggctaggactggctaggagctgttttttgtacatgagggaatttgggctttcctcagttatctgaatgttttacccaagtgccttcctgctattgtagcaaagtagctcagcttccttgtccacagggtgaaaaaggactaatgcattttccatcagttttctaactatgttagcaaaaacggcctcctggtagctcaacctcctgtacgcgtgtgtgtgtgtaatacacacacaaataaacccctctgtttttctaagacatcttagctggatattataggaagcactttcataaacaactgtaacaaatcgcaaaggaaagagaaacaaaagcattagatttgagacataaacaggcaagagaaagtgtattaggaactgacagctatcaaggaagttttgtcagttacaaatgctaggaggaaattttgccaagaaggatggctcatgaaatatttccagtacgggaagaggcaataagatcctctaagagaatgagaaagtaggggtgtctaaatggtaaagatgggtgtgttgcacgtgtgttagaaggatctcagttgagtgaaggtttgcactgctacatctaagttaatgtaaatatgtagcactctgacaggtctaccgtgttgctgaatgtagtatatttccaaagtttgcaagtcttcctgtattgtacaaagatgctgctgcttgataatatgtatagcaatccagattagtatgttattaaattttattttcttacctgtatttttatgctttttacctgtcctcaaaatattacacccctgttggaattagatttatatttataaatggtcagaaatctttttaagtgtctctttttacacataggttgatttttttttcttaagagaaatgatgtattcttgaaacatttgttactcattccaggaaacaaaaacccatataataaaacccccactcagagcctgttagtcacctctctagaagatggcatctcaggagaaggaatggctttgtggaagaaggaatcacctttttcttgctcaagaattatgctgacttcagccctgagcctggatctggtcactgagaatcatcaagtgtctagatcctccccccaaaataactaatttagtaggtgattttgattttaaaaaattgacaccaaaaccctgcctgcattgtaatggaattcgaaaagaattcatgttcacagaactcaacgttcaggctaatatttacagaagggaccaaatctaaatcctggtagataactcctgtatgctttatccaaaggacacccacagttttccagcatagatataaccaaggatgaattgattccttcaaagaactgggaggcacggatattgcattttttgtttacatccagtagccaagacgcctcagtgagccagtcttgggcagaggctgtcacatttaggcagattggaagttggtatgttctaattctcactctggactacagtgaggctgaatttatcatgtcaaaaaaaaaaaaaaaaaaagacctttccaagtgctttctattgctcagaattgaaagaatgttttcatttcaagtttacaagaggcatggatggagttgtgacgttcttgacaagctgggctaacctttcccgaacttgtttcccggaggcaaggtgctcggtgacccagcgcatcttaaccttgggtctcctaggctcgaggctagggcattacgtttcgtggaaccaaagcagccaattgcatagcaagtattttcctgcattccaattaaatgcttaagaaaaagcagcatcctataaaattgtgatcataaacatccatttccctcagcttttgtgagtgccttgacttacagccaacatcactgtttaactcagtctgtttaaaaacaaacttttctggtggttgataacagagagttgctccctgagccatcagggtcctgggagctggaagtgaaagggttattaacattctacctttatgcagctgttggctgaccagaataaactccctgctgagttcaagctttgaatggaatggatgcaaatgatgttgtttccattagagcaggtgctcacagcattctgattggcctgagcagaccgaggctatggctgttgggacaagcttagcatcctggacatcttgtcaaagaacctcactcacccctctggcctctacagccctcagaggagagaaaaccaattctccaacaaacaggtctctccaacatggtggtgctggcaggcttaggtttagaaaatcctgactgttaaaggcgtttgaatacatcacattcctatgcaaatgtttttaatctccagtttaatgtagtttatttttcctatatgtaaagtatttttatacggcttgtatcatgatagtttagcaataaaacagttggaagcaacatcta

SEQ ID NO: 13819 - DNA, 7437 bp, Homo sapiens
  source 1..7437: mol_type = unassigned DNA
agcaggaagctcgcgccgccgtcgccgccgccgctcagcttccccgggcgcgtccaggacccgctgcgccaggcgcgccgtccccggacccggcgtgcgtccctacgaggaaagggaccccgccgctcgagccgcctccgccagccccactgcgaggggtcccagagccagccgcgcccgccctcgcccccggccccgcagccttcccgccctgcgcgccatgaacgcccccgagcggcagccccaacccgacggcggggacgccccaggccacgagcctgggggcagcccccaagacgagcttgacttctccatcctcttcgactatgagtatttgaatccgaacgaagaagagccgaatgcacataaggtcgccagcccaccctccggacccgcataccccgatgatgtcctggactatggcctcaagccatacagcccccttgctagtctctctggcgagccccccggccgattcggagagccggatagggtagggccgcagaagtttctgagcgcggccaagccagcaggggcctcgggcctgagccctcggatcgagatcactccgtcccacgaactgatccaggcagtggggcccctccgcatgagagacgcgggcctcctggtggagcagccgcccctggccggggtggccgccagcccgaggttcaccctgcccgtgcccggcttcgagggctaccgcgagccgctttgcttgagccccgctagcagcggctcctctgccagcttcatttctgacaccttctccccctacacctcgccctgcgtctcgcccaataacggcgggcccgacgacctgtgtccgcagtttcaaaacatccctgctcattattcccccagaacctcgccaataatgtcacctcgaaccagcctcgccgaggacagctgcctgggccgccactcgcccgtgccccgtccggcctcccgctcctcatcgcctggtgccaagcggaggcattcgtgcgccgaggccttggttgccctgccgcccggagcctcaccccagcgctcccggagcccctcgccgcagccctcatctcacgtggcaccccaggaccacggctccccggctgggtacccccctgtggctggctctgccgtgatcatggatgccctgaacagcctcgccacggactcgccttgtgggatcccccccaagatgtggaagaccagccctgacccctcgccggtgtctgccgccccatccaaggccggcctgcctcgccacatctacccggccgtggagttcctggggccctgcgagcagggcgagaggagaaactcggctccagaatccatcctgctggttccgcccacttggcccaagccgctggtgcctgccattcccatctgcagcatcccagtgactgcatccctccctccacttgagtggccgctgtccagtcagtcaggctcttacgagctgcggatcgaggtgcagcccaagccacatcaccgggcccactatgagacagaaggcagccgaggggctgtcaaagctccaactggaggccaccctgtggttcagctccatggctacatggaaaacaagcctctgggacttcagatcttcattgggacagctgatgagcggatccttaagccgcacgccttctaccaggtgcaccgaatcacggggaaaactgtcaccaccaccagctatgagaagatagtgggcaacaccaaagtcctggagatacccttggagcccaaaaacaacatgagggcaaccatcgactgtgcggggatcttgaagcttagaaacgccgacattgagctgcggaaaggcgagacggacattggaagaaagaacacgcgggtgagactggttttccgagttcacatcccagagtccagtggcagaatcgtctctttacagactgcatctaaccccatcgagtgctcccagcgatctgctcacgagctgcccatggttgaaagacaagacacagacagctgcctggtctatggcggccagcaaatgatcctcacggggcagaactttacatccgagtccaaagttgtgtttactgagaagaccacagatggacagcaaatttgggagatggaagccacggtggataaggacaagagccagcccaacatgctttttgttgagatccctgaatatcggaacaagcatatccgcacacctgtaaaagtgaacttctacgtcatcaatgggaagagaaaacgaagtcagcctcagcactttacctaccacccagtcccagccatcaagacggagcccacggatgaatatgaccccactctgatctgcagccccacccatggaggcctggggagccagccttactacccccagcacccgatggtggccgagtccccctcctgcctcgtggccaccatggctccctgccagcagttccgcacggggctctcatcccctgacgcccgctaccagcaacagaacccagcggccgtactctaccagcggagcaagagcctgagccccagcctgctgggctatcagcagccggccctcatggccgccccgctgtcccttgcggacgctcaccgctctgtgctggtgcacgccggctcccagggccagagctcagccctgctccacccctctccgaccaaccagcaggcctcgcctgtgatccactactcacccaccaaccagcagctgcgctgcggaagccaccaggagttccagcacatcatgtactgcgagaatttcgcaccaggcaccaccagacctggcccgcccccggtcagtcaaggtcagaggctgagcccgggttcctaccccacagtcattcagcagcagaatgccacgagccaaagagccgccaaaaacggacccccggtcagtgaccaaaaggaagtattacctgcgggggtgaccattaaacaggagcagaacttggaccagacctacttggatgatgttaatgaaattatcaggaaggagttttcaggacctcctgccagaaatcagacgtaaaagaagccattatagcaagacaccttctgtatctgacccctcggagccctccacagcccctcaccttctgtctcctttcatgttcatctcccagcccggagtccacacgcggatcaatgtatgggcactaagcggactctcacttaaggagctcgccacctccctctaaacaccagagagaactcttcttttcggtttatgttttaaatcccagagagcatcctggttgatcttaatggtgttccgtccaaatagtaagcacctgctgaccaaaagcacattctacatgagacaggacactggaactctcctgagaacagagtgactggagcttggggggatggacgggggacagaagatgtgggcactgtgattaaaccccagcccttgcgttcgtttttccaggtcacagatacagctcctgtaccttttgaaggcaaggagttctcagagcaaccaaaggaacgtgacccaagagcccagcttacaggctgaagaaacccaaaaccctcgatagagacagaaactgaactgtcagtccttagagctcgcccagtccatgccacaactgggccacagctaaagctttatttttgaattctcattccaaaaccaaactgtcttgcccagacaagatcacctgttaagacttcttggcgttaagttatgacatgtatacgcgtttgttattattattttttctgctttaaaaggctgaccagggcacctagccctggagctgtcttggcgagctgttctttaacccctgcagcacgcagtcctgctaacacaatttccatagacttggggggctgacccaggctgcagagagcaagcacctgtctgctgcagctgtacaacctggatgctttgcaaggttccggcttgctttcttcctagcagccagagtgcttttccgtaaagcggtggagaatctcaagcatgtgcatttaattgaggaatagcagaagggctaaagcaaccaagaaaagaagtgtgggtatttttgttaagtaaaacagcccaagtgcttctggaggtgggtttctaccaagatagaggaaaagggctgaattccctctaagtgggacagccgagctcaggatgtgcttcccagcttcactggttaatttgacctgaacctatttaaagatcccttctgcccctgaagacctatccgcactcaaattctaacatgaagaaatctactcgaatgcatcctttactttgaatgagctctattcggttgcatgttatatgtgatttccttcctcccaactgtttccactgagcgcacccagtctcccctagtcttcctctgtgggtgtgatttttgtgatttttacaaacaaaacccttgaagttcttggcagatgtgtttgtttctgtttgcatgtactgcagataccccaggacaagcgggggattcatttttcagccattcagttgtttcctcaataatccgcagcaaagtgaaaatattcttagcactcagactgtacttagagtgttttctcagtccagtctgtacagtctgtaggcagaaggcctcagaagaaagtcatggccactcagtgcccactgtgggctttgtaagtcctggctctcccgtcaaggttacccagaggtaaaagcttcctgggagtggggccaggtgtgtttggcactccagatagaaggcaaaatgctcagattcgggcctgtgcacttgtatgcaacctgtcggtcgatacctagcatttatttttccctgacaatgaacgacctttccctcacccaccctaagctcaaagagtttagcaaaattctcttttaaataaacagaatgccagtaagaggttgacccctaccatggaacttctgggatgctaaatacttcctcatgaacaaaataagttccttattataagttccttatactagcagcttcacctaaagaattttctctccagcaatattgacttcactggggaaaagccaagagtgtgtggtgagtgatttgttctcactcgacctggctaggactggctaggagctgttttttgtacatgagggaatttgggctttcctcagttatctgaatgttttacccaagtgccttcctgctattgtagcaaagtagctcagcttccttgtccacagggtgaaaaaggactaatgcattttccatcagttttctaactatgttagcaaaaacggcctcctggtagctcaacctcctgtacgcgtgtgtgtgtgtaatacacacacaaataaacccctctgtttttctaagacatcttagctggatattataggaagcactttcataaacaactgtaacaaatcgcaaaggaaagagaaacaaaagcattagatttgagacataaacaggcaagagaaagtgtattaggaactgacagctatcaaggaagttttgtcagttacaaatgctaggaggaaattttgccaagaaggatggctcatgaaatatttccagtacgggaagaggcaataagatcctctaagagaatgagaaagtaggggtgtctaaatggtaaagatgggtgtgttgcacgtgtgttagaaggatctcagttgagtgaaggtttgcactgctacatctaagttaatgtaaatatgtagcactctgacaggtctaccgtgttgctgaatgtagtatatttccaaagtttgcaagtcttcctgtattgtacaaagatgctgctgcttgataatatgtatagcaatccagattagtatgttattaaattttattttcttacctgtatttttatgctttttacctgtcctcaaaatattacacccctgttggaattagatttatatttataaatggtcagaaatctttttaagtgtctctttttacacataggttgatttttttttcttaagagaaatgatgtattcttgaaacatttgttactcattccaggaaacaaaaacccatataataaaacccccactcagagcctgttagtcacctctctagaagatggcatctcaggagaaggaatggctttgtggaagaaggaatcacctttttcttgctcaagaattatgctgacttcagccctgagcctggatctggtcactgagaatcatcaagtgtctagatcctccccccaaaataactaatttagtaggtgattttgattttaaaaaattgacaccaaaaccctgcctgcattgtaatggaattcgaaaagaattcatgttcacagaactcaacgttcaggctaatatttacagaagggaccaaatctaaatcctggtagataactcctgtatgctttatccaaaggacacccacagttttccagcatagatataaccaaggatgaattgattccttcaaagaactgggaggcacggatattgcattttttgtttacatccagtagccaagacgcctcagtgagccagtcttgggcagaggctgtcacatttaggcagattggaagttggtatgttctaattctcactctggactacagtgaggctgaatttatcatgtcaaaaaaaaaaaaaaaaaaagacctttccaagtgctttctattgctcagaattgaaagaatgttttcatttcaagtttacaagaggcatggatggagttgtgacgttcttgacaagctgggctaacctttcccgaacttgtttcccggaggcaaggtgctcggtgacccagcgcatcttaaccttgggtctcctaggctcgaggctagggcattacgtttcgtggaaccaaagcagccaattgcatagcaagtattttcctgcattccaattaaatgcttaagaaaaagcagcatcctataaaattgtgatcataaacatccatttccctcagcttttgtgagtgccttgacttacagccaacatcactgtttaactcagtctgtttaaaaacaaacttttctggtggttgataacagagagttgctccctgagccatcagggtcctgggagctggaagtgaaagggttattaacattctacctttatgcagctgttggctgaccagaataaactccctgctgagttcaagctttgaatggaatggatgcaaatgatgttgtttccattagagcaggtgctcacagcattctgattggcctgagcagaccgaggctatggctgttgggacaagcttagcatcctggacatcttgtcaaagaacctcactcacccctctggcctctacagccctcagaggagagaaaaccaattctccaacaaacaggtctctccaacatggtggtgctggcaggcttaggtttagaaaatcctgactgttaaaggcgtttgaatacatcacattcctatgcaaatgtttttaatctccagtttaatgtagtttatttttcctatatgtaaagtatttttatacggcttgtatcatgatagtttagcaataaaacagttggaagcaacatcta

SEQ ID NO: 13820 - DNA, 5690 bp, Homo sapiens
  source 1..5690: mol_type = unassigned DNA
tctggagtaagccggatcgcggagccgcgccgactccgccgagccgggagccgggaggcgcgcagctcccgggtcgctccgaggctcctcggccagggcagccccgcgggcacgcggtagagaagacggcgtcccctcggctgctggtcgatacaaacagatccccctttccaaacacgcgccaagtccccgtgccctccagatgcagagagaggctgcgttcagactggggcactgccatcccctccgcatcatggggtctgtggaccaagaagagccgaatgcacataaggtcgccagcccaccctccggacccgcataccccgatgatgtcctggactatggcctcaagccatacagcccccttgctagtctctctggcgagccccccggccgattcggagagccggatagggtagggccgcagaagtttctgagcgcggccaagccagcaggggcctcgggcctgagccctcggatcgagatcactccgtcccacgaactgatccaggcagtggggcccctccgcatgagagacgcgggcctcctggtggagcagccgcccctggccggggtggccgccagcccgaggttcaccctgcccgtgcccggcttcgagggctaccgcgagccgctttgcttgagccccgctagcagcggctcctctgccagcttcatttctgacaccttctccccctacacctcgccctgcgtctcgcccaataacggcgggcccgacgacctgtgtccgcagtttcaaaacatccctgctcattattcccccagaacctcgccaataatgtcacctcgaaccagcctcgccgaggacagctgcctgggccgccactcgcccgtgccccgtccggcctcccgctcctcatcgcctggtgccaagcggaggcattcgtgcgccgaggccttggttgccctgccgcccggagcctcaccccagcgctcccggagcccctcgccgcagccctcatctcacgtggcaccccaggaccacggctccccggctgggtacccccctgtggctggctctgccgtgatcatggatgccctgaacagcctcgccacggactcgccttgtgggatcccccccaagatgtggaagaccagccctgacccctcgccggtgtctgccgccccatccaaggccggcctgcctcgccacatctacccggccgtggagttcctggggccctgcgagcagggcgagaggagaaactcggctccagaatccatcctgctggttccgcccacttggcccaagccgctggtgcctgccattcccatctgcagcatcccagtgactgcatccctccctccacttgagtggccgctgtccagtcagtcaggctcttacgagctgcggatcgaggtgcagcccaagccacatcaccgggcccactatgagacagaaggcagccgaggggctgtcaaagctccaactggaggccaccctgtggttcagctccatggctacatggaaaacaagcctctgggacttcagatcttcattgggacagctgatgagcggatccttaagccgcacgccttctaccaggtgcaccgaatcacggggaaaactgtcaccaccaccagctatgagaagatagtgggcaacaccaaagtcctggagatacccttggagcccaaaaacaacatgagggcaaccatcgactgtgcggggatcttgaagcttagaaacgccgacattgagctgcggaaaggcgagacggacattggaagaaagaacacgcgggtgagactggttttccgagttcacatcccagagtccagtggcagaatcgtctctttacagactgcatctaaccccatcgagtgctcccagcgatctgctcacgagctgcccatggttgaaagacaagacacagacagctgcctggtctatggcggccagcaaatgatcctcacggggcagaactttacatccgagtccaaagttgtgtttactgagaagaccacagatggacagcaaatttgggagatggaagccacggtggataaggacaagagccagcccaacatgctttttgttgagatccctgaatatcggaacaagcatatccgcacacctgtaaaagtgaacttctacgtcatcaatgggaagagaaaacgaagtcagcctcagcactttacctaccacccagtcccagccatcaagacggagcccacggatgaatatgaccccactctgatctgcagccccacccatggaggcctggggagccagccttactacccccagcacccgatggtggccgagtccccctcctgcctcgtggccaccatggctccctgccagcagttccgcacggggctctcatcccctgacgcccgctaccagcaacagaacccagcggccgtactctaccagcggagcaagagcctgagccccagcctgctgggctatcagcagccggccctcatggccgccccgctgtcccttgcggacgctcaccgctctgtgctggtgcacgccggctcccagggccagagctcagccctgctccacccctctccgaccaaccagcaggcctcgcctgtgatccactactcacccaccaaccagcagctgcgctgcggaagccaccaggagttccagcacatcatgtactgcgagaatttcgcaccaggcaccaccagacctggcccgcccccggtcagtcaaggtcagaggctgagcccgggttcctaccccacagtcattcagcagcagaatgccacgagccaaagagccgccaaaaacggacccccggtcagtgaccaaaaggaagtattacctgcgggggtgaccattaaacaggagcagaacttggaccagacctacttggatgatgttaatgaaattatcaggaaggagttttcaggacctcctgccagaaatcagacgtaaaagaagccattatagcaagacaccttctgtatctgacccctcggagccctccacagcccctcaccttctgtctcctttcatgttcatctcccagcccggagtccacacgcggatcaatgtatgggcactaagcggactctcacttaaggagctcgccacctccctctaaacaccagagagaactcttcttttcggtttatgttttaaatcccagagagcatcctggttgatcttaatggtgttccgtccaaatagtaagcacctgctgaccaaaagcacattctacatgagacaggacactggaactctcctgagaacagagtgactggagcttggggggatggacgggggacagaagatgtgggcactgtgattaaaccccagcccttgcgttcgtttttccaggtcacagatacagctcctgtaccttttgaaggcaaggagttctcagagcaaccaaaggaacgtgacccaagagcccagcttacaggctgaagaaacccaaaaccctcgatagagacagaaactgaactgtcagtccttagagctcgcccagtccatgccacaactgggccacagctaaagctttatttttgaattctcattccaaaaccaaactgtcttgcccagacaagatcacctgttaagacttcttggcgttaagttatgacatgtatacgcgtttgttattattattttttctgctttaaaaggctgaccagggcacctagccctggagctgtcttggcgagctgttctttaacccctgcagcacgcagtcctgctaacacaatttccatagacttggggggctgacccaggctgcagagagcaagcacctgtctgctgcagctgtacaacctggatgctttgcaaggttccggcttgctttcttcctagcagccagagtgcttttccgtaaagcggtggagaatctcaagcatgtgcatttaattgaggaatagcagaagggctaaagcaaccaagaaaagaagtgtgggtatttttgttaagtaaaacagcccaagtgcttctggaggtgggtttctaccaagatagaggaaaagggctgaattccctctaagtgggacagccgagctcaggatgtgcttcccagcttcactggttaatttgacctgaacctatttaaagatcccttctgcccctgaagacctatccgcactcaaattctaacatgaagaaatctactcgaatgcatcctttactttgaatgagctctattcggttgcatgttatatgtgatttccttcctcccaactgtttccactgagcgcacccagtctcccctagtcttcctctgtgggtgtgatttttgtgatttttacaaacaaaacccttgaagttcttggcagatgtgtttgtttctgtttgcatgtactgcagataccccaggacaagcgggggattcatttttcagccattcagttgtttcctcaataatccgcagcaaagtgaaaatattcttagcactcagactgtacttagagtgttttctcagtccagtctgtacagtctgtaggcagaaggcctcagaagaaagtcatggccactcagtgcccactgtgggctttgtaagtcctggctctcccgtcaaggttacccagaggtaaaagcttcctgggagtggggccaggtgtgtttggcactccagatagaaggcaaaatgctcagattcgggcctgtgcacttgtatgcaacctgtcggtcgatacctagcatttatttttccctgacaatgaacgacctttccctcacccaccctaagctcaaagagtttagcaaaattctcttttaaataaacagaatgccagtaagaggttgacccctaccatggaacttctgggatgctaaatacttcctcatgaacaaaataagttccttattataagttccttatactagcagcttcacctaaagaattttctctccagcaatattgacttcactggggaaaagccaagagtgtgtggtgagtgatttgttctcactcgacctggctaggactggctaggagctgttttttgtacatgagggaatttgggctttcctcagttatctgaatgttttacccaagtgccttcctgctattgtagcaaagtagctcagcttccttgtccacagggtgaaaaaggactaatgcattttccatcagttttctaactatgttagcaaaaacggcctcctggtagctcaacctcctgtacgcgtgtgtgtgtgtaatacacacacaaataaacccctctgtttttctaagacatcttagctggatattataggaagcactttcataaacaactgtaacaaatcgcaaaggaaagagaaacaaaagcattagatttgagacataaacaggcaagagaaagtgtattaggaactgacagctatcaaggaagttttgtcagttacaaatgctaggaggaaattttgccaagaaggatggctcatgaaatatttccagtacgggaagaggcaataagatcctctaagagaatgagaaagtaggggtgtctaaatggtaaagatgggtgtgttgcacgtgtgttagaaggatctcagttgagtgaaggtttgcactgctacatctaagttaatgtaaatatgtagcactctgacaggtctaccgtgttgctgaatgtagtatatttccaaagtttgcaagtcttcctgtattgtacaaagatgctgctgcttgataatatgtatagcaatccagattagtatgttattaaattttattttcttacctgta

SEQ ID NO: 13821 - DNA, 2740 bp, Homo sapiens
  source 1..2740: mol_type = unassigned DNA
agcaggaagctcgcgccgccgtcgccgccgccgctcagcttccccgggcgcgtccaggacccgctgcgccaggcgcgccgtccccggacccggcgtgcgtccctacgaggaaagggaccccgccgctcgagccgcctccgccagccccactgcgaggggtcccagagccagccgcgcccgccctcgcccccggccccgcagccttcccgccctgcgcgccatgaacgcccccgagcggcagccccaacccgacggcggggacgccccaggccacgagcctgggggcagcccccaagacgagcttgacttctccatcctcttcgactatgagtatttgaatccgaacgaagaacctcgccaataatgtcacctcgaaccagcctcgccgaggacagctgcctgggccgccactcgcccgtgccccgtccggcctcccgctcctcatcgcctggtgccaagcggaggcattcgtgcgccgaggccttggttgccctgccgcccggagcctcaccccagcgctcccggagcccctcgccgcagccctcatctcacgtggcaccccaggaccacggctccccggctgggtacccccctgtggctggctctgccgtgatcatggatgccctgaacagcctcgccacggactcgccttgtgggatcccccccaagatgtggaagaccagccctgacccctcgccggtgtctgccgccccatccaaggccggcctgcctcgccacatctacccggccgtggagttcctggggccctgcgagcagggcgagaggagaaactcggctccagaatccatcctgctggttccgcccacttggcccaagccgctggtgcctgccattcccatctgcagcatcccagtgactgcatccctccctccacttgagtggccgctgtccagtcagtcaggctcttacgagctgcggatcgaggtgcagcccaagccacatcaccgggcccactatgagacagaaggcagccgaggggctgtcaaagctccaactggaggccaccctgtggttcagctccatggctacatggaaaacaagcctctgggacttcagatcttcattgggacagctgatgagcggatccttaagccgcacgccttctaccaggtgcaccgaatcacggggaaaactgtcaccaccaccagctatgagaagatagtgggcaacaccaaagtcctggagatacccttggagcccaaaaacaacatgagggcaaccatcgactgtgcggggatcttgaagcttagaaacgccgacattgagctgcggaaaggcgagacggacattggaagaaagaacacgcgggtgagactggttttccgagttcacatcccagagtccagtggcagaatcgtctctttacagactgcatctaaccccatcgagtgctcccagcgatctgctcacgagctgcccatggttgaaagacaagacacagacagctgcctggtctatggcggccagcaaatgatcctcacggggcagaactttacatccgagtccaaagttgtgtttactgagaagaccacagatggacagcaaatttgggagatggaagccacggtggataaggacaagagccagcccaacatgctttttgttgagatccctgaatatcggaacaagcatatccgcacacctgtaaaagtgaacttctacgtcatcaatgggaagagaaaacgaagtcagcctcagcactttacctaccacccagtcccagccatcaagacggagcccacggatgaatatgaccccactctgatctgcagccccacccatggaggcctggggagccagccttactacccccagcacccgatggtggccgagtccccctcctgcctcgtggccaccatggctccctgccagcagttccgcacggggctctcatcccctgacgcccgctaccagcaacagaacccagcggccgtactctaccagcggagcaagagcctgagccccagcctgctgggctatcagcagccggccctcatggccgccccgctgtcccttgcggacgctcaccgctctgtgctggtgcacgccggctcccagggccagagctcagccctgctccacccctctccgaccaaccagcaggcctcgcctgtgatccactactcacccaccaaccagcagctgcgctgcggaagccaccaggagttccagcacatcatgtactgcgagaatttcgcaccaggcaccaccagacctggcccgcccccggtcagtcaaggtcagaggctgagcccgggttcctaccccacagtcattcagcagcagaatgccacgagccaaagagccgccaaaaacggacccccggtcagtgaccaaaaggaagtattacctgcgggggtgaccattaaacaggagcagaacttggaccagacctacttggatgatgagctgatagacacacaccttagctggatacaaaacatattatgaaacagaatgactgtgatctttgatccgagaaatcaaagttaaagttaatgaaattatcaggaaggagttttcaggacctcctgccagaaatcagacgtaaaagaagccattatagcaagacaccttctgtatctgacccctcggagccctccacagcccctcaccttctgtctcctttcatgttcatctcccagcccggagtccacacgcggatcaatgtatgggcactaagcggactctcacttaaggagctcgccacctccctcta

SEQ ID NO: 13822 - DNA, 2974 bp, Homo sapiens
  source 1..2974: mol_type = unassigned DNA
atgcagagagaggctgcgttcagactggggcactgccatcccctccgcatcatggggtctgtggaccaagaagagccgaatgcacataaggtcgccagcccaccctccggacccgcataccccgatgatgtcctggactatggcctcaagccatacagcccccttgctagtctctctggcgagccccccggccgattcggagagccggatagggtagggccgcagaagtttctgagcgcggccaagccagcaggggcctcgggcctgagccctcggatcgagatcactccgtcccacgaactgatccaggcagtggggcccctccgcatgagagacgcgggcctcctggtggagcagccgcccctggccggggtggccgccagcccgaggttcaccctgcccgtgcccggcttcgagggctaccgcgagccgctttgcttgagccccgctagcagcggctcctctgccagcttcatttctgacaccttctccccctacacctcgccctgcgtctcgcccaataacggcgggcccgacgacctgtgtccgcagtttcaaaacatccctgctcattattcccccagaacctcgccaataatgtcacctcgaaccagcctcgccgaggacagctgcctgggccgccactcgcccgtgccccgtccggcctcccgctcctcatcgcctggtgccaagcggaggcattcgtgcgccgaggccttggttgccctgccgcccggagcctcaccccagcgctcccggagcccctcgccgcagccctcatctcacgtggcaccccaggaccacggctccccggctgggtacccccctgtggctggctctgccgtgatcatggatgccctgaacagcctcgccacggactcgccttgtgggatcccccccaagatgtggaagaccagccctgacccctcgccggtgtctgccgccccatccaaggccggcctgcctcgccacatctacccggccgtggagttcctggggccctgcgagcagggcgagaggagaaactcggctccagaatccatcctgctggttccgcccacttggcccaagccgctggtgcctgccattcccatctgcagcatcccagtgactgcatccctccctccacttgagtggccgctgtccagtcagtcaggctcttacgagctgcggatcgaggtgcagcccaagccacatcaccgggcccactatgagacagaaggcagccgaggggctgtcaaagctccaactggaggccaccctgtggttcagctccatggctacatggaaaacaagcctctgggacttcagatcttcattgggacagctgatgagcggatccttaagccgcacgccttctaccaggtgcaccgaatcacggggaaaactgtcaccaccaccagctatgagaagatagtgggcaacaccaaagtcctggagatacccttggagcccaaaaacaacatgagggcaaccatcgactgtgcggggatcttgaagcttagaaacgccgacattgagctgcggaaaggcgagacggacattggaagaaagaacacgcgggtgagactggttttccgagttcacatcccagagtccagtggcagaatcgtctctttacagactgcatctaaccccatcgagtgctcccagcgatctgctcacgagctgcccatggttgaaagacaagacacagacagctgcctggtctatggcggccagcaaatgatcctcacggggcagaactttacatccgagtccaaagttgtgtttactgagaagaccacagatggacagcaaatttgggagatggaagccacggtggataaggacaagagccagcccaacatgctttttgttgagatccctgaatatcggaacaagcatatccgcacacctgtaaaagtgaacttctacgtcatcaatgggaagagaaaacgaagtcagcctcagcactttacctaccacccagtcccagccatcaagacggagcccacggatgaatatgaccccactctgatctgcagccccacccatggaggcctggggagccagccttactacccccagcacccgatggtggccgagtccccctcctgcctcgtggccaccatggctccctgccagcagttccgcacggggctctcatcccctgacgcccgctaccagcaacagaacccagcggccgtactctaccagcggagcaagagcctgagccccagcctgctgggctatcagcagccggccctcatggccgccccgctgtcccttgcggacgctcaccgctctgtgctggtgcacgccggctcccagggccagagctcagccctgctccacccctctccgaccaaccagcaggcctcgcctgtgatccactactcacccaccaaccagcagctgcgctgcggaagccaccaggagttccagcacatcatgtactgcgagaatttcgcaccaggcaccaccagacctggcccgcccccggtcagtcaaggtcagaggctgagcccgggttcctaccccacagtcattcagcagcagaatgccacgagccaaagagccgccaaaaacggacccccggtcagtgaccaaaaggaagtattacctgcgggggtgaccattaaacaggagcagaacttggaccagacctacttggatgatgagctgatagacacacaccttagctggatacaaaacatattatgaaacagaatgactgtgatctttgatccgagaaatcaaagttaaagttaatgaaattatcaggaaggagttttcaggacctcctgccagaaatcagacgtaaaagaagccattatagcaagacaccttctgtatctgacccctcggagccctccacagcccctcaccttctgtctcctttcatgttcatctcccagcccggagtccacacgcggatcaatgtatgggcactaagcggactctcacttaaggagctcgccacctccctcta

SEQ ID NO: 13823 - DNA, 2662 bp, Homo sapiens
  source 1..2662: mol_type = unassigned DNA
tctggagtaagccggatcgcggagccgcgccgactccgccgagccgggagccgggaggcgcgcagctcccgggtcgctccgaggctcctcggccagggcagccccgcgggcacgcggtagagaagacggcgtcccctcggctgctggtcgatacaaacagatccccctttccaaacacgcgccaagtccccgtgccctccagatgcagagagaggctgcgttcagactggggcactgccatcccctccgcatcatggggtctgtggaccaagaacctcgccaataatgtcacctcgaaccagcctcgccgaggacagctgcctgggccgccactcgcccgtgccccgtccggcctcccgctcctcatcgcctggtgccaagcggaggcattcgtgcgccgaggccttggttgccctgccgcccggagcctcaccccagcgctcccggagcccctcgccgcagccctcatctcacgtggcaccccaggaccacggctccccggctgggtacccccctgtggctggctctgccgtgatcatggatgccctgaacagcctcgccacggactcgccttgtgggatcccccccaagatgtggaagaccagccctgacccctcgccggtgtctgccgccccatccaaggccggcctgcctcgccacatctacccggccgtggagttcctggggccctgcgagcagggcgagaggagaaactcggctccagaatccatcctgctggttccgcccacttggcccaagccgctggtgcctgccattcccatctgcagcatcccagtgactgcatccctccctccacttgagtggccgctgtccagtcagtcaggctcttacgagctgcggatcgaggtgcagcccaagccacatcaccgggcccactatgagacagaaggcagccgaggggctgtcaaagctccaactggaggccaccctgtggttcagctccatggctacatggaaaacaagcctctgggacttcagatcttcattgggacagctgatgagcggatccttaagccgcacgccttctaccaggtgcaccgaatcacggggaaaactgtcaccaccaccagctatgagaagatagtgggcaacaccaaagtcctggagatacccttggagcccaaaaacaacatgagggcaaccatcgactgtgcggggatcttgaagcttagaaacgccgacattgagctgcggaaaggcgagacggacattggaagaaagaacacgcgggtgagactggttttccgagttcacatcccagagtccagtggcagaatcgtctctttacagactgcatctaaccccatcgagtgctcccagcgatctgctcacgagctgcccatggttgaaagacaagacacagacagctgcctggtctatggcggccagcaaatgatcctcacggggcagaactttacatccgagtccaaagttgtgtttactgagaagaccacagatggacagcaaatttgggagatggaagccacggtggataaggacaagagccagcccaacatgctttttgttgagatccctgaatatcggaacaagcatatccgcacacctgtaaaagtgaacttctacgtcatcaatgggaagagaaaacgaagtcagcctcagcactttacctaccacccagtcccagccatcaagacggagcccacggatgaatatgaccccactctgatctgcagccccacccatggaggcctggggagccagccttactacccccagcacccgatggtggccgagtccccctcctgcctcgtggccaccatggctccctgccagcagttccgcacggggctctcatcccctgacgcccgctaccagcaacagaacccagcggccgtactctaccagcggagcaagagcctgagccccagcctgctgggctatcagcagccggccctcatggccgccccgctgtcccttgcggacgctcaccgctctgtgctggtgcacgccggctcccagggccagagctcagccctgctccacccctctccgaccaaccagcaggcctcgcctgtgatccactactcacccaccaaccagcagctgcgctgcggaagccaccaggagttccagcacatcatgtactgcgagaatttcgcaccaggcaccaccagacctggcccgcccccggtcagtcaaggtcagaggctgagcccgggttcctaccccacagtcattcagcagcagaatgccacgagccaaagagccgccaaaaacggacccccggtcagtgaccaaaaggaagtattacctgcgggggtgaccattaaacaggagcagaacttggaccagacctacttggatgatgagctgatagacacacaccttagctggatacaaaacatattatgaaacagaatgactgtgatctttgatccgagaaatcaaagttaaagttaatgaaattatcaggaaggagttttcaggacctcctgccagaaatcagacgtaaaagaagccattatagcaagacaccttctgtatctgacccctcggagccctccacagcccctcaccttctgtctcctttcatgttcatctcccagcccggagtccacacgcggatcaatgtatgggcactaagcggactctcacttaaggagctcgccacctccctcta

SEQ ID NO: 13824 - DNA, 620 bp, Homo sapiens
  source 1..620: mol_type = unassigned DNA
gtgcagttttatgaatttccctgaccactgaggtgatatcactagtaagaaggaaactggggcccagtttagtatctgtagatgcctgaaggaagataacagttgagtagatctttaatgaaattctgattttcctttgactgcagcagaaaccagcttaattttctctttgtagttggccatgatttgaaaccccatcacatacccacagcagcccttttgtccaccctgaacacgctcccctgatcccacaccccacataatgtaatgcactttgcacagagtccctcatctccatgattattaccctagtgttgggttaattctggcacaaatgctaagatgttgcagaattctggcttaaactagagccaaagggttaagttccctcctgggcttggatgatatcggcatgagttggaagcgtaagagagatcaaaggtgatttttttttttcttctcaaaaatgattttgcaaatctttttcagagctgatagacacacaccttagctggatacaaaacatattatgaaacagaatgactgtgatctttgatccgagaaatcaaagttaaagttaatgaaattatcaggaaggagttttcaggacctcctgccag

SEQ ID NO: 13825 - DNA, 1495 bp, Homo sapiens
  source 1..1495: mol_type = unassigned DNA
gttgaatgatgcttgttaaagtgcagagcagaagccaccaaccaagcctcgccagtatctcccaccgagtcacgaatctcccatctaactccctctcacacaacccaggcctctccaagcctgactttcccggaaactccagtccaggtcttccttcctcctccagcccaggccgggacctgggggctcctgccggatccatgggggcggccagctgcgaggatgaggagctggaatttaagctggtgttcggggaggaaaaggaggcccccccgctgggcgcggggggattgggggaagaactggactcagaggatgccccgccatgctgccgtctggccttgggagagccccctccctatggcgctgcacctatcggtattccccgacctccaccccctcggcctggcatgcattcgccaccgccgcgaccagccccctcacctggcacctgggagagccagcccgccaggtcggtgaggctgggaggaccaggagggggtgctgggggtgctgggggtggccgtgttctcgagtgtcccagcatccgcatcacctccatctctcccacgccggagccgccagcagcgctggaggacaaccctgatgcctggggggacggctctcctagagattaccccccaccagaaggctttgggggctacagagaagcagggggccagggtgggggggccttcttcagcccaagccctggcagcagcagcctgtcctcgtggagcttcttctccgatgcctctgacgaggcagccctgtatgcagcctgcgacgaggtggagtctgagctaaatgaggcggcctcccgctttggcctgggctccccgctgccctcgccccgggcctcccctcggccatggacccccgaagatccctggagcctgtatggtccaagccccggaggccgagggccagaggatagctggctactcctcagtgctcctgggcccaccccagcctccccgcggcctgcctctccatgtggcaagcggcgctattccagctcgggaaccccatcttcagcctccccagctctgtcccgccgtggcagcctgggggaagaggggtctgagccacctccaccacccccattgcctctggcccgggacccgggctcccctggtccctttgactatgtgggggccccaccagctgagagcatccctcagaagacacggcggacttccagcgagcaggcagtggctctgcctcggtctgaggagcctgcctcatgcaatgggaagctgcccttgggagcagaggagtctgtggctcctccaggaggttcccggaaggaggtggctggcatggactacctggcagtgccctccccactcgcttggtccaaggcccggattgggggacacagccctatcttcagtgtcttgctctgtcaccaagactggagtgcagtggtgtgatctcactcagcctcaacctcctgggctcaagcaatcctcctgcctcagcaggagtagct

SEQ ID NO: 13826 - DNA, 5700 bp, Homo sapiens
  source 1..5700: mol_type = unassigned DNA
gtaaacgtctgacctggggccgtcgcttaaccgtttagttgctgggatggggcggcgttgggggtgcggccctgaaccggagggatttagagactggagacgcggcctctaagagaggttgaaactgtgtgtgtgtgggagaaaatgataaccaccctcccatctctcctacccgccagcctcgccagtatctcccaccgagtcacgaatctcccatctaactccctctcacacaacccaggcctctccaagcctgactttcccggaaactccagtccaggtcttccttcctcctccagcccaggccgggacctgggggctcctgccggatccatgggggcggccagctgcgaggatgaggagctggaatttaagctggtgttcggggaggaaaaggaggcccccccgctgggcgcggggggattgggggaagaactggactcagaggatgccccgccatgctgccgtctggccttgggagagccccctccctatggcgctgcacctatcggtattccccgacctccaccccctcggcctggcatgcattcgccaccgccgcgaccagccccctcacctggcacctgggagagccagcccgccaggtcggtgaggctgggaggaccaggagggggtgctgggggtgctgggggtggccgtgttctcgagtgtcccagcatccgcatcacctccatctctcccacgccggagccgccagcagcgctggaggacaaccctgatgcctggggggacggctctcctagagattaccccccaccagaaggctttgggggctacagagaagcagggggccagggtgggggggccttcttcagcccaagccctggcagcagcagcctgtcctcgtggagcttcttctccgatgcctctgacgaggcagccctgtatgcagcctgcgacgaggtggagtctgagctaaatgaggcggcctcccgctttggcctgggctccccgctgccctcgccccgggcctcccctcggccatggacccccgaagatccctggagcctgtatggtccaagccccggaggccgagggccagaggatagctggctactcctcagtgctcctgggcccaccccagcctccccgcggcctgcctctccatgtggcaagcggcgctattccagctcgggaaccccatcttcagcctccccagctctgtcccgccgtggcagcctgggggaagaggggtctgagccacctccaccacccccattgcctctggcccgggacccgggctcccctggtccctttgactatgtgggggccccaccagctgagagcatccctcagaagacacggcggacttccagcgagcaggcagtggctctgcctcggtctgaggagcctgcctcatgcaatgggaagctgcccttgggagcagaggagtctgtggctcctccaggaggttcccggaaggaggtggctggcatggactacctggcagtgccctccccactcgcttggtccaaggcccggattgggggacacagccctatcttcaggacctctgccctacccccactggactggcctctgcccagccaatatgagcagctggagctgaggatcgaggtacagcctagagcccaccaccgggcccactatgagacagaaggcagccgtggagctgtcaaagctgcccctggcggtcaccccgtagtcaagctcctaggctacagtgagaagccactgaccctacagatgttcatcggcactgcagatgaaaggaacctgcggcctcatgccttctatcaggtgcaccgtatcacaggcaagatggtggccacggccagctatgaagccgtagtcagtggcaccaaggtgttggagatgactctgctgcctgagaacaacatggcggccaacattgactgcgcgggaatcctgaagcttcggaattcagacattgagcttcggaagggtgagacggacatcgggcgcaaaaacacacgtgtacggctggtgttccgggtacacgtgccccagggcggcgggaaggtcgtctcagtacaggcagcatcggtgcccatcgagtgctcccagcgctcagcccaggagctgccccaggtggaggcctacagccccagtgcctgctctgtgagaggaggcgaggaactggtactgactggctccaacttcctgccagactccaaggtggtgttcattgagaggggtcctgatgggaagctgcaatgggaggaggaggccacagtgaaccgactgcagagcaacgaggtgacgctgaccctgactgtccccgagtacagcaacaagagggtttcccggccagtccaggtctacttttatgtctccaatgggcggaggaaacgcagtcctacccagagtttcaggtttctgcctgtgatctgcaaagaggagcccctaccggactcatctctgcggggtttcccttcagcatcggcaaccccctttggcactgacatggacttctcaccacccaggcccccctacccctcctatccccatgaagaccctgcttgcgaaactccttacctatcagaaggcttcggctatggcatgccccctctgtacccccagacggggcccccaccatcctacagaccgggcctgcggatgttccctgagactaggggtaccacaggttgtgcccaaccacctgcagtttccttccttccccgccccttccctagtgacccgtatggagggcggggctcctctttctccctggggctgccattctctccgccagccccctttcggccgcctcctcttcctgcatccccaccgcttgaaggccccttcccttcccagagtgatgtgcatcccctacctgctgagggatacaataaggtagggccaggctatggccctggggagggggctccggagcaggagaaatccaggggtggctacagcagcggcttccgagacagtgtccctatccagggtatcacgctggaggaaggtgggtgtgggactgggggctgtgagtgtgagtgtgtgcaagagattgctctgcatgtttgctgagggctggagctgggcttttcagagatcgggcatccctggtctctcagggccagttggaggttcccaggaggcatgttcttgatgcctgtggctgcctgaatccaattaactgaattctgaagagtgcatggggtaactgtctcagcctttctcctgtctctgcctctgtcctctgctccaaatcataaaatctcagagctagaagcactttcaagatcattccatccagcgcattcaatttgcaagtttaggcgttgagttccagagagggatggtagcttgctgaggtcccagtcaagcacacttgccattgcctcagctttcccctaaacacggtgtctgtggtcagggttggtgaggaggagctttcctgttttgcctctccttcttcccattggctacacccatctctggccctgctgataccgattcccctgacatttcaggctaagccagcaggaaagggctaggacgggtgcctgggagcccacatggagggagttgggcaagatttgattcggagcaggtgtcaagacgtgttggggaaactgaggcccagtggaatagaagccagtagaggaggaatctagaggcctcctagattaagacctgcctggaatggattgggggtgggtctttggaaaaggaggggacccacctctagcccagtctctcaactgcccctcctttacagtgagtgagatcattggccgagacctgagtggcttccctgcacctcctggagaagagcctcctgcctgaaccacgtgaactgtcatcacctggcaaccccagccccagcctcagccctgccccctttccctccttcctggagtggtggctacagaagcttggggccaaccctggctcctctttccccagcttctgtctgtctcactgtcttccctcccctcccccagctgaggtgtggccctcaggcctggtgctgccttggagggctgggggaaggagtgtgtggaggagggaggagggtgaagactgaggctaggtgccagaatggactggagtgaaggcgtgtctagagtgtgggctggctgttgtgctggaaagctggggacaggttgatggtaataaactgctcaatgaccagtgcttcaggctccagagctctttggagagatgggttggggcagcttactccagccctggcccaaggaggcccagaagttggaaagagatggaatgtggctgggaacattgcatcccaaagagcttctcagtggaggaggctggggaaggcatgagggggctcagaggctccttgactgggaccaggattgggggccagggcttgagtaggcctctccactctcctccttgggggtccagattccttaggagctttgggatgaggcccaggaggctgcatttttccaggtccttagtcttgccaccacacagatgattctgattcatagccaagatgaggacacactgatgtagctgatctctcatttacagaggaggattctaaagttcagagagggaaaggggcttgcctgaggtcacgtagataatcagcagcacattgaacgctgcactcctgggctcctgtccccagcccccattcagacacgctgactcaggaggtccaggcctctaaggcttctctccctggagtgagggtggaggtgagggagagctggcacaagccctccctctggatcctccactcctggggattatgaagatattctggaaagatttgtgcttcagaggtagactgcagaaagcaaacagtctacccagcagctctgaatgtcacctgccctggggcttacagcactatatgagttcctggcctatcctgcaaatatgcccatgctggccttctaaatagctggtacatccatcaccactgacgggcctggcctggaaacctggtttgtcccctgtcttgatggcctacgagaggccaagttccactgggctgggaaaagtcactttgtctgtcttgttcacctggagcctgacacaccgtaggtactgagtacaaatagcttgatttggctaggcttggctgcagggggacgtgcctaaaagacattccgggcatttgcacttgggaaacttgcctcaccttcaggcttgtggggcctctctatgcccaatgagtccaggcagtcctagcaagtactcaggagagcaggggtgggtgtgacagaggctggctctggattgggggacaacagaaccagagtaactcctcgcctgttgctgctttgcaatgaatttcctttacctttctggaacacaagctgctgtgaaccaaactgatatcaagtgattagctcaccgggccttggttgcttttcaaagatccccttcagccccctgccagagtcactgccccataatcaccatgtcagaagggaccctagggcattcgtgtcctatttatcaatcttcagcaccacctctaagatctctgagagagggtggatcagcctctgtgtaaacaaaaagctgttaggacttgttgcctctcaaggtggactattctgttttctgccaggacactgccattcatgcattgtcagatatttattaaacagcagcaaagtgccagccaatttgtcctggaggaattcatagcctcatggggcaaaagtaaataaacagcttattacaattcaacaa

SEQ ID NO: 13827 - DNA, 2893 bp, Homo sapiens
  source 1..2893: mol_type = unassigned DNA
aaccgtttagttgctgggatggggcggcgttgggggtgcggccctgaaccggagggatttagagactggagacgcggcctctaagagaggttgaaactgtgtgtgtgtgggagaaaatgataaccaccctcccatctctcctacccgccagcctcgccagtatctcccaccgagtcacgaatctcccatctaactccctctcacacaacccaggcctctccaagcctgactttcccggaaactccagtccaggtcttccttcctcctccagcccaggccgggacctgggggctcctgccggatccatgggggcggccagctgcgaggatgaggagctggaatttaagctggtgttcggggaggaaaaggaggcccccccgctgggcgcggggggattgggggaagaactggactcagaggatgccccgccatgctgccgtctggccttgggagagccccctccctatggcgctgcacctatcggtattccccgacctccaccccctcggcctggcatgcattcgccaccgccgcgaccagccccctcacctggcacctgggagagccagcccgccaggtcggtgaggctgggaggaccaggagggggtgctgggggtgctgggggtggccgtgttctcgagtgtcccagcatccgcatcacctccatctctcccacgccggagccgccagcagcgctggaggacaaccctgatgcctggggggacggctctcctagagattaccccccaccagaaggctttgggggctacagagaagcagggggccagggtgggggggccttcttcagcccaagccctggcagcagcagcctgtcctcgtggagcttcttctccgatgcctctgacgaggcagccctgtatgcagcctgcgacgaggtggagtctgagctaaatgaggcggcctcccgctttggcctgggctccccgctgccctcgccccgggcctcccctcggccatggacccccgaagatccctggagcctgtatggtccaagccccggaggccgagggccagaggatagctggctactcctcagtgctcctgggcccaccccagcctccccgcggcctgcctctccatgtggcaagcggcgctattccagctcgggaaccccatcttcagcctccccagctctgtcccgccgtggcagcctgggggaagaggggtctgagccacctccaccacccccattgcctctggcccgggacccgggctcccctggtccctttgactatgtgggggccccaccagctgagagcatccctcagaagacacggcggacttccagcgagcaggcagtggctctgcctcggtctgaggagcctgcctcatgcaatgggaagctgcccttgggagcagaggagtctgtggctcctccaggaggttcccggaaggaggtggctggcatggactacctggcagtgccctccccactcgcttggtccaaggcccggattgggggacacagccctatcttcaggacctctgccctacccccactggactggcctctgcccagccaatatgagcagctggagctgaggatcgaggtacagcctagagcccaccaccgggcccactatgagacagaaggcagccgtggagctgtcaaagctgcccctggcggtcaccccgtagtcaagctcctaggctacagtgagaagccactgaccctacagatgttcatcggcactgcagatgaaaggaacctgcggcctcatgccttctatcaggtgcaccgtatcacaggcaagatggtggccacggccagctatgaagccgtagtcagtggcaccaaggtgttggagatgactctgctgcctgagaacaacatggcggccaacattgactgcgcgggaatcctgaagcttcggaattcagacattgagcttcggaagggtgagacggacatcgggcgcaaaaacacacgtgtacggctggtgttccgggtacacgtgccccagggcggcgggaaggtcgtctcagtacaggcagcatcggtgcccatcgagtgctcccagcgctcagcccaggagctgccccaggtggaggcctacagccccagtgcctgctctgtgagaggaggcgaggaactggtactgactggctccaacttcctgccagactccaaggtggtgttcattgagaggggtcctgatgggaagctgcaatgggaggaggaggccacagtgaaccgactgcagagcaacgaggtgacgctgaccctgactgtccccgagtacagcaacaagagggtttcccggccagtccaggtctacttttatgtctccaatgggcggaggaaacgcagtcctacccagagtttcaggtttctgcctgtgatctgcaaagaggagcccctaccggactcatctctgcggggtttcccttcagcatcggcaaccccctttggcactgacatggacttctcaccacccaggcccccctacccctcctatccccatgaagaccctgcttgcgaaactccttacctatcagaaggcttcggctatggcatgccccctctgtacccccagacggggcccccaccatcctacagaccgggcctgcggatgttccctgagactaggggtaccacagtgagtgagatcattggccgagacctgagtggcttccctgcacctcctggagaagagcctcctgcctgaaccacgtgaactgtcatcacctggcaaccccagccccagcctcagccctgccccctttccctccttcctggagtggtggctacagaagcttggggccaaccctggctcctctttccccagcttctgtctgtctcactgtcttccctcccctcccccagctgaggtgtggccctcaggcctggtgctgccttggagggctgggg

SEQ ID NO: 13828 - DNA, 2131 bp, Homo sapiens
  source 1..2131: mol_type = unassigned DNA
gaagaggaggggaacccacagggtccggaggtttcaggcccctagtaaacctggcaaggatttttagaagagccggagtgggatgctatcgggccgggacctgggggctcctgccggatccatgggggcggccagctgcgaggatgaggagctggaatttaagctggtgttcggggaggaaaaggaggcccccccgctgggcgcggggggattgggggaagaactggactcagaggatgccccgccatgctgccgtctggccttgggagagccccctccctatggcgctgcacctatcggtattccccgacctccaccccctcggcctggcatgcattcgccaccgccgcgaccagccccctcacctggcacctgggagagccagcccgccaggtcggtgaggctgggaggaccaggagggggtgctgggggtgctgggggtggccgtgttctcgagtgtcccagcatccgcatcacctccatctctcccacgccggagccgccagcagcgctggaggacaaccctgatgcctggggggacggctctcctagagattaccccccaccagaaggctttgggggctacagagaagcagggggccagggtgggggggccttcttcagcccaagccctggcagcagcagcctgtcctcgtggagcttcttctccgatgcctctgacgaggcagccctgtatgcagcctgcgacgaggtggagtctgagctaaatgaggcggcctcccgctttggcctgggctccccgctgccctcgccccgggcctcccctcggccatggacccccgaagatccctggagcctgtatggtccaagccccggaggccgagggccagaggatagctggctactcctcagtgctcctgggcccaccccagcctccccgcggcctgcctctccatgtggcaagcggcgctattccagctcgggaaccccatcttcagcctccccagctctgtcccgccgtggcagcctgggggaagaggggtctgagccacctccaccacccccattgcctctggcccgggacccgggctcccctggtccctttgactatgtgggggccccaccagctgagagcatccctcagaagacacggcggacttccagcgagcaggcagtggctctgcctcggtctgaggagcctgcctcatgcaatgggaagctgcccttgggagcagaggagtctgtggctcctccaggaggttcccggaaggaggtggctggcatggactacctggcagtgccctccccactcgcttggtccaaggcccggattgggggacacagccctatcttcaggacctctgccctacccccactggactggcctctgcccagccaatatgagcagctggagctgaggatcgaggtacagcctagagcccaccaccgggcccactatgagacagaaggcagccgtggagctgtcaaagctgcccctggcggtcaccccgtagtcaagctcctaggctacagtgagaagccactgaccctacagatgttcatcggcactgcagatgaaaggaacctgcggcctcatgccttctatcaggtgcaccgtatcacaggcaagatggtggccacggccagctatgaagccgtagtcagtggcaccaaggtgttggagatgactctgctgcctgagaacaacatggcggccaacattgactgcgcgggaatcctgaagcttcggaattcagacattgagcttcggaagggtgagacggacatcgggcgcaaaaacacacgtgtacggctggtgttccgggtacacgtgccccagggcggcgggaaggtcgtctcagtacaggcagcatcggtgcccatcgagtgctgtgagcaaagaggccctgggccatgtctctgtctcttgcaactcttttgtctgtgtgtgtgtgtctgtctgcccattccctctgcagcgtcctgtgccctgtctgtcctgggtagctctatagaggactcagcttctttctattctagtttgcccctgccacagactctgtctctggggtggcccagagtgacactggaccctatctattcctggggtgccctgtgcccttgtttgggaaactccctggtctaccctgtttaaccctctctctgctct

SEQ ID NO: 13829 - DNA, 2830 bp, Homo sapiens
  source 1..2830: mol_type = unassigned DNA
gaagaggaggggaacccacagggtccggaggtttcaggcccctagtaaacctggcaaggatttttagaagagccggagtgggatgctatcgggccgggacctgggggctcctgccggatccatgggggcggccagctgcgaggatgaggagctggaatttaagctggtgttcggggaggaaaaggaggcccccccgctgggcgcggggggattgggggaagaactggactcagaggatgccccgccatgctgccgtctggccttgggagagccccctccctatggcgctgcacctatcggtattccccgacctccaccccctcggcctggcatgcattcgccaccgccgcgaccagccccctcacctggcacctgggagagccagcccgccaggtcggtgaggctgggaggaccaggagggggtgctgggggtgctgggggtggccgtgttctcgagtgtcccagcatccgcatcacctccatctctcccacgccggagccgccagcagcgctggaggacaaccctgatgcctggggggacggctctcctagagattaccccccaccagaaggctttgggggctacagagaagcagggggccagggtgggggggccttcttcagcccaagccctggcagcagcagcctgtcctcgtggagcttcttctccgatgcctctgacgaggcagccctgtatgcagcctgcgacgaggtggagtctgagctaaatgaggcggcctcccgctttggcctgggctccccgctgccctcgccccgggcctcccctcggccatggacccccgaagatccctggagcctgtatggtccaagccccggaggccgagggccagaggatagctggctactcctcagtgctcctgggcccaccccagcctccccgcggcctgcctctccatgtggcaagcggcgctattccagctcgggaaccccatcttcagcctccccagctctgtcccgccgtggcagcctgggggaagaggggtctgagccacctccaccacccccattgcctctggcccgggacccgggctcccctggtccctttgactatgtgggggccccaccagctgagagcatccctcagaagacacggcggacttccagcgagcaggcagtggctctgcctcggtctgaggagcctgcctcatgcaatgggaagctgcccttgggagcagaggagtctgtggctcctccaggaggttcccggaaggaggtggctggcatggactacctggcagtgccctccccactcgcttggtccaaggcccggattgggggacacagccctatcttcaggacctctgccctacccccactggactggcctctgcccagccaatatgagcagctggagctgaggatcgaggtacagcctagagcccaccaccgggcccactatgagacagaaggcagccgtggagctgtcaaagctgcccctggcggtcaccccgtagtcaagctcctaggctacagtgagaagccactgaccctacagatgttcatcggcactgcagatgaaaggaacctgcggcctcatgccttctatcaggtgcaccgtatcacaggcaagatggtggccacggccagctatgaagccgtagtcagtggcaccaaggtgttggagatgactctgctgcctgagaacaacatggcggccaacattgactgcgcgggaatcctgaagcttcggaattcagacattgagcttcggaagggtgagacggacatcgggcgcaaaaacacacgtgtacggctggtgttccgggtacacgtgccccagggcggcgggaaggtcgtctcagtacaggcagcatcggtgcccatcgagtgctcccagcgctcagcccaggagctgccccaggtggaggcctacagccccagtgcctgctctgtgagaggaggcgaggaactggtactgactggctccaacttcctgccagactccaaggtggtgttcattgagaggggtcctgatgggaagctgcaatgggaggaggaggccacagtgaaccgactgcagagcaacgaggtgacgctgaccctgactgtccccgagtacagcaacaagagggtttcccggccagtccaggtctacttttatgtctccaatgggcggaggaaacgcagtcctacccagagtttcaggtttctgcctgtgatctgcaaagaggagcccctaccggactcatctctgcggggtttcccttcagcatcggcaaccccctttggcactgacatggacttctcaccacccaggcccccctacccctcctatccccatgaagaccctgcttgcgaaactccttacctatcagaaggcttcggctatggcatgccccctctgtacccccagacggggcccccaccatcctacagaccgggcctgcggatgttccctgagactaggggtaccacaggttgtgcccaaccacctgcagtttccttccttccccgccccttccctagtgacccgtatggagggcggggctcctctttctccctggggctgccattctctccgccagccccctttcggccgcctcctcttcctgcatccccaccgcttgaaggccccttcccttcccagagtgatgtgcatcccctacctgctgagggatacaataaggtagggccaggctatggccctggggagggggctccggagcaggagaaatccaggggtggctacagcagcggcttccgagacagtgtccctatccagggtatcacgctggaggaagtgagtgagatcattggccgagacctgagtggcttccctgcacctcctggagaagagcctcctgcctga

SEQ ID NO: 13830 - DNA, 2506 bp, Homo sapiens
  source 1..2506: mol_type = unassigned DNA
gaagaggaggggaacccacagggtccggaggtttcaggcccctagtaaacctggcaaggatttttagaagagccggagtgggatgctatcgggccgggacctgggggctcctgccggatccatgggggcggccagctgcgaggatgaggagctggaatttaagctggtgttcggggaggaaaaggaggcccccccgctgggcgcggggggattgggggaagaactggactcagaggatgccccgccatgctgccgtctggccttgggagagccccctccctatggcgctgcacctatcggtattccccgacctccaccccctcggcctggcatgcattcgccaccgccgcgaccagccccctcacctggcacctgggagagccagcccgccaggtcggtgaggctgggaggaccaggagggggtgctgggggtgctgggggtggccgtgttctcgagtgtcccagcatccgcatcacctccatctctcccacgccggagccgccagcagcgctggaggacaaccctgatgcctggggggacggctctcctagagattaccccccaccagaaggctttgggggctacagagaagcagggggccagggtgggggggccttcttcagcccaagccctggcagcagcagcctgtcctcgtggagcttcttctccgatgcctctgacgaggcagccctgtatgcagcctgcgacgaggtggagtctgagctaaatgaggcggcctcccgctttggcctgggctccccgctgccctcgccccgggcctcccctcggccatggacccccgaagatccctggagcctgtatggtccaagccccggaggccgagggccagaggatagctggctactcctcagtgctcctgggcccaccccagcctccccgcggcctgcctctccatgtggcaagcggcgctattccagctcgggaaccccatcttcagcctccccagctctgtcccgccgtggcagcctgggggaagaggggtctgagccacctccaccacccccattgcctctggcccgggacccgggctcccctggtccctttgactatgtgggggccccaccagctgagagcatccctcagaagacacggcggacttccagcgagcaggcagtggctctgcctcggtctgaggagcctgcctcatgcaatgggaagctgcccttgggagcagaggagtctgtggctcctccaggaggttcccggaaggaggtggctggcatggactacctggcagtgccctccccactcgcttggtccaaggcccggattgggggacacagccctatcttcaggacctctgccctacccccactggactggcctctgcccagccaatatgagcagctggagctgaggatcgaggtacagcctagagcccaccaccgggcccactatgagacagaaggcagccgtggagctgtcaaagctgcccctggcggtcaccccgtagtcaagctcctaggctacagtgagaagccactgaccctacagatgttcatcggcactgcagatgaaaggaacctgcggcctcatgccttctatcaggtgcaccgtatcacaggcaagatggtggccacggccagctatgaagccgtagtcagtggcaccaaggtgttggagatgactctgctgcctgagaacaacatggcggccaacattgactgcgcgggaatcctgaagcttcggaattcagacattgagcttcggaagggtgagacggacatcgggcgcaaaaacacacgtgtacggctggtgttccgggtacacgtgccccagggcggcgggaaggtcgtctcagtacaggcagcatcggtgcccatcgagtgctcccagcgctcagcccaggagctgccccaggtggaggcctacagccccagtgcctgctctgtgagaggaggcgaggaactggtactgactggctccaacttcctgccagactccaaggtggtgttcattgagaggggtcctgatgggaagctgcaatgggaggaggaggccacagtgaaccgactgcagagcaacgaggtgacgctgaccctgactgtccccgagtacagcaacaagagggtttcccggccagtccaggtctacttttatgtctccaatgggcggaggaaacgcagtcctacccagagtttcaggtttctgcctgtgatctgcaaagaggagcccctaccggactcatctctgcggggtttcccttcagcatcggcaaccccctttggcactgacatggacttctcaccacccaggcccccctacccctcctatccccatgaagaccctgcttgcgaaactccttacctatcagaaggcttcggctatggcatgccccctctgtacccccagacggggcccccaccatcctacagaccgggcctgcggatgttccctgagactaggggtaccacagtgagtgagatcattggccgagacctgagtggcttccctgcacctcctggagaagagcctcctgcctga

SEQ ID NO: 13831 - DNA, 5488 bp, Homo sapiens
  source 1..5488: mol_type = unassigned DNA
gaagaggaggggaacccacagggtccggaggtttcaggcccctagtaaacctggcaaggatttttagaagagccggagtgggatgctatcgggccgggacctgggggctcctgccggatccatgggggcggccagctgcgaggatgaggagctggaatttaagctggtgttcggggaggaaaaggaggcccccccgctgggcgcggggggattgggggaagaactggactcagaggatgccccgccatgctgccgtctggccttgggagagccccctccctatggcgctgcacctatcggtattccccgacctccaccccctcggcctggcatgcattcgccaccgccgcgaccagccccctcacctggcacctgggagagccagcccgccaggtcggtgaggctgggaggaccaggagggggtgctgggggtgctgggggtggccgtgttctcgagtgtcccagcatccgcatcacctccatctctcccacgccggagccgccagcagcgctggaggacaaccctgatgcctggggggacggctctcctagagattaccccccaccagaaggctttgggggctacagagaagcagggggccagggtgggggggccttcttcagcccaagccctggcagcagcagcctgtcctcgtggagcttcttctccgatgcctctgacgaggcagccctgtatgcagcctgcgacgaggtggagtctgagctaaatgaggcggcctcccgctttggcctgggctccccgctgccctcgccccgggcctcccctcggccatggacccccgaagatccctggagcctgtatggtccaagccccggaggccgagggccagaggatagctggctactcctcagtgctcctgggcccaccccagcctccccgcggcctgcctctccatgtggcaagcggcgctattccagctcgggaaccccatcttcagcctccccagctctgtcccgccgtggcagcctgggggaagaggggtctgagccacctccaccacccccattgcctctggcccgggacccgggctcccctggtccctttgactatgtgggggccccaccagctgagagcatccctcagaagacacggcggacttccagcgagcaggcagtggctctgcctcggtctgaggagcctgcctcatgcaatgggaagctgcccttgggagcagaggagtctgtggctcctccaggaggttcccggaaggaggtggctggcatggactacctggcagtgccctccccactcgcttggtccaaggcccggattgggggacacagccctatcttcaggacctctgccctacccccactggactggcctctgcccagccaatatgagcagctggagctgaggatcgaggtacagcctagagcccaccaccgggcccactatgagacagaaggcagccgtggagctgtcaaagctgcccctggcggtcaccccgtagtcaagctcctaggctacagtgagaagccactgaccctacagatgttcatcggcactgcagatgaaaggaacctgcggcctcatgccttctatcaggtgcaccgtatcacaggcaagatggtggccacggccagctatgaagccgtagtcagtggcaccaaggtgttggagatgactctgctgcctgagaacaacatggcggccaacattgactgcgcgggaatcctgaagcttcggaattcagacattgagcttcggaagggtgagacggacatcgggcgcaaaaacacacgtgtacggctggtgttccgggtacacgtgccccagggcggcgggaaggtcgtctcagtacaggcagcatcggtgcccatcgagtgctcccagcgctcagcccaggagctgccccaggtggaggcctacagccccagtgcctgctctgtgagaggaggcgaggaactggtactgactggctccaacttcctgccagactccaaggtggtgttcattgagaggggtcctgatgggaagctgcaatgggaggaggaggccacagtgaaccgactgcagagcaacgaggtgacgctgaccctgactgtccccgagtacagcaacaagagggtttcccggccagtccaggtctacttttatgtctccaatgggcggaggaaacgcagtcctacccagagtttcaggtttctgcctgtgatctgcaaagaggagcccctaccggactcatctctgcggggtttcccttcagcatcggcaaccccctttggcactgacatggacttctcaccacccaggcccccctacccctcctatccccatgaagaccctgcttgcgaaactccttacctatcagaaggcttcggctatggcatgccccctctgtacccccagacggggcccccaccatcctacagaccgggcctgcggatgttccctgagactaggggtaccacaggttgtgcccaaccacctgcagtttccttccttccccgccccttccctagtgacccgtatggagggcggggctcctctttctccctggggctgccattctctccgccagccccctttcggccgcctcctcttcctgcatccccaccgcttgaaggccccttcccttcccagagtgatgtgcatcccctacctgctgagggatacaataaggtagggccaggctatggccctggggagggggctccggagcaggagaaatccaggggtggctacagcagcggcttccgagacagtgtccctatccagggtatcacgctggaggaaggtgggtgtgggactgggggctgtgagtgtgagtgtgtgcaagagattgctctgcatgtttgctgagggctggagctgggcttttcagagatcgggcatccctggtctctcagggccagttggaggttcccaggaggcatgttcttgatgcctgtggctgcctgaatccaattaactgaattctgaagagtgcatggggtaactgtctcagcctttctcctgtctctgcctctgtcctctgctccaaatcataaaatctcagagctagaagcactttcaagatcattccatccagcgcattcaatttgcaagtttaggcgttgagttccagagagggatggtagcttgctgaggtcccagtcaagcacacttgccattgcctcagctttcccctaaacacggtgtctgtggtcagggttggtgaggaggagctttcctgttttgcctctccttcttcccattggctacacccatctctggccctgctgataccgattcccctgacatttcaggctaagccagcaggaaagggctaggacgggtgcctgggagcccacatggagggagttgggcaagatttgattcggagcaggtgtcaagacgtgttggggaaactgaggcccagtggaatagaagccagtagaggaggaatctagaggcctcctagattaagacctgcctggaatggattgggggtgggtctttggaaaaggaggggacccacctctagcccagtctctcaactgcccctcctttacagtgagtgagatcattggccgagacctgagtggcttccctgcacctcctggagaagagcctcctgcctgaaccacgtgaactgtcatcacctggcaaccccagccccagcctcagccctgccccctttccctccttcctggagtggtggctacagaagcttggggccaaccctggctcctctttccccagcttctgtctgtctcactgtcttccctcccctcccccagctgaggtgtggccctcaggcctggtgctgccttggagggctgggggaaggagtgtgtggaggagggaggagggtgaagactgaggctaggtgccagaatggactggagtgaaggcgtgtctagagtgtgggctggctgttgtgctggaaagctggggacaggttgatggtaataaactgctcaatgaccagtgcttcaggctccagagctctttggagagatgggttggggcagcttactccagccctggcccaaggaggcccagaagttggaaagagatggaatgtggctgggaacattgcatcccaaagagcttctcagtggaggaggctggggaaggcatgagggggctcagaggctccttgactgggaccaggattgggggccagggcttgagtaggcctctccactctcctccttgggggtccagattccttaggagctttgggatgaggcccaggaggctgcatttttccaggtccttagtcttgccaccacacagatgattctgattcatagccaagatgaggacacactgatgtagctgatctctcatttacagaggaggattctaaagttcagagagggaaaggggcttgcctgaggtcacgtagataatcagcagcacattgaacgctgcactcctgggctcctgtccccagcccccattcagacacgctgactcaggaggtccaggcctctaaggcttctctccctggagtgagggtggaggtgagggagagctggcacaagccctccctctggatcctccactcctggggattatgaagatattctggaaagatttgtgcttcagaggtagactgcagaaagcaaacagtctacccagcagctctgaatgtcacctgccctggggcttacagcactatatgagttcctggcctatcctgcaaatatgcccatgctggccttctaaatagctggtacatccatcaccactgacgggcctggcctggaaacctggtttgtcccctgtcttgatggcctacgagaggccaagttccactgggctgggaaaagtcactttgtctgtcttgttcacctggagcctgacacaccgtaggtactgagtacaaatagcttgatttggctaggcttggctgcagggggacgtgcctaaaagacattccgggcatttgcacttgggaaacttgcctcaccttcaggcttgtggggcctctctatgcccaatgagtccaggcagtcctagcaagtactcaggagagcaggggtgggtgtgacagaggctggctctggattgggggacaacagaaccagagtaactcctcgcctgttgctgctttgcaatgaatttcctttacctttctggaacacaagctgctgtgaaccaaactgatatcaagtgattagctcaccgggccttggttgcttttcaaagatccccttcagccccctgccagagtcactgccccataatcaccatgtcagaagggaccctagggcattcgtgtcctatttatcaatcttcagcaccacctctaagatctctgagagagggtggatcagcctctgtgtaaacaaaaagctgttaggacttgttgcctctcaaggtggactattctgttttctgccaggacactgccattcatgcattgtcagatatttattaaacagcagcaaagtgccagccaatttgtcctggaggaattcatagcctcatggggcaaaagtaaataaacagcttattacaattcaacaa

SEQ ID NO: 13832 - DNA, 5686 bp, Homo sapiens
  source 1..5686: mol_type = unassigned DNA
ttccagactacagttctagggaggaggctgccaacttcccgtggaggctaattcacggcccctctgggtggctgggacaagggcagcggcaaagcctggcctggatctacgcccatcaagggctgtgggcctagggacagttctcaaagcctctttggctcggactgctcccagaggcatccaggctggctaagcgttcttcatctttgggggtcctggaggaatggctgatggaggcgctgattcggcagcgcaaagacttccagaaggcccgggcagagtagccccaggccgggacctgggggctcctgccggatccatgggggcggccagctgcgaggatgaggagctggaatttaagctggtgttcggggaggaaaaggaggcccccccgctgggcgcggggggattgggggaagaactggactcagaggatgccccgccatgctgccgtctggccttgggagagccccctccctatggcgctgcacctatcggtattccccgacctccaccccctcggcctggcatgcattcgccaccgccgcgaccagccccctcacctggcacctgggagagccagcccgccaggtcggtgaggctgggaggaccaggagggggtgctgggggtgctgggggtggccgtgttctcgagtgtcccagcatccgcatcacctccatctctcccacgccggagccgccagcagcgctggaggacaaccctgatgcctggggggacggctctcctagagattaccccccaccagaaggctttgggggctacagagaagcagggggccagggtgggggggccttcttcagcccaagccctggcagcagcagcctgtcctcgtggagcttcttctccgatgcctctgacgaggcagccctgtatgcagcctgcgacgaggtggagtctgagctaaatgaggcggcctcccgctttggcctgggctccccgctgccctcgccccgggcctcccctcggccatggacccccgaagatccctggagcctgtatggtccaagccccggaggccgagggccagaggatagctggctactcctcagtgctcctgggcccaccccagcctccccgcggcctgcctctccatgtggcaagcggcgctattccagctcgggaaccccatcttcagcctccccagctctgtcccgccgtggcagcctgggggaagaggggtctgagccacctccaccacccccattgcctctggcccgggacccgggctcccctggtccctttgactatgtgggggccccaccagctgagagcatccctcagaagacacggcggacttccagcgagcaggcagtggctctgcctcggtctgaggagcctgcctcatgcaatgggaagctgcccttgggagcagaggagtctgtggctcctccaggaggttcccggaaggaggtggctggcatggactacctggcagtgccctccccactcgcttggtccaaggcccggattgggggacacagccctatcttcaggacctctgccctacccccactggactggcctctgcccagccaatatgagcagctggagctgaggatcgaggtacagcctagagcccaccaccgggcccactatgagacagaaggcagccgtggagctgtcaaagctgcccctggcggtcaccccgtagtcaagctcctaggctacagtgagaagccactgaccctacagatgttcatcggcactgcagatgaaaggaacctgcggcctcatgccttctatcaggtgcaccgtatcacaggcaagatggtggccacggccagctatgaagccgtagtcagtggcaccaaggtgttggagatgactctgctgcctgagaacaacatggcggccaacattgactgcgcgggaatcctgaagcttcggaattcagacattgagcttcggaagggtgagacggacatcgggcgcaaaaacacacgtgtacggctggtgttccgggtacacgtgccccagggcggcgggaaggtcgtctcagtacaggcagcatcggtgcccatcgagtgctcccagcgctcagcccaggagctgccccaggtggaggcctacagccccagtgcctgctctgtgagaggaggcgaggaactggtactgactggctccaacttcctgccagactccaaggtggtgttcattgagaggggtcctgatgggaagctgcaatgggaggaggaggccacagtgaaccgactgcagagcaacgaggtgacgctgaccctgactgtccccgagtacagcaacaagagggtttcccggccagtccaggtctacttttatgtctccaatgggcggaggaaacgcagtcctacccagagtttcaggtttctgcctgtgatctgcaaagaggagcccctaccggactcatctctgcggggtttcccttcagcatcggcaaccccctttggcactgacatggacttctcaccacccaggcccccctacccctcctatccccatgaagaccctgcttgcgaaactccttacctatcagaaggcttcggctatggcatgccccctctgtacccccagacggggcccccaccatcctacagaccgggcctgcggatgttccctgagactaggggtaccacaggttgtgcccaaccacctgcagtttccttccttccccgccccttccctagtgacccgtatggagggcggggctcctctttctccctggggctgccattctctccgccagccccctttcggccgcctcctcttcctgcatccccaccgcttgaaggccccttcccttcccagagtgatgtgcatcccctacctgctgagggatacaataaggtagggccaggctatggccctggggagggggctccggagcaggagaaatccaggggtggctacagcagcggcttccgagacagtgtccctatccagggtatcacgctggaggaaggtgggtgtgggactgggggctgtgagtgtgagtgtgtgcaagagattgctctgcatgtttgctgagggctggagctgggcttttcagagatcgggcatccctggtctctcagggccagttggaggttcccaggaggcatgttcttgatgcctgtggctgcctgaatccaattaactgaattctgaagagtgcatggggtaactgtctcagcctttctcctgtctctgcctctgtcctctgctccaaatcataaaatctcagagctagaagcactttcaagatcattccatccagcgcattcaatttgcaagtttaggcgttgagttccagagagggatggtagcttgctgaggtcccagtcaagcacacttgccattgcctcagctttcccctaaacacggtgtctgtggtcagggttggtgaggaggagctttcctgttttgcctctccttcttcccattggctacacccatctctggccctgctgataccgattcccctgacatttcaggctaagccagcaggaaagggctaggacgggtgcctgggagcccacatggagggagttgggcaagatttgattcggagcaggtgtcaagacgtgttggggaaactgaggcccagtggaatagaagccagtagaggaggaatctagaggcctcctagattaagacctgcctggaatggattgggggtgggtctttggaaaaggaggggacccacctctagcccagtctctcaactgcccctcctttacagtgagtgagatcattggccgagacctgagtggcttccctgcacctcctggagaagagcctcctgcctgaaccacgtgaactgtcatcacctggcaaccccagccccagcctcagccctgccccctttccctccttcctggagtggtggctacagaagcttggggccaaccctggctcctctttccccagcttctgtctgtctcactgtcttccctcccctcccccagctgaggtgtggccctcaggcctggtgctgccttggagggctgggggaaggagtgtgtggaggagggaggagggtgaagactgaggctaggtgccagaatggactggagtgaaggcgtgtctagagtgtgggctggctgttgtgctggaaagctggggacaggttgatggtaataaactgctcaatgaccagtgcttcaggctccagagctctttggagagatgggttggggcagcttactccagccctggcccaaggaggcccagaagttggaaagagatggaatgtggctgggaacattgcatcccaaagagcttctcagtggaggaggctggggaaggcatgagggggctcagaggctccttgactgggaccaggattgggggccagggcttgagtaggcctctccactctcctccttgggggtccagattccttaggagctttgggatgaggcccaggaggctgcatttttccaggtccttagtcttgccaccacacagatgattctgattcatagccaagatgaggacacactgatgtagctgatctctcatttacagaggaggattctaaagttcagagagggaaaggggcttgcctgaggtcacgtagataatcagcagcacattgaacgctgcactcctgggctcctgtccccagcccccattcagacacgctgactcaggaggtccaggcctctaaggcttctctccctggagtgagggtggaggtgagggagagctggcacaagccctccctctggatcctccactcctggggattatgaagatattctggaaagatttgtgcttcagaggtagactgcagaaagcaaacagtctacccagcagctctgaatgtcacctgccctggggcttacagcactatatgagttcctggcctatcctgcaaatatgcccatgctggccttctaaatagctggtacatccatcaccactgacgggcctggcctggaaacctggtttgtcccctgtcttgatggcctacgagaggccaagttccactgggctgggaaaagtcactttgtctgtcttgttcacctggagcctgacacaccgtaggtactgagtacaaatagcttgatttggctaggcttggctgcagggggacgtgcctaaaagacattccgggcatttgcacttgggaaacttgcctcaccttcaggcttgtggggcctctctatgcccaatgagtccaggcagtcctagcaagtactcaggagagcaggggtgggtgtgacagaggctggctctggattgggggacaacagaaccagagtaactcctcgcctgttgctgctttgcaatgaatttcctttacctttctggaacacaagctgctgtgaaccaaactgatatcaagtgattagctcaccgggccttggttgcttttcaaagatccccttcagccccctgccagagtcactgccccataatcaccatgtcagaagggaccctagggcattcgtgtcctatttatcaatcttcagcaccacctctaagatctctgagagagggtggatcagcctctgtgtaaacaaaaagctgttaggacttgttgcctctcaaggtggactattctgttttctgccaggacactgccattcatgcattgtcagatatttattaaacagcagcaaagtgccagccaatttgtcctggaggaattcatagcctcatggggcaaaagtaaataaacagcttattacaattcaacaa

SEQ ID NO: 13833 - DNA, 2924 bp, Homo sapiens
  source 1..2924: mol_type = unassigned DNA
atctacgcccatcaagggctgtgggcctagggacagttctcaaagcctctttggctcggactgctcccagaggcatccaggctggctaagcgttcttcatctttgggggtcctggaggaatggctgatggaggcgctgattcggcagcgcaaagacttccagaaggcccgggcagagtagccccaggccgggacctgggggctcctgccggatccatgggggcggccagctgcgaggatgaggagctggaatttaagctggtgttcggggaggaaaaggaggcccccccgctgggcgcggggggattgggggaagaactggactcagaggatgccccgccatgctgccgtctggccttgggagagccccctccctatggcgctgcacctatcggtattccccgacctccaccccctcggcctggcatgcattcgccaccgccgcgaccagccccctcacctggcacctgggagagccagcccgccaggtcggtgaggctgggaggaccaggagggggtgctgggggtgctgggggtggccgtgttctcgagtgtcccagcatccgcatcacctccatctctcccacgccggagccgccagcagcgctggaggacaaccctgatgcctggggggacggctctcctagagattaccccccaccagaaggctttgggggctacagagaagcagggggccagggtgggggggccttcttcagcccaagccctggcagcagcagcctgtcctcgtggagcttcttctccgatgcctctgacgaggcagccctgtatgcagcctgcgacgaggtggagtctgagctaaatgaggcggcctcccgctttggcctgggctccccgctgccctcgccccgggcctcccctcggccatggacccccgaagatccctggagcctgtatggtccaagccccggaggccgagggccagaggatagctggctactcctcagtgctcctgggcccaccccagcctccccgcggcctgcctctccatgtggcaagcggcgctattccagctcgggaaccccatcttcagcctccccagctctgtcccgccgtggcagcctgggggaagaggggtctgagccacctccaccacccccattgcctctggcccgggacccgggctcccctggtccctttgactatgtgggggccccaccagctgagagcatccctcagaagacacggcggacttccagcgagcaggcagtggctctgcctcggtctgaggagcctgcctcatgcaatgggaagctgcccttgggagcagaggagtctgtggctcctccaggaggttcccggaaggaggtggctggcatggactacctggcagtgccctccccactcgcttggtccaaggcccggattgggggacacagccctatcttcaggacctctgccctacccccactggactggcctctgcccagccaatatgagcagctggagctgaggatcgaggtacagcctagagcccaccaccgggcccactatgagacagaaggcagccgtggagctgtcaaagctgcccctggcggtcaccccgtagtcaagctcctaggctacagtgagaagccactgaccctacagatgttcatcggcactgcagatgaaaggaacctgcggcctcatgccttctatcaggtgcaccgtatcacaggcaagatggtggccacggccagctatgaagccgtagtcagtggcaccaaggtgttggagatgactctgctgcctgagaacaacatggcggccaacattgactgcgcgggaatcctgaagcttcggaattcagacattgagcttcggaagggtgagacggacatcgggcgcaaaaacacacgtgtacggctggtgttccgggtacacgtgccccagggcggcgggaaggtcgtctcagtacaggcagcatcggtgcccatcgagtgctcccagcgctcagcccaggagctgccccaggtggaggcctacagccccagtgcctgctctgtgagaggaggcgaggaactggtactgactggctccaacttcctgccagactccaaggtggtgttcattgagaggggtcctgatgggaagctgcaatgggaggaggaggccacagtgaaccgactgcagagcaacgaggtgacgctgaccctgactgtccccgagtacagcaacaagagggtttcccggccagtccaggtctacttttatgtctccaatgggcggaggaaacgcagtcctacccagagtttcaggtttctgcctgtgatctgcaaagaggagcccctaccggactcatctctgcggggtttcccttcagcatcggcaaccccctttggcactgacatggacttctcaccacccaggcccccctacccctcctatccccatgaagaccctgcttgcgaaactccttacctatcagaaggcttcggctatggcatgccccctctgtacccccagacggggcccccaccatcctacagaccgggcctgcggatgttccctgagactaggggtaccacaggttgtgcccaaccacctgcagtttccttccttccccgccccttccctagtgacccgtatggagggcggggctcctctttctccctggggctgccattctctccgccagccccctttcggccgcctcctcttcctgcatccccaccgcttgaaggccccttcccttcccagagtgatgtgcatcccctacctgctgagggatacaataaggtagggccaggctatggccctggggagggggctccggagcaggagaaatccaggggtggctacagcagcggcttccgagacagtgtccctatccagggtatcacgctggaggaagtgagtgagatcattggccgagacctgagtggcttccctgcacctcctggagaagagcctcctgcctga

SEQ ID NO: 13834 - DNA, 2566 bp, Homo sapiens
  source 1..2566: mol_type = unassigned DNA
agttctcaaagcctctttggctcggactgctcccagaggcatccaggctggctaagcgttcttcatctttgggggtcctggaggaatggctgatggaggcgctgattcggcagcgcaaagacttccagaaggcccgggcagagtagccccaggccgggacctgggggctcctgccggatccatgggggcggccagctgcgaggatgaggagctggaatttaagctggtgttcggggaggaaaaggaggcccccccgctgggcgcggggggattgggggaagaactggactcagaggatgccccgccatgctgccgtctggccttgggagagccccctccctatggcgctgcacctatcggtattccccgacctccaccccctcggcctggcatgcattcgccaccgccgcgaccagccccctcacctggcacctgggagagccagcccgccaggtcggtgaggctgggaggaccaggagggggtgctgggggtgctgggggtggccgtgttctcgagtgtcccagcatccgcatcacctccatctctcccacgccggagccgccagcagcgctggaggacaaccctgatgcctggggggacggctctcctagagattaccccccaccagaaggctttgggggctacagagaagcagggggccagggtgggggggccttcttcagcccaagccctggcagcagcagcctgtcctcgtggagcttcttctccgatgcctctgacgaggcagccctgtatgcagcctgcgacgaggtggagtctgagctaaatgaggcggcctcccgctttggcctgggctccccgctgccctcgccccgggcctcccctcggccatggacccccgaagatccctggagcctgtatggtccaagccccggaggccgagggccagaggatagctggctactcctcagtgctcctgggcccaccccagcctccccgcggcctgcctctccatgtggcaagcggcgctattccagctcgggaaccccatcttcagcctccccagctctgtcccgccgtggcagcctgggggaagaggggtctgagccacctccaccacccccattgcctctggcccgggacccgggctcccctggtccctttgactatgtgggggccccaccagctgagagcatccctcagaagacacggcggacttccagcgagcaggcagtggctctgcctcggtctgaggagcctgcctcatgcaatgggaagctgcccttgggagcagaggagtctgtggctcctccaggaggttcccggaaggaggtggctggcatggactacctggcagtgccctccccactcgcttggtccaaggcccggattgggggacacagccctatcttcaggacctctgccctacccccactggactggcctctgcccagccaatatgagcagctggagctgaggatcgaggtacagcctagagcccaccaccgggcccactatgagacagaaggcagccgtggagctgtcaaagctgcccctggcggtcaccccgtagtcaagctcctaggctacagtgagaagccactgaccctacagatgttcatcggcactgcagatgaaaggaacctgcggcctcatgccttctatcaggtgcaccgtatcacaggcaagatggtggccacggccagctatgaagccgtagtcagtggcaccaaggtgttggagatgactctgctgcctgagaacaacatggcggccaacattgactgcgcgggaatcctgaagcttcggaattcagacattgagcttcggaagggtgagacggacatcgggcgcaaaaacacacgtgtacggctggtgttccgggtacacgtgccccagggcggcgggaaggtcgtctcagtacaggcagcatcggtgcccatcgagtgctcccagcgctcagcccaggagctgccccaggtggaggcctacagccccagtgcctgctctgtgagaggaggcgaggaactggtactgactggctccaacttcctgccagactccaaggtggtgttcattgagaggggtcctgatgggaagctgcaatgggaggaggaggccacagtgaaccgactgcagagcaacgaggtgacgctgaccctgactgtccccgagtacagcaacaagagggtttcccggccagtccaggtctacttttatgtctccaatgggcggaggaaacgcagtcctacccagagtttcaggtttctgcctgtgatctgcaaagaggagcccctaccggactcatctctgcggggtttcccttcagcatcggcaaccccctttggcactgacatggacttctcaccacccaggcccccctacccctcctatccccatgaagaccctgcttgcgaaactccttacctatcagaaggcttcggctatggcatgccccctctgtacccccagacggggcccccaccatcctacagaccgggcctgcggatgttccctgagactaggggtaccacagtgagtgagatcattggccgagacctgagtggcttccctgcacctcctggagaagagcctcctgcctga

SEQ ID NO: 13835 - DNA, 3057 bp, Homo sapiens
  source 1..3057: mol_type = unassigned DNA
gaagagaggacagagggagggagggtgggggaggacgaggggcgcgtggttttcccatctcatccctggaggaggggctggagcatccccggcagccaatcagggacaggctgggggggggaccgctttgaagaagtttgggggaaaaaagtttggaaaagtttctataataacgagggggcttctggagggaggcggcagcgacggaggagggggcttctcagagaaagggagggagggagccacccgggtgaagatacagcagcctcctgaactcccccctcccacccaggccgggacctgggggctcctgccggatccatgggggcggccagctgcgaggatgaggagctggaatttaagctggtgttcggggaggaaaaggaggcccccccgctgggcgcggggggattgggggaagaactggactcagaggatgccccgccatgctgccgtctggccttgggagagccccctccctatggcgctgcacctatcggtattccccgacctccaccccctcggcctggcatgcattcgccaccgccgcgaccagccccctcacctggcacctgggagagccagcccgccaggtcggtgaggctgggaggaccaggagggggtgctgggggtgctgggggtggccgtgttctcgagtgtcccagcatccgcatcacctccatctctcccacgccggagccgccagcagcgctggaggacaaccctgatgcctggggggacggctctcctagagattaccccccaccagaaggctttgggggctacagagaagcagggggccagggtgggggggccttcttcagcccaagccctggcagcagcagcctgtcctcgtggagcttcttctccgatgcctctgacgaggcagccctgtatgcagcctgcgacgaggtggagtctgagctaaatgaggcggcctcccgctttggcctgggctccccgctgccctcgccccgggcctcccctcggccatggacccccgaagatccctggagcctgtatggtccaagccccggaggccgagggccagaggatagctggctactcctcagtgctcctgggcccaccccagcctccccgcggcctgcctctccatgtggcaagcggcgctattccagctcgggaaccccatcttcagcctccccagctctgtcccgccgtggcagcctgggggaagaggggtctgagccacctccaccacccccattgcctctggcccgggacccgggctcccctggtccctttgactatgtgggggccccaccagctgagagcatccctcagaagacacggcggacttccagcgagcaggcagtggctctgcctcggtctgaggagcctgcctcatgcaatgggaagctgcccttgggagcagaggagtctgtggctcctccaggaggttcccggaaggaggtggctggcatggactacctggcagtgccctccccactcgcttggtccaaggcccggattgggggacacagccctatcttcaggacctctgccctacccccactggactggcctctgcccagccaatatgagcagctggagctgaggatcgaggtacagcctagagcccaccaccgggcccactatgagacagaaggcagccgtggagctgtcaaagctgcccctggcggtcaccccgtagtcaagctcctaggctacagtgagaagccactgaccctacagatgttcatcggcactgcagatgaaaggaacctgcggcctcatgccttctatcaggtgcaccgtatcacaggcaagatggtggccacggccagctatgaagccgtagtcagtggcaccaaggtgttggagatgactctgctgcctgagaacaacatggcggccaacattgactgcgcgggaatcctgaagcttcggaattcagacattgagcttcggaagggtgagacggacatcgggcgcaaaaacacacgtgtacggctggtgttccgggtacacgtgccccagggcggcgggaaggtcgtctcagtacaggcagcatcggtgcccatcgagtgctcccagcgctcagcccaggagctgccccaggtggaggcctacagccccagtgcctgctctgtgagaggaggcgaggaactggtactgactggctccaacttcctgccagactccaaggtggtgttcattgagaggggtcctgatgggaagctgcaatgggaggaggaggccacagtgaaccgactgcagagcaacgaggtgacgctgaccctgactgtccccgagtacagcaacaagagggtttcccggccagtccaggtctacttttatgtctccaatgggcggaggaaacgcagtcctacccagagtttcaggtttctgcctgtgatctgcaaagaggagcccctaccggactcatctctgcggggtttcccttcagcatcggcaaccccctttggcactgacatggacttctcaccacccaggcccccctacccctcctatccccatgaagaccctgcttgcgaaactccttacctatcagaaggcttcggctatggcatgccccctctgtacccccagacggggcccccaccatcctacagaccgggcctgcggatgttccctgagactaggggtaccacagtgagtgagatcattggccgagacctgagtggcttccctgcacctcctggagaagagcctcctgcctgaaccacgtgaactgtcatcacctggcaaccccagccccagcctcagccctgccccctttccctccttcctggagtggtggctacagaagcttggggccaaccctggctcctctttccccagcttctgtctgtctcactgtcttccctcccctcccccagctgaggtgtggccctcaggcctggtgctgccttggagggctgggggaaggagtgtgtggaggagggaggagggtgaagactgaggctaggtgccagaatggactggagtgaaggcgtgtctagagtgtgggctggctgttgtgctggaaagctggggacaggttgatggtaataaactgctcaatgaccagtg

SEQ ID NO: 13836 - DNA, 3377 bp, Homo sapiens
  source 1..3377: mol_type = unassigned DNA
gggaggacgaggggcgcgtggttttcccatctcatccctggaggaggggctggagcatccccggcagccaatcagggacaggctgggggggggaccgctttgaagaagtttgggggaaaaaagtttggaaaagtttctataataacgagggggcttctggagggaggcggcagcgacggaggagggggcttctcagagaaagggagggagggagccacccgggtgaagatacagcagcctcctgaactcccccctcccacccaggccgggacctgggggctcctgccggatccatgggggcggccagctgcgaggatgaggagctggaatttaagctggtgttcggggaggaaaaggaggcccccccgctgggcgcggggggattgggggaagaactggactcagaggatgccccgccatgctgccgtctggccttgggagagccccctccctatggcgctgcacctatcggtattccccgacctccaccccctcggcctggcatgcattcgccaccgccgcgaccagccccctcacctggcacctgggagagccagcccgccaggtcggtgaggctgggaggaccaggagggggtgctgggggtgctgggggtggccgtgttctcgagtgtcccagcatccgcatcacctccatctctcccacgccggagccgccagcagcgctggaggacaaccctgatgcctggggggacggctctcctagagattaccccccaccagaaggctttgggggctacagagaagcagggggccagggtgggggggccttcttcagcccaagccctggcagcagcagcctgtcctcgtggagcttcttctccgatgcctctgacgaggcagccctgtatgcagcctgcgacgaggtggagtctgagctaaatgaggcggcctcccgctttggcctgggctccccgctgccctcgccccgggcctcccctcggccatggacccccgaagatccctggagcctgtatggtccaagccccggaggccgagggccagaggatagctggctactcctcagtgctcctgggcccaccccagcctccccgcggcctgcctctccatgtggcaagcggcgctattccagctcgggaaccccatcttcagcctccccagctctgtcccgccgtggcagcctgggggaagaggggtctgagccacctccaccacccccattgcctctggcccgggacccgggctcccctggtccctttgactatgtgggggccccaccagctgagagcatccctcagaagacacggcggacttccagcgagcaggcagtggctctgcctcggtctgaggagcctgcctcatgcaatgggaagctgcccttgggagcagaggagtctgtggctcctccaggaggttcccggaaggaggtggctggcatggactacctggcagtgccctccccactcgcttggtccaaggcccggattgggggacacagccctatcttcaggtctagggattgagatgggcttgagaatcctctgtatccaagtgaagcctttccaccccaacccctgcgctcagagctgggaagaagggagttttaggcttgttgtcatctttcacacctcaaggggctctgtcccctacttccccttgcttctggacttttggatttcttcatttctttgtcctttttttagtttaaaaaaaattcttttttcccttcttttcacaagtgttaatgtacttctttatttcttctgtgctttcctttctctcagacccataccccctcctccctcacagatccagtacgggcctgactggggtctgaggctgcacatgatcaatgctcttctctcccacccaggacctctgccctacccccactggactggcctctgcccagccaatatgagcagctggagctgaggatcgaggtacagcctagagcccaccaccgggcccactatgagacagaaggcagccgtggagctgtcaaagctgcccctggcggtcaccccgtagtcaagctcctaggctacagtgagaagccactgaccctacagatgttcatcggcactgcagatgaaaggaacctgcggcctcatgccttctatcaggtgcaccgtatcacaggcaagatggtggccacggccagctatgaagccgtagtcagtggcaccaaggtgttggagatgactctgctgcctgagaacaacatggcggccaacattgactgcgcgggaatcctgaagcttcggaattcagacattgagcttcggaagggtgagacggacatcgggcgcaaaaacacacgtgtacggctggtgttccgggtacacgtgccccagggcggcgggaaggtcgtctcagtacaggcagcatcggtgcccatcgagtgctcccagcgctcagcccaggagctgccccaggtggaggcctacagccccagtgcctgctctgtgagaggaggcgaggaactggtactgactggctccaacttcctgccagactccaaggtggtgttcattgagaggggtcctgatgggaagctgcaatgggaggaggaggccacagtgaaccgactgcagagcaacgaggtgacgctgaccctgactgtccccgagtacagcaacaagagggtttcccggccagtccaggtctacttttatgtctccaatgggcggaggaaacgcagtcctacccagagtttcaggtttctgcctgtgatctgcaaagaggagcccctaccggactcatctctgcggggtttcccttcagcatcggcaaccccctttggcactgacatggacttctcaccacccaggcccccctacccctcctatccccatgaagaccctgcttgcgaaactccttacctatcagaaggcttcggctatggcatgccccctctgtacccccagacggggcccccaccatcctacagaccgggcctgcggatgttccctgagactaggggtaccacaggttgtgcccaaccacctgcagtttccttccttccccgccccttccctagtgacccgtatggagggcggggctcctctttctccctggggctgccattctctccgccagccccctttcggccgcctcctcttcctgcatccccaccgcttgaaggccccttcccttcccagagtgatgtgcatcccctacctgctgagggatacaataaggtagggccaggctatggccctggggagggggctccggagcaggagaaatccaggggtggctacagcagcggcttccgagacagtgtccctatccagggtatcacgctggaggaagtgagtgagatcattggccgagacctgagtggcttccctgcacctcctggagaagagcctcctgcctgaaccacgtgaact

SEQ ID NO: 13837 - DNA, 559 bp, Homo sapiens
  source 1..559: mol_type = unassigned DNA
tttcccatctcatccctggaggaggggctggagcatccccggcagccaatcagggacaggctgggggggggaccgctttgaagaagtttgggggaaaaaagccgggacctgggggctcctgccggatccatgggggcggccagctgcgaggatgaggagctggaatttaagctggtgttcggggaggaaaaggaggcccccccgctgggcgcggggggattgggggaagaactggactcagaggatgccccgccatgctgccgtctggccttgggagagccccctccctatggcgctgcacctatcggtattccccgacctccaccccctcggcctggcatgcattcgccaccgccgcgaccagccccctcacctggcacctgggagagccagcccgccaggtcggtgaggctgggaggaccaggagggggtgctgggggtgctgggggtggccgtgttctcgagtgtcccagcatccgcatcacctccatctctcccacgccggagccgccagcagcgctggaggacaaccctgatgcctggggggacggctctccta

SEQ ID NO: 13838 - DNA, 573 bp, Homo sapiens
  source 1..573: mol_type = unassigned DNA
ataataacgagggggcttctggagggaggcggcagcgacggaggagggggcttctcagagaaagggagggagggagccacccgggtgaagatacagcagcctcctgaactcccccctcccacccaggccgggacctgggggctcctgccggatccatgggggcggccagctgcgaggatgaggagctggaatttaagctggtgttcggggaggaaaaggaggcccccccgctgggcgcggggggattgggggaagaactggactcagaggatgccccgccatgctgccgtctggccttgggagagccccctccctatggcgctgcacctatcggtattccccgacctccaccccctcggcctggcatgcattcgccaccgccgcgaccagccccctcacctggcacctgggagagccagcccgccaggacctctgccctacccccactggactggcctctgcccagccaatatgagcagctggagctgaggatcgaggtacagcctagagcccaccaccgggcccactatgagacagaaggcagccgtggagctgtcaaagctgcccctggcg

SEQ ID NO: 13839 - DNA, 1803 bp, Homo sapiens
  source 1..1803: mol_type = unassigned DNA
ataataacgagggggcttctggagggaggcggcagcgacggaggagggggcttctcagagaaagggagggagggagccacccgggtgaagatacagcagcctcctgaactcccccctcccacccaggccgggacctgggggctcctgccggatccatgggggcggccagctgcgaggatgaggagctggaatttaagctggtgttcggggaggaaaaggaggcccccccgctgggcgcggggggattgggggaagaactggactcagaggatgccccgccatgctgccgtctggccttgggagagccccctccctatggcgctgcacctatcggtattccccgacctccaccccctcggcctggcatgcattcgccaccgccgcgaccagccccctcacctggcacctgggagagccagcccgccaggacctctgccctacccccactggactggcctctgcccagccaatatgagcagctggagctgaggatcgaggtacagcctagagcccaccaccgggcccactatgagacagaaggcagccgtggagctgtcaaagctgcccctggcggtcaccccgtagtcaagctcctaggctacagtgagaagccactgaccctacagatgttcatcggcactgcagatgaaaggaacctgcggcctcatgccttctatcaggtgcaccgtatcacaggcaagatggtggccacggccagctatgaagccgtagtcagtggcaccaaggtgttggagatgactctgctgcctgagaacaacatggcggccaacattgactgcgcgggaatcctgaagcttcggaattcagacattgagcttcggaagggtgagacggacatcgggcgcaaaaacacacgtgtacggctggtgttccgggtacacgtgccccagggcggcgggaaggtcgtctcagtacaggcagcatcggtgcccatcgagtgctgtgagcaaagaggccctgggccatgtctctgtctcttgcaactcttttgtctgtgtgtgtgtgtctgtctgcccattccctctgcagcgtcctgtgccctgtctgtcctgggtagctctatagaggactcagcttctttctattctagtttgcccctgccacagactctgtctctggggtggcccagagtgacactggaccctatctattcctggggtgccctgtgcccttgtttgggaaactccctggtctaccctgtttaaccctctctctgctctgggagcggccccttacatggtgtatgtgactccatggatattactggtttatttgtgtgtctactgctgaggagggctccctcagagccctgtggcagttttcccaaagagggtggggacagaggaggccacccctccatgcccagcccagccagtcctcttccttgcactgctctgcagcccagcgctcagcccaggagctgccccaggtggaggcctacagccccagtgcctgctctgtgagaggaggcgaggaactggtactgactggctccaacttcctgccagactccaaggtggtgttcattgagaggggtcctggtgagtacctgctggggaggggagggcaggcagggagagcttgggagtggcaggtgaaacatctctggcattgtcactaaactggccagtggagcctcagtttttttatttgtaaaatgggacagacagactaccctttctattatactgtctgctttccatgtgggatgggtatgacagcaatctaaaatgttgaggatgctgaacaaatggaagcaatgcacattctgtctaataaaga

SEQ ID NO: 13840 - DNA, 4749 bp, Homo sapiens
  source 1..4749: mol_type = unassigned DNA
gcttctggagggaggcggcagcgacggaggagggggcttctcagagaaagggagggagggagccacccgggtgaagatacagcagcctcctgaactcccccctcccacccaggccgggacctgggggctcctgccggatccatgggggcggccagctgcgaggatgaggagctggaatttaagctggtgttcggggaggaaaaggaggcccccccgctgggcgcggggggattgggggaagaactggactcagaggatgccccgccatgctgccgtctggccttgggagagccccctccctatggcgctgcacctatcggtattccccgacctccaccccctcggcctggcatgcattcgccaccgccgcgaccagccccctcacctggcacctgggagagccagcccgccaggtcggtgaggctgggaggaccaggagggggtgctgggggtgctgggggtggccgtgttctcgagtgtcccagcatccgcatcacctccatctctcccacgccggagccgccagcagcgctggaggacaaccctgatgcctggggggacggctctcctagagattaccccccaccagaaggctttgggggctacagagaagcagggggccagggtgggggggccttcttcagcccaagccctggcagcagcagcctgtcctcgtggagcttcttctccgatgcctctgacgaggcagccctgtatgcagcctgcgacgaggtggagtctgagctaaatgaggcggcctcccgctttggcctgggctccccgctgccctcgccccgggcctcccctcggccatggacccccgaagatccctggagcctgtatggtccaagccccggaggccgagggccagaggatagctggctactcctcagtgctcctgggcccaccccagcctccccgcggcctgcctctccatgtggcaagcggcgctattccagctcgggaaccccatcttcagcctccccagctctgtcccgccgtggcagcctgggggaagaggggtctgagccacctccaccacccccattgcctctggcccgggacccgggctcccctggtccctttgactatgtgggggccccaccagctgagagcatccctcagaagacacggcggacttccagcgagcaggcagtggctctgcctcggtctgaggagcctgcctcatgcaatgggaagctgcccttgggagcagaggagtctgtggctcctccaggaggttcccggaaggaggtggctggcatggactacctggcagtgccctccccactcgcttggtccaaggcccggattgggggacacagccctatcttcaggacctctgccctacccccactggactggcctctgcccagccaatatgagcagctggagctgaggatcgaggtacagcctagagcccaccaccgggcccactatgagacagaaggcagccgtggagctgtcaaagctgcccctggcggtcaccccgtagtcaagctcctaggctacagtgagaagccactgaccctacagatgttcatcggcactgcagatgaaaggaacctgcggcctcatgccttctatcaggtgcaccgtatcacaggcaagatggtggccacggccagctatgaagccgtagtcagtggcaccaaggtgttggagatgactctgctgcctgagaacaacatggcggccaacattgactgcgcgggaatcctgaagcttcggaattcagacattgagcttcggaagggtgagacggacatcgggcgcaaaaacacacgtgtacggctggtgttccgggtacacgtgccccagggcggcgggaaggtcgtctcagtacaggcagcatcggtgcccatcgagtgctcccagcgctcagcccaggagctgccccaggtggaggcctacagccccagtgcctgctctgtgagaggaggcgaggaactggtactgactggctccaacttcctgccagactccaaggtggtgttcattgagaggggtcctgatgggaagctgcaatgggaggaggaggccacagtgaaccgactgcagagcaacgaggtgacgctgaccctgactgtccccgagtacagcaacaagagggtttcccggccagtccaggtctacttttatgtctccaatgggcggaggaaacgcagtcctacccagagtttcaggtttctgcctgtgatctgcaaagaggagcccctaccggactcatctctgcggggtttcccttcagcatcggcaaccccctttggcactgacatggacttctcaccacccaggcccccctacccctcctatccccatgaagaccctgcttgcgaaactccttacctatcagaaggcttcggctatggcatgccccctctgtacccccagacggggcccccaccatcctacagaccgggcctgcggatgttccctgagactaggggtaccacaggttgtgcccaaccacctgcagtttccttccttccccgccccttccctagtgacccgtatggagggcggggctcctctttctccctggggctgccattctctccgccagccccctttcggccgcctcctcttcctgcatccccaccgcttgaaggccccttcccttcccagagtgatgtgcatcccctacctgctgagggatacaataaggtagggccaggctatggccctggggagggggctccggagcaggagaaatccaggggtggctacagcagcggcttccgagacagtgtccctatccagggtatcacgctggaggaagtgagtgagatcattggccgagacctgagtggcttccctgcacctcctggagaagagcctcctgcctgaaccacgtgaactgtcatcacctggcaaccccagccccagcctcagccctgccccctttccctccttcctggagtggtggctacagaagcttggggccaaccctggctcctctttccccagcttctgtctgtctcactgtcttccctcccctcccccagctgaggtgtggccctcaggcctggtgctgccttggagggctgggggaaggagtgtgtggaggagggaggagggtgaagactgaggctaggtgccagaatggactggagtgaaggcgtgtctagagtgtgggctggctgttgtgctggaaagctggggacaggttgatggtaataaactgctcaatgaccagtgcttcaggctccagagctctttggagagatgggttggggcagcttactccagccctggcccaaggaggcccagaagttggaaagagatggaatgtggctgggaacattgcatcccaaagagcttctcagtggaggaggctggggaaggcatgagggggctcagaggctccttgactgggaccaggattgggggccagggcttgagtaggcctctccactctcctccttgggggtccagattccttaggagctttgggatgaggcccaggaggctgcatttttccaggtccttagtcttgccaccacacagatgattctgattcatagccaagatgaggacacactgatgtagctgatctctcatttacagaggaggattctaaagttcagagagggaaaggggcttgcctgaggtcacgtagataatcagcagcacattgaacgctgcactcctgggctcctgtccccagcccccattcagacacgctgactcaggaggtccaggcctctaaggcttctctccctggagtgagggtggaggtgagggagagctggcacaagccctccctctggatcctccactcctggggattatgaagatattctggaaagatttgtgcttcagaggtagactgcagaaagcaaacagtctacccagcagctctgaatgtcacctgccctggggcttacagcactatatgagttcctggcctatcctgcaaatatgcccatgctggccttctaaatagctggtacatccatcaccactgacgggcctggcctggaaacctggtttgtcccctgtcttgatggcctacgagaggccaagttccactgggctgggaaaagtcactttgtctgtcttgttcacctggagcctgacacaccgtaggtactgagtacaaatagcttgatttggctaggcttggctgcagggggacgtgcctaaaagacattccgggcatttgcacttgggaaacttgcctcaccttcaggcttgtggggcctctctatgcccaatgagtccaggcagtcctagcaagtactcaggagagcaggggtgggtgtgacagaggctggctctggattgggggacaacagaaccagagtaactcctcgcctgttgctgctttgcaatgaatttcctttacctttctggaacacaagctgctgtgaaccaaactgatatcaagtgattagctcaccgggccttggttgcttttcaaagatccccttcagccccctgccagagtcactgccccataatcaccatgtcagaagggaccctagggcattcgtgtcctatttatcaatcttcagcaccacctctaagatctctgagagagggtggatcagcctctgtgtaaacaaaaagctgttaggacttgttgcctctcaaggtggactattctgttttctgccaggacactgccattcatgcattgtcagatatttattaaacagcagcaaagtgccagccaatttgtcctggaggaattcatagcctcatggggcaaaagtaaataaacagcttattacaattcaacaa

SEQ ID NO: 13841 - DNA, 5367 bp, Homo sapiens
  source 1..5367: mol_type = unassigned DNA
atgggggcggccagctgcgaggatgaggagctggaatttaagctggtgttcggggaggaaaaggaggcccccccgctgggcgcggggggattgggggaagaactggactcagaggatgccccgccatgctgccgtctggccttgggagagccccctccctatggcgctgcacctatcggtattccccgacctccaccccctcggcctggcatgcattcgccaccgccgcgaccagccccctcacctggcacctgggagagccagcccgccaggtcggtgaggctgggaggaccaggagggggtgctgggggtgctgggggtggccgtgttctcgagtgtcccagcatccgcatcacctccatctctcccacgccggagccgccagcagcgctggaggacaaccctgatgcctggggggacggctctcctagagattaccccccaccagaaggctttgggggctacagagaagcagggggccagggtgggggggccttcttcagcccaagccctggcagcagcagcctgtcctcgtggagcttcttctccgatgcctctgacgaggcagccctgtatgcagcctgcgacgaggtggagtctgagctaaatgaggcggcctcccgctttggcctgggctccccgctgccctcgccccgggcctcccctcggccatggacccccgaagatccctggagcctgtatggtccaagccccggaggccgagggccagaggatagctggctactcctcagtgctcctgggcccaccccagcctccccgcggcctgcctctccatgtggcaagcggcgctattccagctcgggaaccccatcttcagcctccccagctctgtcccgccgtggcagcctgggggaagaggggtctgagccacctccaccacccccattgcctctggcccgggacccgggctcccctggtccctttgactatgtgggggccccaccagctgagagcatccctcagaagacacggcggacttccagcgagcaggcagtggctctgcctcggtctgaggagcctgcctcatgcaatgggaagctgcccttgggagcagaggagtctgtggctcctccaggaggttcccggaaggaggtggctggcatggactacctggcagtgccctccccactcgcttggtccaaggcccggattgggggacacagccctatcttcaggacctctgccctacccccactggactggcctctgcccagccaatatgagcagctggagctgaggatcgaggtacagcctagagcccaccaccgggcccactatgagacagaaggcagccgtggagctgtcaaagctgcccctggcggtcaccccgtagtcaagctcctaggctacagtgagaagccactgaccctacagatgttcatcggcactgcagatgaaaggaacctgcggcctcatgccttctatcaggtgcaccgtatcacaggcaagatggtggccacggccagctatgaagccgtagtcagtggcaccaaggtgttggagatgactctgctgcctgagaacaacatggcggccaacattgactgcgcgggaatcctgaagcttcggaattcagacattgagcttcggaagggtgagacggacatcgggcgcaaaaacacacgtgtacggctggtgttccgggtacacgtgccccagggcggcgggaaggtcgtctcagtacaggcagcatcggtgcccatcgagtgctcccagcgctcagcccaggagctgccccaggtggaggcctacagccccagtgcctgctctgtgagaggaggcgaggaactggtactgactggctccaacttcctgccagactccaaggtggtgttcattgagaggggtcctgatgggaagctgcaatgggaggaggaggccacagtgaaccgactgcagagcaacgaggtgacgctgaccctgactgtccccgagtacagcaacaagagggtttcccggccagtccaggtctacttttatgtctccaatgggcggaggaaacgcagtcctacccagagtttcaggtttctgcctgtgatctgcaaagaggagcccctaccggactcatctctgcggggtttcccttcagcatcggcaaccccctttggcactgacatggacttctcaccacccaggcccccctacccctcctatccccatgaagaccctgcttgcgaaactccttacctatcagaaggcttcggctatggcatgccccctctgtacccccagacggggcccccaccatcctacagaccgggcctgcggatgttccctgagactaggggtaccacaggttgtgcccaaccacctgcagtttccttccttccccgccccttccctagtgacccgtatggagggcggggctcctctttctccctggggctgccattctctccgccagccccctttcggccgcctcctcttcctgcatccccaccgcttgaaggccccttcccttcccagagtgatgtgcatcccctacctgctgagggatacaataaggtagggccaggctatggccctggggagggggctccggagcaggagaaatccaggggtggctacagcagcggcttccgagacagtgtccctatccagggtatcacgctggaggaaggtgggtgtgggactgggggctgtgagtgtgagtgtgtgcaagagattgctctgcatgtttgctgagggctggagctgggcttttcagagatcgggcatccctggtctctcagggccagttggaggttcccaggaggcatgttcttgatgcctgtggctgcctgaatccaattaactgaattctgaagagtgcatggggtaactgtctcagcctttctcctgtctctgcctctgtcctctgctccaaatcataaaatctcagagctagaagcactttcaagatcattccatccagcgcattcaatttgcaagtttaggcgttgagttccagagagggatggtagcttgctgaggtcccagtcaagcacacttgccattgcctcagctttcccctaaacacggtgtctgtggtcagggttggtgaggaggagctttcctgttttgcctctccttcttcccattggctacacccatctctggccctgctgataccgattcccctgacatttcaggctaagccagcaggaaagggctaggacgggtgcctgggagcccacatggagggagttgggcaagatttgattcggagcaggtgtcaagacgtgttggggaaactgaggcccagtggaatagaagccagtagaggaggaatctagaggcctcctagattaagacctgcctggaatggattgggggtgggtctttggaaaaggaggggacccacctctagcccagtctctcaactgcccctcctttacagtgagtgagatcattggccgagacctgagtggcttccctgcacctcctggagaagagcctcctgcctgaaccacgtgaactgtcatcacctggcaaccccagccccagcctcagccctgccccctttccctccttcctggagtggtggctacagaagcttggggccaaccctggctcctctttccccagcttctgtctgtctcactgtcttccctcccctcccccagctgaggtgtggccctcaggcctggtgctgccttggagggctgggggaaggagtgtgtggaggagggaggagggtgaagactgaggctaggtgccagaatggactggagtgaaggcgtgtctagagtgtgggctggctgttgtgctggaaagctggggacaggttgatggtaataaactgctcaatgaccagtgcttcaggctccagagctctttggagagatgggttggggcagcttactccagccctggcccaaggaggcccagaagttggaaagagatggaatgtggctgggaacattgcatcccaaagagcttctcagtggaggaggctggggaaggcatgagggggctcagaggctccttgactgggaccaggattgggggccagggcttgagtaggcctctccactctcctccttgggggtccagattccttaggagctttgggatgaggcccaggaggctgcatttttccaggtccttagtcttgccaccacacagatgattctgattcatagccaagatgaggacacactgatgtagctgatctctcatttacagaggaggattctaaagttcagagagggaaaggggcttgcctgaggtcacgtagataatcagcagcacattgaacgctgcactcctgggctcctgtccccagcccccattcagacacgctgactcaggaggtccaggcctctaaggcttctctccctggagtgagggtggaggtgagggagagctggcacaagccctccctctggatcctccactcctggggattatgaagatattctggaaagatttgtgcttcagaggtagactgcagaaagcaaacagtctacccagcagctctgaatgtcacctgccctggggcttacagcactatatgagttcctggcctatcctgcaaatatgcccatgctggccttctaaatagctggtacatccatcaccactgacgggcctggcctggaaacctggtttgtcccctgtcttgatggcctacgagaggccaagttccactgggctgggaaaagtcactttgtctgtcttgttcacctggagcctgacacaccgtaggtactgagtacaaatagcttgatttggctaggcttggctgcagggggacgtgcctaaaagacattccgggcatttgcacttgggaaacttgcctcaccttcaggcttgtggggcctctctatgcccaatgagtccaggcagtcctagcaagtactcaggagagcaggggtgggtgtgacagaggctggctctggattgggggacaacagaaccagagtaactcctcgcctgttgctgctttgcaatgaatttcctttacctttctggaacacaagctgctgtgaaccaaactgatatcaagtgattagctcaccgggccttggttgcttttcaaagatccccttcagccccctgccagagtcactgccccataatcaccatgtcagaagggaccctagggcattcgtgtcctatttatcaatcttcagcaccacctctaagatctctgagagagggtggatcagcctctgtgtaaacaaaaagctgttaggacttgttgcctctcaaggtggactattctgttttctgccaggacactgccattcatgcattgtcagatatttattaaacagcagcaaagtgccagccaatttgtcctggaggaattcatagcctcatggggcaaaagtaaataaacagcttattacaattcaacaa

SEQ ID NO: 13842 - DNA, 904 bp, Homo sapiens
  source 1..904: mol_type = unassigned DNA
cctccgcccctagatggcgaggagagagggaggagccacctcccctcgtcaccacagccctgacgcccccctcccctctggccacggttgcgatggcaactggggctcctgccagcgccgtttgggggtttgggaaccgctgctaattgggttcatgtgtgagtcgcccccagtccagcccagtgcctcaagaaacacgcctccaggcccagccccagctccagcccctctggacccacctctctcaccttaagacccactggatcgggtaccctcggtcctaggatccaggggccagtgggcaaaggcctggcatgcctgcttcaatctcctccatcttcccagaactggactcagaggatgccccgccatgctgccgtctggccttgggagagccccctccctatggcgctgcacctatcggtattccccgacctccaccccctcggcctggcatgcattcgccaccgccgcgaccagccccctcacctggcacctgggagagccagcccgccaggtcggtgaggctgggaggaccaggagggggtgctgggggtgctgggggtggccgtgttctcgagtgtcccagcatccgcatcacctccatctctcccacgccggagccgccagcagcgctggaggacaaccctgatgcctggggggacggctctcctagagattaccccccaccagaaggctttgggggctacagagaagcagggggccagggtgggggggccttcttcagcccaagccctggcagcagcagcctgtcctcgtggagcttcttctccgatgcctctgacgaggcagccctgtatgcagcctgcgacgaggtggagtctgagctaaatgaggcggcctcccgctttggcctgggctccccgctgccctcgccccgggc

SEQ ID NO: 13843 - DNA, 2707 bp, Homo sapiens
  source 1..2707: mol_type = unassigned DNA
acggttgcgatggcaactggggctcctgccagcgccgtttgggggtttgggaaccgctgctaattgggttcatgtaactggactcagaggatgccccgccatgctgccgtctggccttgggagagccccctccctatggcgctgcacctatcggtattccccgacctccaccccctcggcctggcatgcattcgccaccgccgcgaccagccccctcacctggcacctgggagagccagcccgccaggtcggtgaggctgggaggaccaggagggggtgctgggggtgctgggggtggccgtgttctcgagtgtcccagcatccgcatcacctccatctctcccacgccggagccgccagcagcgctggaggacaaccctgatgcctggggggacggctctcctagagattaccccccaccagaaggctttgggggctacagagaagcagggggccagggtgggggggccttcttcagcccaagccctggcagcagcagcctgtcctcgtggagcttcttctccgatgcctctgacgaggcagccctgtatgcagcctgcgacgaggtggagtctgagctaaatgaggcggcctcccgctttggcctgggctccccgctgccctcgccccgggcctcccctcggccatggacccccgaagatccctggagcctgtatggtccaagccccggaggccgagggccagaggatagctggctactcctcagtgctcctgggcccaccccagcctccccgcggcctgcctctccatgtggcaagcggcgctattccagctcgggaaccccatcttcagcctccccagctctgtcccgccgtggcagcctgggggaagaggggtctgagccacctccaccacccccattgcctctggcccgggacccgggctcccctggtccctttgactatgtgggggccccaccagctgagagcatccctcagaagacacggcggacttccagcgagcaggcagtggctctgcctcggtctgaggagcctgcctcatgcaatgggaagctgcccttgggagcagaggagtctgtggctcctccaggaggttcccggaaggaggtggctggcatggactacctggcagtgccctccccactcgcttggtccaaggcccggattgggggacacagccctatcttcaggacctctgccctacccccactggactggcctctgcccagccaatatgagcagctggagctgaggatcgaggtacagcctagagcccaccaccgggcccactatgagacagaaggcagccgtggagctgtcaaagctgcccctggcggtcaccccgtagtcaagctcctaggctacagtgagaagccactgaccctacagatgttcatcggcactgcagatgaaaggaacctgcggcctcatgccttctatcaggtgcaccgtatcacaggcaagatggtggccacggccagctatgaagccgtagtcagtggcaccaaggtgttggagatgactctgctgcctgagaacaacatggcggccaacattgactgcgcgggaatcctgaagcttcggaattcagacattgagcttcggaagggtgagacggacatcgggcgcaaaaacacacgtgtacggctggtgttccgggtacacgtgccccagggcggcgggaaggtcgtctcagtacaggcagcatcggtgcccatcgagtgctcccagcgctcagcccaggagctgccccaggtggaggcctacagccccagtgcctgctctgtgagaggaggcgaggaactggtactgactggctccaacttcctgccagactccaaggtggtgttcattgagaggggtcctgatgggaagctgcaatgggaggaggaggccacagtgaaccgactgcagagcaacgaggtgacgctgaccctgactgtccccgagtacagcaacaagagggtttcccggccagtccaggtctacttttatgtctccaatgggcggaggaaacgcagtcctacccagagtttcaggtttctgcctgtgatctgcaaagaggagcccctaccggactcatctctgcggggtttcccttcagcatcggcaaccccctttggcactgacatggacttctcaccacccaggcccccctacccctcctatccccatgaagaccctgcttgcgaaactccttacctatcagaaggcttcggctatggcatgccccctctgtacccccagacggggcccccaccatcctacagaccgggcctgcggatgttccctgagactaggggtaccacaggttgtgcccaaccacctgcagtttccttccttccccgccccttccctagtgacccgtatggagggcggggctcctctttctccctggggctgccattctctccgccagccccctttcggccgcctcctcttcctgcatccccaccgcttgaaggccccttcccttcccagagtgatgtgcatcccctacctgctgagggatacaataaggtagggccaggctatggccctggggagggggctccggagcaggagaaatccaggggtggctacagcagcggcttccgagacagtgtccctatccagggtatcacgctggaggaagtgagtgagatcattggccgagacctgagtggcttccctgcacctcctggagaagagcctcctgcctgaaccacgtgaactgtcatcacctg

SEQ ID NO: 13844 - DNA, 2955 bp, Homo sapiens
  source 1..2955: mol_type = unassigned DNA
atgtgtgagtcgcccccagtccagcccagtgcctcaagaaacacgcctccaggcccagccccagctccagcccctctggacccacctctctcaccttaagacccactggatcgggtaccctcggtcctaggatccaggggccagtgggcaaaggcctggcatgcctgcttcaatctcctccatcttcccaggtccaactctgcttttgtcttgtggctcagaaggtctctttgctgaggggcagggagcatagaaggacttgcggcctggccactcaaggaacatagccatctcacctgcttctctctttccccctctccctctgctcctcttcccattttgacagaactggactcagaggatgccccgccatgctgccgtctggccttgggagagccccctccctatggcgctgcacctatcggtattccccgacctccaccccctcggcctggcatgcattcgccaccgccgcgaccagccccctcacctggcacctgggagagccagcccgccaggtcggtgaggctgggaggaccaggagggggtgctgggggtgctgggggtggccgtgttctcgagtgtcccagcatccgcatcacctccatctctcccacgccggagccgccagcagcgctggaggacaaccctgatgcctggggggacggctctcctagagattaccccccaccagaaggctttgggggctacagagaagcagggggccagggtgggggggccttcttcagcccaagccctggcagcagcagcctgtcctcgtggagcttcttctccgatgcctctgacgaggcagccctgtatgcagcctgcgacgaggtggagtctgagctaaatgaggcggcctcccgctttggcctgggctccccgctgccctcgccccgggcctcccctcggccatggacccccgaagatccctggagcctgtatggtccaagccccggaggccgagggccagaggatagctggctactcctcagtgctcctgggcccaccccagcctccccgcggcctgcctctccatgtggcaagcggcgctattccagctcgggaaccccatcttcagcctccccagctctgtcccgccgtggcagcctgggggaagaggggtctgagccacctccaccacccccattgcctctggcccgggacccgggctcccctggtccctttgactatgtgggggccccaccagctgagagcatccctcagaagacacggcggacttccagcgagcaggcagtggctctgcctcggtctgaggagcctgcctcatgcaatgggaagctgcccttgggagcagaggagtctgtggctcctccaggaggttcccggaaggaggtggctggcatggactacctggcagtgccctccccactcgcttggtccaaggcccggattgggggacacagccctatcttcaggacctctgccctacccccactggactggcctctgcccagccaatatgagcagctggagctgaggatcgaggtacagcctagagcccaccaccgggcccactatgagacagaaggcagccgtggagctgtcaaagctgcccctggcggtcaccccgtagtcaagctcctaggctacagtgagaagccactgaccctacagatgttcatcggcactgcagatgaaaggaacctgcggcctcatgccttctatcaggtgcaccgtatcacaggcaagatggtggccacggccagctatgaagccgtagtcagtggcaccaaggtgttggagatgactctgctgcctgagaacaacatggcggccaacattgactgcgcgggaatcctgaagcttcggaattcagacattgagcttcggaagggtgagacggacatcgggcgcaaaaacacacgtgtacggctggtgttccgggtacacgtgccccagggcggcgggaaggtcgtctcagtacaggcagcatcggtgcccatcgagtgctcccagcgctcagcccaggagctgccccaggtggaggcctacagccccagtgcctgctctgtgagaggaggcgaggaactggtactgactggctccaacttcctgccagactccaaggtggtgttcattgagaggggtcctgatgggaagctgcaatgggaggaggaggccacagtgaaccgactgcagagcaacgaggtgacgctgaccctgactgtccccgagtacagcaacaagagggtttcccggccagtccaggtctacttttatgtctccaatgggcggaggaaacgcagtcctacccagagtttcaggtttctgcctgtgatctgcaaagaggagcccctaccggactcatctctgcggggtttcccttcagcatcggcaaccccctttggcactgacatggacttctcaccacccaggcccccctacccctcctatccccatgaagaccctgcttgcgaaactccttacctatcagaaggcttcggctatggcatgccccctctgtacccccagacggggcccccaccatcctacagaccgggcctgcggatgttccctgagactaggggtaccacaggttgtgcccaaccacctgcagtttccttccttccccgccccttccctagtgacccgtatggagggcggggctcctctttctccctggggctgccattctctccgccagccccctttcggccgcctcctcttcctgcatccccaccgcttgaaggccccttcccttcccagagtgatgtgcatcccctacctgctgagggatacaataaggtagggccaggctatggccctggggagggggctccggagcaggagaaatccaggggtggctacagcagcggcttccgagacagtgtccctatccagggtatcacgctggaggaagtgagtgagatcattggccgagacctgagtggcttccctgcacctcctggagaagagcctcctgcctga

SEQ ID NO: 13845 - DNA, 2631 bp, Homo sapiens
  source 1..2631: mol_type = unassigned DNA
atgtgtgagtcgcccccagtccagcccagtgcctcaagaaacacgcctccaggcccagccccagctccagcccctctggacccacctctctcaccttaagacccactggatcgggtaccctcggtcctaggatccaggggccagtgggcaaaggcctggcatgcctgcttcaatctcctccatcttcccaggtccaactctgcttttgtcttgtggctcagaaggtctctttgctgaggggcagggagcatagaaggacttgcggcctggccactcaaggaacatagccatctcacctgcttctctctttccccctctccctctgctcctcttcccattttgacagaactggactcagaggatgccccgccatgctgccgtctggccttgggagagccccctccctatggcgctgcacctatcggtattccccgacctccaccccctcggcctggcatgcattcgccaccgccgcgaccagccccctcacctggcacctgggagagccagcccgccaggtcggtgaggctgggaggaccaggagggggtgctgggggtgctgggggtggccgtgttctcgagtgtcccagcatccgcatcacctccatctctcccacgccggagccgccagcagcgctggaggacaaccctgatgcctggggggacggctctcctagagattaccccccaccagaaggctttgggggctacagagaagcagggggccagggtgggggggccttcttcagcccaagccctggcagcagcagcctgtcctcgtggagcttcttctccgatgcctctgacgaggcagccctgtatgcagcctgcgacgaggtggagtctgagctaaatgaggcggcctcccgctttggcctgggctccccgctgccctcgccccgggcctcccctcggccatggacccccgaagatccctggagcctgtatggtccaagccccggaggccgagggccagaggatagctggctactcctcagtgctcctgggcccaccccagcctccccgcggcctgcctctccatgtggcaagcggcgctattccagctcgggaaccccatcttcagcctccccagctctgtcccgccgtggcagcctgggggaagaggggtctgagccacctccaccacccccattgcctctggcccgggacccgggctcccctggtccctttgactatgtgggggccccaccagctgagagcatccctcagaagacacggcggacttccagcgagcaggcagtggctctgcctcggtctgaggagcctgcctcatgcaatgggaagctgcccttgggagcagaggagtctgtggctcctccaggaggttcccggaaggaggtggctggcatggactacctggcagtgccctccccactcgcttggtccaaggcccggattgggggacacagccctatcttcaggacctctgccctacccccactggactggcctctgcccagccaatatgagcagctggagctgaggatcgaggtacagcctagagcccaccaccgggcccactatgagacagaaggcagccgtggagctgtcaaagctgcccctggcggtcaccccgtagtcaagctcctaggctacagtgagaagccactgaccctacagatgttcatcggcactgcagatgaaaggaacctgcggcctcatgccttctatcaggtgcaccgtatcacaggcaagatggtggccacggccagctatgaagccgtagtcagtggcaccaaggtgttggagatgactctgctgcctgagaacaacatggcggccaacattgactgcgcgggaatcctgaagcttcggaattcagacattgagcttcggaagggtgagacggacatcgggcgcaaaaacacacgtgtacggctggtgttccgggtacacgtgccccagggcggcgggaaggtcgtctcagtacaggcagcatcggtgcccatcgagtgctcccagcgctcagcccaggagctgccccaggtggaggcctacagccccagtgcctgctctgtgagaggaggcgaggaactggtactgactggctccaacttcctgccagactccaaggtggtgttcattgagaggggtcctgatgggaagctgcaatgggaggaggaggccacagtgaaccgactgcagagcaacgaggtgacgctgaccctgactgtccccgagtacagcaacaagagggtttcccggccagtccaggtctacttttatgtctccaatgggcggaggaaacgcagtcctacccagagtttcaggtttctgcctgtgatctgcaaagaggagcccctaccggactcatctctgcggggtttcccttcagcatcggcaaccccctttggcactgacatggacttctcaccacccaggcccccctacccctcctatccccatgaagaccctgcttgcgaaactccttacctatcagaaggcttcggctatggcatgccccctctgtacccccagacggggcccccaccatcctacagaccgggcctgcggatgttccctgagactaggggtaccacagtgagtgagatcattggccgagacctgagtggcttccctgcacctcctggagaagagcctcctgcctga

SEQ ID NO: 13846 - DNA, 2509 bp, Homo sapiens
  source 1..2509: mol_type = unassigned DNA
atgtgtgagtcgcccccagtccagcccagtgcctcaagaaacacgcctccaggcccagccccagctccagcccctctggacccacctctctcaccttaagacccactggatcgggtaccctcggtcctaggatccaggggccagtgggcaaaggcctggcatgcctgcttcaatctcctccatcttcccaggtccaactctgcttttgtcttgtggctcagaagaactggactcagaggatgccccgccatgctgccgtctggccttgggagagccccctccctatggcgctgcacctatcggtattccccgacctccaccccctcggcctggcatgcattcgccaccgccgcgaccagccccctcacctggcacctgggagagccagcccgccaggtcggtgaggctgggaggaccaggagggggtgctgggggtgctgggggtggccgtgttctcgagtgtcccagcatccgcatcacctccatctctcccacgccggagccgccagcagcgctggaggacaaccctgatgcctggggggacggctctcctagagattaccccccaccagaaggctttgggggctacagagaagcagggggccagggtgggggggccttcttcagcccaagccctggcagcagcagcctgtcctcgtggagcttcttctccgatgcctctgacgaggcagccctgtatgcagcctgcgacgaggtggagtctgagctaaatgaggcggcctcccgctttggcctgggctccccgctgccctcgccccgggcctcccctcggccatggacccccgaagatccctggagcctgtatggtccaagccccggaggccgagggccagaggatagctggctactcctcagtgctcctgggcccaccccagcctccccgcggcctgcctctccatgtggcaagcggcgctattccagctcgggaaccccatcttcagcctccccagctctgtcccgccgtggcagcctgggggaagaggggtctgagccacctccaccacccccattgcctctggcccgggacccgggctcccctggtccctttgactatgtgggggccccaccagctgagagcatccctcagaagacacggcggacttccagcgagcaggcagtggctctgcctcggtctgaggagcctgcctcatgcaatgggaagctgcccttgggagcagaggagtctgtggctcctccaggaggttcccggaaggaggtggctggcatggactacctggcagtgccctccccactcgcttggtccaaggcccggattgggggacacagccctatcttcaggacctctgccctacccccactggactggcctctgcccagccaatatgagcagctggagctgaggatcgaggtacagcctagagcccaccaccgggcccactatgagacagaaggcagccgtggagctgtcaaagctgcccctggcggtcaccccgtagtcaagctcctaggctacagtgagaagccactgaccctacagatgttcatcggcactgcagatgaaaggaacctgcggcctcatgccttctatcaggtgcaccgtatcacaggcaagatggtggccacggccagctatgaagccgtagtcagtggcaccaaggtgttggagatgactctgctgcctgagaacaacatggcggccaacattgactgcgcgggaatcctgaagcttcggaattcagacattgagcttcggaagggtgagacggacatcgggcgcaaaaacacacgtgtacggctggtgttccgggtacacgtgccccagggcggcgggaaggtcgtctcagtacaggcagcatcggtgcccatcgagtgctcccagcgctcagcccaggagctgccccaggtggaggcctacagccccagtgcctgctctgtgagaggaggcgaggaactggtactgactggctccaacttcctgccagactccaaggtggtgttcattgagaggggtcctgatgggaagctgcaatgggaggaggaggccacagtgaaccgactgcagagcaacgaggtgacgctgaccctgactgtccccgagtacagcaacaagagggtttcccggccagtccaggtctacttttatgtctccaatgggcggaggaaacgcagtcctacccagagtttcaggtttctgcctgtgatctgcaaagaggagcccctaccggactcatctctgcggggtttcccttcagcatcggcaaccccctttggcactgacatggacttctcaccacccaggcccccctacccctcctatccccatgaagaccctgcttgcgaaactccttacctatcagaaggcttcggctatggcatgccccctctgtacccccagacggggcccccaccatcctacagaccgggcctgcggatgttccctgagactaggggtaccacagtgagtgagatcattggccgagacctgagtggcttccctgcacctcctggagaagagcctcctgcctga

SEQ ID NO: 13847 - DNA, 5613 bp, Homo sapiens
  source 1..5613: mol_type = unassigned DNA
atgtgtgagtcgcccccagtccagcccagtgcctcaagaaacacgcctccaggcccagccccagctccagcccctctggacccacctctctcaccttaagacccactggatcgggtaccctcggtcctaggatccaggggccagtgggcaaaggcctggcatgcctgcttcaatctcctccatcttcccaggtccaactctgcttttgtcttgtggctcagaaggtctctttgctgaggggcagggagcatagaaggacttgcggcctggccactcaaggaacatagccatctcacctgcttctctctttccccctctccctctgctcctcttcccattttgacagaactggactcagaggatgccccgccatgctgccgtctggccttgggagagccccctccctatggcgctgcacctatcggtattccccgacctccaccccctcggcctggcatgcattcgccaccgccgcgaccagccccctcacctggcacctgggagagccagcccgccaggtcggtgaggctgggaggaccaggagggggtgctgggggtgctgggggtggccgtgttctcgagtgtcccagcatccgcatcacctccatctctcccacgccggagccgccagcagcgctggaggacaaccctgatgcctggggggacggctctcctagagattaccccccaccagaaggctttgggggctacagagaagcagggggccagggtgggggggccttcttcagcccaagccctggcagcagcagcctgtcctcgtggagcttcttctccgatgcctctgacgaggcagccctgtatgcagcctgcgacgaggtggagtctgagctaaatgaggcggcctcccgctttggcctgggctccccgctgccctcgccccgggcctcccctcggccatggacccccgaagatccctggagcctgtatggtccaagccccggaggccgagggccagaggatagctggctactcctcagtgctcctgggcccaccccagcctccccgcggcctgcctctccatgtggcaagcggcgctattccagctcgggaaccccatcttcagcctccccagctctgtcccgccgtggcagcctgggggaagaggggtctgagccacctccaccacccccattgcctctggcccgggacccgggctcccctggtccctttgactatgtgggggccccaccagctgagagcatccctcagaagacacggcggacttccagcgagcaggcagtggctctgcctcggtctgaggagcctgcctcatgcaatgggaagctgcccttgggagcagaggagtctgtggctcctccaggaggttcccggaaggaggtggctggcatggactacctggcagtgccctccccactcgcttggtccaaggcccggattgggggacacagccctatcttcaggacctctgccctacccccactggactggcctctgcccagccaatatgagcagctggagctgaggatcgaggtacagcctagagcccaccaccgggcccactatgagacagaaggcagccgtggagctgtcaaagctgcccctggcggtcaccccgtagtcaagctcctaggctacagtgagaagccactgaccctacagatgttcatcggcactgcagatgaaaggaacctgcggcctcatgccttctatcaggtgcaccgtatcacaggcaagatggtggccacggccagctatgaagccgtagtcagtggcaccaaggtgttggagatgactctgctgcctgagaacaacatggcggccaacattgactgcgcgggaatcctgaagcttcggaattcagacattgagcttcggaagggtgagacggacatcgggcgcaaaaacacacgtgtacggctggtgttccgggtacacgtgccccagggcggcgggaaggtcgtctcagtacaggcagcatcggtgcccatcgagtgctcccagcgctcagcccaggagctgccccaggtggaggcctacagccccagtgcctgctctgtgagaggaggcgaggaactggtactgactggctccaacttcctgccagactccaaggtggtgttcattgagaggggtcctgatgggaagctgcaatgggaggaggaggccacagtgaaccgactgcagagcaacgaggtgacgctgaccctgactgtccccgagtacagcaacaagagggtttcccggccagtccaggtctacttttatgtctccaatgggcggaggaaacgcagtcctacccagagtttcaggtttctgcctgtgatctgcaaagaggagcccctaccggactcatctctgcggggtttcccttcagcatcggcaaccccctttggcactgacatggacttctcaccacccaggcccccctacccctcctatccccatgaagaccctgcttgcgaaactccttacctatcagaaggcttcggctatggcatgccccctctgtacccccagacggggcccccaccatcctacagaccgggcctgcggatgttccctgagactaggggtaccacaggttgtgcccaaccacctgcagtttccttccttccccgccccttccctagtgacccgtatggagggcggggctcctctttctccctggggctgccattctctccgccagccccctttcggccgcctcctcttcctgcatccccaccgcttgaaggccccttcccttcccagagtgatgtgcatcccctacctgctgagggatacaataaggtagggccaggctatggccctggggagggggctccggagcaggagaaatccaggggtggctacagcagcggcttccgagacagtgtccctatccagggtatcacgctggaggaaggtgggtgtgggactgggggctgtgagtgtgagtgtgtgcaagagattgctctgcatgtttgctgagggctggagctgggcttttcagagatcgggcatccctggtctctcagggccagttggaggttcccaggaggcatgttcttgatgcctgtggctgcctgaatccaattaactgaattctgaagagtgcatggggtaactgtctcagcctttctcctgtctctgcctctgtcctctgctccaaatcataaaatctcagagctagaagcactttcaagatcattccatccagcgcattcaatttgcaagtttaggcgttgagttccagagagggatggtagcttgctgaggtcccagtcaagcacacttgccattgcctcagctttcccctaaacacggtgtctgtggtcagggttggtgaggaggagctttcctgttttgcctctccttcttcccattggctacacccatctctggccctgctgataccgattcccctgacatttcaggctaagccagcaggaaagggctaggacgggtgcctgggagcccacatggagggagttgggcaagatttgattcggagcaggtgtcaagacgtgttggggaaactgaggcccagtggaatagaagccagtagaggaggaatctagaggcctcctagattaagacctgcctggaatggattgggggtgggtctttggaaaaggaggggacccacctctagcccagtctctcaactgcccctcctttacagtgagtgagatcattggccgagacctgagtggcttccctgcacctcctggagaagagcctcctgcctgaaccacgtgaactgtcatcacctggcaaccccagccccagcctcagccctgccccctttccctccttcctggagtggtggctacagaagcttggggccaaccctggctcctctttccccagcttctgtctgtctcactgtcttccctcccctcccccagctgaggtgtggccctcaggcctggtgctgccttggagggctgggggaaggagtgtgtggaggagggaggagggtgaagactgaggctaggtgccagaatggactggagtgaaggcgtgtctagagtgtgggctggctgttgtgctggaaagctggggacaggttgatggtaataaactgctcaatgaccagtgcttcaggctccagagctctttggagagatgggttggggcagcttactccagccctggcccaaggaggcccagaagttggaaagagatggaatgtggctgggaacattgcatcccaaagagcttctcagtggaggaggctggggaaggcatgagggggctcagaggctccttgactgggaccaggattgggggccagggcttgagtaggcctctccactctcctccttgggggtccagattccttaggagctttgggatgaggcccaggaggctgcatttttccaggtccttagtcttgccaccacacagatgattctgattcatagccaagatgaggacacactgatgtagctgatctctcatttacagaggaggattctaaagttcagagagggaaaggggcttgcctgaggtcacgtagataatcagcagcacattgaacgctgcactcctgggctcctgtccccagcccccattcagacacgctgactcaggaggtccaggcctctaaggcttctctccctggagtgagggtggaggtgagggagagctggcacaagccctccctctggatcctccactcctggggattatgaagatattctggaaagatttgtgcttcagaggtagactgcagaaagcaaacagtctacccagcagctctgaatgtcacctgccctggggcttacagcactatatgagttcctggcctatcctgcaaatatgcccatgctggccttctaaatagctggtacatccatcaccactgacgggcctggcctggaaacctggtttgtcccctgtcttgatggcctacgagaggccaagttccactgggctgggaaaagtcactttgtctgtcttgttcacctggagcctgacacaccgtaggtactgagtacaaatagcttgatttggctaggcttggctgcagggggacgtgcctaaaagacattccgggcatttgcacttgggaaacttgcctcaccttcaggcttgtggggcctctctatgcccaatgagtccaggcagtcctagcaagtactcaggagagcaggggtgggtgtgacagaggctggctctggattgggggacaacagaaccagagtaactcctcgcctgttgctgctttgcaatgaatttcctttacctttctggaacacaagctgctgtgaaccaaactgatatcaagtgattagctcaccgggccttggttgcttttcaaagatccccttcagccccctgccagagtcactgccccataatcaccatgtcagaagggaccctagggcattcgtgtcctatttatcaatcttcagcaccacctctaagatctctgagagagggtggatcagcctctgtgtaaacaaaaagctgttaggacttgttgcctctcaaggtggactattctgttttctgccaggacactgccattcatgcattgtcagatatttattaaacagcagcaaagtgccagccaatttgtcctggaggaattcatagcctcatggggcaaaagtaaataaacagcttattacaattcaacaa

SEQ ID NO: 13848 - DNA, 5491 bp, Homo sapiens
  source 1..5491: mol_type = unassigned DNA
atgtgtgagtcgcccccagtccagcccagtgcctcaagaaacacgcctccaggcccagccccagctccagcccctctggacccacctctctcaccttaagacccactggatcgggtaccctcggtcctaggatccaggggccagtgggcaaaggcctggcatgcctgcttcaatctcctccatcttcccaggtccaactctgcttttgtcttgtggctcagaagaactggactcagaggatgccccgccatgctgccgtctggccttgggagagccccctccctatggcgctgcacctatcggtattccccgacctccaccccctcggcctggcatgcattcgccaccgccgcgaccagccccctcacctggcacctgggagagccagcccgccaggtcggtgaggctgggaggaccaggagggggtgctgggggtgctgggggtggccgtgttctcgagtgtcccagcatccgcatcacctccatctctcccacgccggagccgccagcagcgctggaggacaaccctgatgcctggggggacggctctcctagagattaccccccaccagaaggctttgggggctacagagaagcagggggccagggtgggggggccttcttcagcccaagccctggcagcagcagcctgtcctcgtggagcttcttctccgatgcctctgacgaggcagccctgtatgcagcctgcgacgaggtggagtctgagctaaatgaggcggcctcccgctttggcctgggctccccgctgccctcgccccgggcctcccctcggccatggacccccgaagatccctggagcctgtatggtccaagccccggaggccgagggccagaggatagctggctactcctcagtgctcctgggcccaccccagcctccccgcggcctgcctctccatgtggcaagcggcgctattccagctcgggaaccccatcttcagcctccccagctctgtcccgccgtggcagcctgggggaagaggggtctgagccacctccaccacccccattgcctctggcccgggacccgggctcccctggtccctttgactatgtgggggccccaccagctgagagcatccctcagaagacacggcggacttccagcgagcaggcagtggctctgcctcggtctgaggagcctgcctcatgcaatgggaagctgcccttgggagcagaggagtctgtggctcctccaggaggttcccggaaggaggtggctggcatggactacctggcagtgccctccccactcgcttggtccaaggcccggattgggggacacagccctatcttcaggacctctgccctacccccactggactggcctctgcccagccaatatgagcagctggagctgaggatcgaggtacagcctagagcccaccaccgggcccactatgagacagaaggcagccgtggagctgtcaaagctgcccctggcggtcaccccgtagtcaagctcctaggctacagtgagaagccactgaccctacagatgttcatcggcactgcagatgaaaggaacctgcggcctcatgccttctatcaggtgcaccgtatcacaggcaagatggtggccacggccagctatgaagccgtagtcagtggcaccaaggtgttggagatgactctgctgcctgagaacaacatggcggccaacattgactgcgcgggaatcctgaagcttcggaattcagacattgagcttcggaagggtgagacggacatcgggcgcaaaaacacacgtgtacggctggtgttccgggtacacgtgccccagggcggcgggaaggtcgtctcagtacaggcagcatcggtgcccatcgagtgctcccagcgctcagcccaggagctgccccaggtggaggcctacagccccagtgcctgctctgtgagaggaggcgaggaactggtactgactggctccaacttcctgccagactccaaggtggtgttcattgagaggggtcctgatgggaagctgcaatgggaggaggaggccacagtgaaccgactgcagagcaacgaggtgacgctgaccctgactgtccccgagtacagcaacaagagggtttcccggccagtccaggtctacttttatgtctccaatgggcggaggaaacgcagtcctacccagagtttcaggtttctgcctgtgatctgcaaagaggagcccctaccggactcatctctgcggggtttcccttcagcatcggcaaccccctttggcactgacatggacttctcaccacccaggcccccctacccctcctatccccatgaagaccctgcttgcgaaactccttacctatcagaaggcttcggctatggcatgccccctctgtacccccagacggggcccccaccatcctacagaccgggcctgcggatgttccctgagactaggggtaccacaggttgtgcccaaccacctgcagtttccttccttccccgccccttccctagtgacccgtatggagggcggggctcctctttctccctggggctgccattctctccgccagccccctttcggccgcctcctcttcctgcatccccaccgcttgaaggccccttcccttcccagagtgatgtgcatcccctacctgctgagggatacaataaggtagggccaggctatggccctggggagggggctccggagcaggagaaatccaggggtggctacagcagcggcttccgagacagtgtccctatccagggtatcacgctggaggaaggtgggtgtgggactgggggctgtgagtgtgagtgtgtgcaagagattgctctgcatgtttgctgagggctggagctgggcttttcagagatcgggcatccctggtctctcagggccagttggaggttcccaggaggcatgttcttgatgcctgtggctgcctgaatccaattaactgaattctgaagagtgcatggggtaactgtctcagcctttctcctgtctctgcctctgtcctctgctccaaatcataaaatctcagagctagaagcactttcaagatcattccatccagcgcattcaatttgcaagtttaggcgttgagttccagagagggatggtagcttgctgaggtcccagtcaagcacacttgccattgcctcagctttcccctaaacacggtgtctgtggtcagggttggtgaggaggagctttcctgttttgcctctccttcttcccattggctacacccatctctggccctgctgataccgattcccctgacatttcaggctaagccagcaggaaagggctaggacgggtgcctgggagcccacatggagggagttgggcaagatttgattcggagcaggtgtcaagacgtgttggggaaactgaggcccagtggaatagaagccagtagaggaggaatctagaggcctcctagattaagacctgcctggaatggattgggggtgggtctttggaaaaggaggggacccacctctagcccagtctctcaactgcccctcctttacagtgagtgagatcattggccgagacctgagtggcttccctgcacctcctggagaagagcctcctgcctgaaccacgtgaactgtcatcacctggcaaccccagccccagcctcagccctgccccctttccctccttcctggagtggtggctacagaagcttggggccaaccctggctcctctttccccagcttctgtctgtctcactgtcttccctcccctcccccagctgaggtgtggccctcaggcctggtgctgccttggagggctgggggaaggagtgtgtggaggagggaggagggtgaagactgaggctaggtgccagaatggactggagtgaaggcgtgtctagagtgtgggctggctgttgtgctggaaagctggggacaggttgatggtaataaactgctcaatgaccagtgcttcaggctccagagctctttggagagatgggttggggcagcttactccagccctggcccaaggaggcccagaagttggaaagagatggaatgtggctgggaacattgcatcccaaagagcttctcagtggaggaggctggggaaggcatgagggggctcagaggctccttgactgggaccaggattgggggccagggcttgagtaggcctctccactctcctccttgggggtccagattccttaggagctttgggatgaggcccaggaggctgcatttttccaggtccttagtcttgccaccacacagatgattctgattcatagccaagatgaggacacactgatgtagctgatctctcatttacagaggaggattctaaagttcagagagggaaaggggcttgcctgaggtcacgtagataatcagcagcacattgaacgctgcactcctgggctcctgtccccagcccccattcagacacgctgactcaggaggtccaggcctctaaggcttctctccctggagtgagggtggaggtgagggagagctggcacaagccctccctctggatcctccactcctggggattatgaagatattctggaaagatttgtgcttcagaggtagactgcagaaagcaaacagtctacccagcagctctgaatgtcacctgccctggggcttacagcactatatgagttcctggcctatcctgcaaatatgcccatgctggccttctaaatagctggtacatccatcaccactgacgggcctggcctggaaacctggtttgtcccctgtcttgatggcctacgagaggccaagttccactgggctgggaaaagtcactttgtctgtcttgttcacctggagcctgacacaccgtaggtactgagtacaaatagcttgatttggctaggcttggctgcagggggacgtgcctaaaagacattccgggcatttgcacttgggaaacttgcctcaccttcaggcttgtggggcctctctatgcccaatgagtccaggcagtcctagcaagtactcaggagagcaggggtgggtgtgacagaggctggctctggattgggggacaacagaaccagagtaactcctcgcctgttgctgctttgcaatgaatttcctttacctttctggaacacaagctgctgtgaaccaaactgatatcaagtgattagctcaccgggccttggttgcttttcaaagatccccttcagccccctgccagagtcactgccccataatcaccatgtcagaagggaccctagggcattcgtgtcctatttatcaatcttcagcaccacctctaagatctctgagagagggtggatcagcctctgtgtaaacaaaaagctgttaggacttgttgcctctcaaggtggactattctgttttctgccaggacactgccattcatgcattgtcagatatttattaaacagcagcaaagtgccagccaatttgtcctggaggaattcatagcctcatggggcaaaagtaaataaacagcttattacaattcaacaa

SEQ ID NO: 13849 - DNA, 3169 bp, Homo sapiens
  source 1..3169: mol_type = unassigned DNA
cccagtccagcccagtgcctcaagaaacacgcctccaggcccagccccagctccagcccctctggacccacctctctcaccttaagacccactggatcgggtaccctcggtcctaggatccaggggccagtgggcaaaggcctggcatgcctgcttcaatctcctccatcttcccaggtccaactctgcttttgtcttgtggctcagaagaactggactcagaggatgccccgccatgctgccgtctggccttgggagagccccctccctatggcgctgcacctatcggtattccccgacctccaccccctcggcctggcatgcattcgccaccgccgcgaccagccccctcacctggcacctgggagagccagcccgccaggtcggtgaggctgggaggaccaggagggggtgctgggggtgctgggggtggccgtgttctcgagtgtcccagcatccgcatcacctccatctctcccacgccggagccgccagcagcgctggaggacaaccctgatgcctggggggacggctctcctagagattaccccccaccagaaggctttgggggctacagagaagcagggggccagggtgggggggccttcttcagcccaagccctggcagcagcagcctgtcctcgtggagcttcttctccgatgcctctgacgaggcagccctgtatgcagcctgcgacgaggtggagtctgagctaaatgaggcggcctcccgctttggcctgggctccccgctgccctcgccccgggcctcccctcggccatggacccccgaagatccctggagcctgtatggtccaagccccggaggccgagggccagaggatagctggctactcctcagtgctcctgggcccaccccagcctccccgcggcctgcctctccatgtggcaagcggcgctattccagctcgggaaccccatcttcagcctccccagctctgtcccgccgtggcagcctgggggaagaggggtctgagccacctccaccacccccattgcctctggcccgggacccgggctcccctggtccctttgactatgtgggggccccaccagctgagagcatccctcagaagacacggcggacttccagcgagcaggcagtggctctgcctcggtctgaggagcctgcctcatgcaatgggaagctgcccttgggagcagaggagtctgtggctcctccaggaggttcccggaaggaggtggctggcatggactacctggcagtgccctccccactcgcttggtccaaggcccggattgggggacacagccctatcttcaggacctctgccctacccccactggactggcctctgcccagccaatatgagcagctggagctgaggatcgaggtacagcctagagcccaccaccgggcccactatgagacagaaggcagccgtggagctgtcaaagctgcccctggcggtcaccccgtagtcaagctcctaggctacagtgagaagccactgaccctacagatgttcatcggcactgcagatgaaaggaacctgcggcctcatgccttctatcaggtgcaccgtatcacaggcaagatggtggccacggccagctatgaagccgtagtcagtggcaccaaggtgttggagatgactctgctgcctgagaacaacatggcggccaacattgactgcgcgggaatcctgaagcttcggaattcagacattgagcttcggaagggtgagacggacatcgggcgcaaaaacacacgtgtacggctggtgttccgggtacacgtgccccagggcggcgggaaggtcgtctcagtacaggcagcatcggtgcccatcgagtgctcccagcgctcagcccaggagctgccccaggtggaggcctacagccccagtgcctgctctgtgagaggaggcgaggaactggtactgactggctccaacttcctgccagactccaaggtggtgttcattgagaggggtcctgatgggaagctgcaatgggaggaggaggccacagtgaaccgactgcagagcaacgaggtgacgctgaccctgactgtccccgagtacagcaacaagagggtttcccggccagtccaggtctacttttatgtctccaatgggcggaggaaacgcagtcctacccagagtttcaggtttctgcctgtgatctgcaaagaggagcccctaccggactcatctctgcggggtttcccttcagcatcggcaaccccctttggcactgacatggacttctcaccacccaggcccccctacccctcctatccccatgaagaccctgcttgcgaaactccttacctatcagaaggcttcggctatggcatgccccctctgtacccccagacggggcccccaccatcctacagaccgggcctgcggatgttccctgagactaggggtaccacaggttgtgcccaaccacctgcagtttccttccttccccgccccttccctagtgacccgtatggagggcggggctcctctttctccctggggctgccattctctccgccagccccctttcggccgcctcctcttcctgcatccccaccgcttgaaggccccttcccttcccagagtgatgtgcatcccctacctgctgagggatacaataaggtagggccaggctatggccctggggagggggctccggagcaggagaaatccaggggtggctacagcagcggcttccgagacagtgtccctatccagggtatcacgctggaggaagtgagtgagatcattggccgagacctgagtggcttccctgcacctcctggagaagagcctcctgcctgaaccacgtgaactgtcatcacctggcaaccccagccccagcctcagccctgccccctttccctccttcctggagtggtggctacagaagcttggggccaaccctggctcctctttccccagcttctgtctgtctcactgtcttccctcccctcccccagctgaggtgtggccctcaggcctggtgctgccttggagggctgggggaaggagtgtgtggaggagggaggagggtgaagactgaggctaggtgccagaatggactggagtgaaggcgtgtctagagtgtgggctggctgttgtgctggaaagctggggacaggttgatggtaataaactgctcaatgaccagt

SEQ ID NO: 13850 - DNA, 2420 bp, Homo sapiens
  source 1..2420: mol_type = unassigned DNA
accttaagacccactggatcgggtaccctcggtcctaggatccaggggccagtgggcaaaggcctggcatgcctgcttcaatctcctccatcttcccagaactggactcagaggatgccccgccatgctgccgtctggccttgggagagccccctccctatggcgctgcacctatcggtattccccgacctccaccccctcggcctggcatgcattcgccaccgccgcgaccagccccctcacctggcacctgggagagccagcccgccaggtcggtgaggctgggaggaccaggagggggtgctgggggtgctgggggtggccgtgttctcgagtgtcccagcatccgcatcacctccatctctcccacgccggagccgccagcagcgctggaggacaaccctgatgcctggggggacggctctcctagagattaccccccaccagaaggctttgggggctacagagaagcagggggccagggtgggggggccttcttcagcccaagccctggcagcagcagcctgtcctcgtggagcttcttctccgatgcctctgacgaggcagccctgtatgcagcctgcgacgaggtggagtctgagctaaatgaggcggcctcccgctttggcctgggctccccgctgccctcgccccgggcctcccctcggccatggacccccgaagatccctggagcctgtatggtccaagccccggaggccgagggccagaggatagctggctactcctcagtgctcctgggcccaccccagcctccccgcggcctgcctctccatgtggcaagcggcgctattccagctcgggaaccccatcttcagcctccccagctctgtcccgccgtggcagcctgggggaagaggggtctgagccacctccaccacccccattgcctctggcccgggacccgggctcccctggtccctttgactatgtgggggccccaccagctgagagcatccctcagaagacacggcggacttccagcgagcaggcagtggctctgcctcggtctgaggagcctgcctcatgcaatgggaagctgcccttgggagcagaggagtctgtggctcctccaggaggttcccggaaggaggtggctggcatggactacctggcagtgccctccccactcgcttggtccaaggcccggattgggggacacagccctatcttcaggacctctgccctacccccactggactggcctctgcccagccaatatgagcagctggagctgaggatcgaggtacagcctagagcccaccaccgggcccactatgagacagaaggcagccgtggagctgtcaaagctgcccctggcggtcaccccgtagtcaagctcctaggctacagtgagaagccactgaccctacagatgttcatcggcactgcagatgaaaggaacctgcggcctcatgccttctatcaggtgcaccgtatcacaggcaagatggtggccacggccagctatgaagccgtagtcagtggcaccaaggtgttggagatgactctgctgcctgagaacaacatggcggccaacattgactgcgcgggaatcctgaagcttcggaattcagacattgagcttcggaagggtgagacggacatcgggcgcaaaaacacacgtgtacggctggtgttccgggtacacgtgccccagggcggcgggaaggtcgtctcagtacaggcagcatcggtgcccatcgagtgctgtgagcaaagaggccctgggccatgtctctgtctcttgcaactcttttgtctgtgtgtgtgtgtctgtctgcccattccctctgcagcgtcctgtgccctgtctgtcctgggtagctctatagaggactcagcttctttctattctagtttgcccctgccacagactctgtctctggggtggcccagagtgacactggaccctatctattcctggggtgccctgtgcccttgtttgggaaactccctggtctaccctgtttaaccctctctctgctctgggagcggccccttacatggtgtatgtgactccatggatattactggtttatttgtgtgtctactgctgaggagggctccctcagagccctgtggcagttttcccaaagagggtggggacagaggaggccacccctccatgcccagcccagccagtcctcttccttgcactgctctgcagcccagcgctcagcccaggagctgccccaggtggaggcctacagccccagtgcctgctctgtgagaggaggcgaggaactggtactgactggctccaacttcctgccagactccaaggtggtgttcattgagaggggtcctgatgggaagctgcaatgggaggaggaggccacagtgaaccgactgcagagcaacgaggtgacgctgaccctgactgtccccgagtacagca

SEQ ID NO: 13851 - DNA, 1382 bp, Homo sapiens
  source 1..1382: mol_type = unassigned DNA
gggacaccagcctcatgtctactctggaaaatggtggcccgccagatatgggggagggtttaggctgaggacaaaagtcactgggagttaagttttctctgtattgagttgggccagtctctttggaggctcttctgcctttgcccagcccactttgggctttattccaagaaaaacactgtgaactccaggccatgttttctccacaacgggtgcccagttccccaagggattcccttgcaggatatcctttatctttcaccattcccatcccatggtagactgaaaatctagggatgaataaaggatgagacggtggggatttcaatgaggtggccgctctctccctctgccagctcctaggctacagtgagaagccactgaccctacagatgttcatcggcactgcagatgaaaggaacctgcggcctcatgccttctatcaggtgcaccgtatcacaggcaagatggtggccacggccagctatgaagccgtagtcagtggcaccaaggtgttggagatgactctgctgcctgagaacaacatggcggccaacattgactgcgcgggaatcctgaagcttcggaattcagacattgagcttcggaagggtgagacggacatcgggcgcaaaaacacacgtgtacggctggtgttccgggtacacgtgccccagggcggcgggaaggtcgtctcagtacaggcagcatcggtgcccatcgagtgctcccagcgctcagcccaggagctgccccaggtggaggcctacagccccagtgcctgctctgtgagaggaggcgaggaactggtactgactggctccaacttcctgccagactccaaggtggtgttcattgagaggggtcctgatgggaagctgcaatgggaggaggaggccacagtgaaccgactgcagagcaacgaggtgacgctgaccctgactgtccccgagtacagcaacaagagggtttcccggccagtccaggtctacttttatgtctccaatgggcggaggaaacgcagtcctacccagagtttcaggtttctgcctgtgatctgcaaagaggagcccctaccggactcatctctgcggggtttcccttcagcatcggcaaccccctttggcactgacatggacttctcaccacccaggcccccctacccctcctatccccatgaagaccctgcttgcgaaactccttacctatcagaaggcttcggctatggcatgccccctctgtacccccagacggggcccccaccatcctacagaccgggcctgcggatgttccctgagactaggggtaccacagtgagtgagatcattggccgagacctgagtggcttccctgcacctcctggagaagagcctcctgcctga

SEQ ID NO: 13852 - DNA, 2025 bp, Homo sapiens
  source 1..2025: mol_type = unassigned DNA
gggacaccagcctcatgtctactctggaaaatggtggcccgccagatatgggggagggtttaggctgaggacaaaagtcactgggagttaagttttctctgtattgagttgggccagtctctttggaggctcttctgcctttgcccagcccactttgggctttattccaagaaaaacactgtgaactccaggccatgttttctccacaacgggtgcccagttccccaagggattcccttgcaggatatcctttatctttcaccattcccatcccatggtagactgaaaatctagggatgaataaaggatgagacggtggggatttcaatgaggtggccgctctctccctctgccagctcctaggctacagtgagaagccactgaccctacagatgttcatcggcactgcagatgaaaggaacctgcggcctcatgccttctatcaggtgcaccgtatcacaggcaagatggtggccacggccagctatgaagccgtagtcagtggcaccaaggtgttggagatgactctgctgcctgagaacaacatggcggccaacattgactgcgcgggaatcctgaagcttcggaattcagacattgagcttcggaagggtgagacggacatcgggcgcaaaaacacacgtgtacggctggtgttccgggtacacgtgccccagggcggcgggaaggtcgtctcagtacaggcagcatcggtgcccatcgagtgctcccagcgctcagcccaggagctgccccaggtggaggcctacagccccagtgcctgctctgtgagaggaggcgaggaactggtactgactggctccaacttcctgccagactccaaggtggtgttcattgagaggggtcctgatgggaagctgcaatgggaggaggaggccacagtgaaccgactgcagagcaacgaggtgacgctgaccctgactgtccccgagtacagcaacaagagggtttcccggccagtccaggtctacttttatgtctccaatgggcggaggaaacgcagtcctacccagagtttcaggtttctgcctgtgatctgcaaagaggagcccctaccggactcatctctgcggggtttcccttcagcatcggcaaccccctttggcactgacatggacttctcaccacccaggcccccctacccctcctatccccatgaagaccctgcttgcgaaactccttacctatcagaaggcttcggctatggcatgccccctctgtacccccagacggggcccccaccatcctacagaccgggcctgcggatgttccctgagactaggggtaccacaggttgtgcccaaccacctgcagtttccttccttccccgccccttccctagtgacccgtatggagggcggggctcctctttctccctggggctgccattctctccgccagccccctttcggccgcctcctcttcctgcatccccaccgcttgaaggccccttcccttcccagagtgatgtgcatcccctacctgctgagggatacaataaggtagggccaggctatggccctggggagggggctccggagcaggagaaatccaggggtggctacagcagcggcttccgagacagtgtccctatccagggtatcacgctggaggaagtgagtgagatcattggccgagacctgagtggcttccctgcacctcctggagaagagcctcctgcctgaaccacgtgaactgtcatcacctggcaaccccagccccagcctcagccctgccccctttccctccttcctggagtggtggctacagaagcttggggccaaccctggctcctctttccccagcttctgtctgtctcactgtcttccctcccctcccccagctgaggtgtggccctcaggcctggtgctgccttggagggctgggggaaggagtgtgtggaggagggaggagggtgaagactgaggctaggtgccagaatggactggagtgaaggcgtgtctagagtgtgggctggctgttgtgctggaaagctggggacag

SEQ ID NO: 13853 - DNA, 4364 bp, Homo sapiens
  source 1..4364: mol_type = unassigned DNA
gggacaccagcctcatgtctactctggaaaatggtggcccgccagatatgggggagggtttaggctgaggacaaaagtcactgggagttaagttttctctgtattgagttgggccagtctctttggaggctcttctgcctttgcccagcccactttgggctttattccaagaaaaacactgtgaactccaggccatgttttctccacaacgggtgcccagttccccaagggattcccttgcaggatatcctttatctttcaccattcccatcccatggtagactgaaaatctagggatgaataaaggatgagacggtggggatttcaatgaggtggccgctctctccctctgccagctcctaggctacagtgagaagccactgaccctacagatgttcatcggcactgcagatgaaaggaacctgcggcctcatgccttctatcaggtgcaccgtatcacaggcaagatggtggccacggccagctatgaagccgtagtcagtggcaccaaggtgttggagatgactctgctgcctgagaacaacatggcggccaacattgactgcgcgggaatcctgaagcttcggaattcagacattgagcttcggaagggtgagacggacatcgggcgcaaaaacacacgtgtacggctggtgttccgggtacacgtgccccagggcggcgggaaggtcgtctcagtacaggcagcatcggtgcccatcgagtgctcccagcgctcagcccaggagctgccccaggtggaggcctacagccccagtgcctgctctgtgagaggaggcgaggaactggtactgactggctccaacttcctgccagactccaaggtggtgttcattgagaggggtcctgatgggaagctgcaatgggaggaggaggccacagtgaaccgactgcagagcaacgaggtgacgctgaccctgactgtccccgagtacagcaacaagagggtttcccggccagtccaggtctacttttatgtctccaatgggcggaggaaacgcagtcctacccagagtttcaggtttctgcctgtgatctgcaaagaggagcccctaccggactcatctctgcggggtttcccttcagcatcggcaaccccctttggcactgacatggacttctcaccacccaggcccccctacccctcctatccccatgaagaccctgcttgcgaaactccttacctatcagaaggcttcggctatggcatgccccctctgtacccccagacggggcccccaccatcctacagaccgggcctgcggatgttccctgagactaggggtaccacaggttgtgcccaaccacctgcagtttccttccttccccgccccttccctagtgacccgtatggagggcggggctcctctttctccctggggctgccattctctccgccagccccctttcggccgcctcctcttcctgcatccccaccgcttgaaggccccttcccttcccagagtgatgtgcatcccctacctgctgagggatacaataaggtagggccaggctatggccctggggagggggctccggagcaggagaaatccaggggtggctacagcagcggcttccgagacagtgtccctatccagggtatcacgctggaggaaggtgggtgtgggactgggggctgtgagtgtgagtgtgtgcaagagattgctctgcatgtttgctgagggctggagctgggcttttcagagatcgggcatccctggtctctcagggccagttggaggttcccaggaggcatgttcttgatgcctgtggctgcctgaatccaattaactgaattctgaagagtgcatggggtaactgtctcagcctttctcctgtctctgcctctgtcctctgctccaaatcataaaatctcagagctagaagcactttcaagatcattccatccagcgcattcaatttgcaagtttaggcgttgagttccagagagggatggtagcttgctgaggtcccagtcaagcacacttgccattgcctcagctttcccctaaacacggtgtctgtggtcagggttggtgaggaggagctttcctgttttgcctctccttcttcccattggctacacccatctctggccctgctgataccgattcccctgacatttcaggctaagccagcaggaaagggctaggacgggtgcctgggagcccacatggagggagttgggcaagatttgattcggagcaggtgtcaagacgtgttggggaaactgaggcccagtggaatagaagccagtagaggaggaatctagaggcctcctagattaagacctgcctggaatggattgggggtgggtctttggaaaaggaggggacccacctctagcccagtctctcaactgcccctcctttacagtgagtgagatcattggccgagacctgagtggcttccctgcacctcctggagaagagcctcctgcctgaaccacgtgaactgtcatcacctggcaaccccagccccagcctcagccctgccccctttccctccttcctggagtggtggctacagaagcttggggccaaccctggctcctctttccccagcttctgtctgtctcactgtcttccctcccctcccccagctgaggtgtggccctcaggcctggtgctgccttggagggctgggggaaggagtgtgtggaggagggaggagggtgaagactgaggctaggtgccagaatggactggagtgaaggcgtgtctagagtgtgggctggctgttgtgctggaaagctggggacaggttgatggtaataaactgctcaatgaccagtgcttcaggctccagagctctttggagagatgggttggggcagcttactccagccctggcccaaggaggcccagaagttggaaagagatggaatgtggctgggaacattgcatcccaaagagcttctcagtggaggaggctggggaaggcatgagggggctcagaggctccttgactgggaccaggattgggggccagggcttgagtaggcctctccactctcctccttgggggtccagattccttaggagctttgggatgaggcccaggaggctgcatttttccaggtccttagtcttgccaccacacagatgattctgattcatagccaagatgaggacacactgatgtagctgatctctcatttacagaggaggattctaaagttcagagagggaaaggggcttgcctgaggtcacgtagataatcagcagcacattgaacgctgcactcctgggctcctgtccccagcccccattcagacacgctgactcaggaggtccaggcctctaaggcttctctccctggagtgagggtggaggtgagggagagctggcacaagccctccctctggatcctccactcctggggattatgaagatattctggaaagatttgtgcttcagaggtagactgcagaaagcaaacagtctacccagcagctctgaatgtcacctgccctggggcttacagcactatatgagttcctggcctatcctgcaaatatgcccatgctggccttctaaatagctggtacatccatcaccactgacgggcctggcctggaaacctggtttgtcccctgtcttgatggcctacgagaggccaagttccactgggctgggaaaagtcactttgtctgtcttgttcacctggagcctgacacaccgtaggtactgagtacaaatagcttgatttggctaggcttggctgcagggggacgtgcctaaaagacattccgggcatttgcacttgggaaacttgcctcaccttcaggcttgtggggcctctctatgcccaatgagtccaggcagtcctagcaagtactcaggagagcaggggtgggtgtgacagaggctggctctggattgggggacaacagaaccagagtaactcctcgcctgttgctgctttgcaatgaatttcctttacctttctggaacacaagctgctgtgaaccaaactgatatcaagtgattagctcaccgggccttggttgcttttcaaagatccccttcagccccctgccagagtcactgccccataatcaccatgtcagaagggaccctagggcattcgtgtcctatttatcaatcttcagcaccacctctaagatctctgagagagggtggatcagcctctgtgtaaacaaaaagctgttaggacttgttgcctctcaaggtggactattctgttttctgccaggacactgccattcatgcattgtcagatatttattaaacagcagcaaagtgccagccaatttgtcctggaggaattcatagcctcatggggcaaaagtaaataaacagcttattacaattcaacaa

SEQ ID NO: 13854 - DNA, 856 bp, Homo sapiens
  source 1..856: mol_type = unassigned DNA
ctgtttaaccctctctctgctctgggagcggccccttacatggtgtatgtgactccatggatattactggtttatttgtgtgtctactgctgaggagggctccctcagagccctgtggcagttttcccaaagagggtggggacagaggaggccacccctccatgcccagcccagccagtcctcttccttgcactgctctgcagcccagcgctcagcccaggagctgccccaggtggaggcctacagccccagtgcctgctctgtgagaggaggcgaggaactggtactgactggctccaacttcctgccagactccaaggtggtgttcattgagaggggtcctgatgggaagctgcaatgggaggaggaggccacagtgaaccgactgcagagcaacgaggtgacgctgaccctgactgtccccgagtacagcaacaagagggtttcccggccagtccaggtctacttttatgtctccaatgggcggaggaaacgcagtcctacccagagtttcaggtttctgcctgtgatctgcaaagaggagcccctaccggactcatctctgcggggtttcccttcagcatcggcaaccccctttggcactgacatggacttctcaccacccaggcccccctacccctcctatccccatgaagaccctgcttgcgaaactccttacctatcagaaggcttcggctatggcatgccccctctgtacccccagacggggcccccaccatcctacagaccgggcctgcggatgttccctgagactaggggtaccacagtgagtgagatcattggccgagacctgagtggcttccctgcacctcctggagaagagcctcctgcctga

SEQ ID NO: 13855 - DNA, 2235 bp, Homo sapiens
  source 1..2235: mol_type = unassigned DNA
ctgtttaaccctctctctgctctgggagcggccccttacatggtgtatgtgactccatggatattactggtttatttgtgtgtctactgctgaggagggctccctcagagccctgtggcagttttcccaaagagggtggggacagaggaggccacccctccatgcccagcccagccagtcctcttccttgcactgctctgcagcccagcgctcagcccaggagctgccccaggtggaggcctacagccccagtgcctgctctgtgagaggaggcgaggaactggtactgactggctccaacttcctgccagactccaaggtggtgttcattgagaggggtcctgatgggaagctgcaatgggaggaggaggccacagtgaaccgactgcagagcaacgaggtgacgctgaccctgactgtccccgagtacagcaacaagagggtttcccggccagtccaggtctacttttatgtctccaatgggcggaggaaacgcagtcctacccagagtttcaggtttctgcctgtgatctgcaaagaggagcccctaccggactcatctctgcggggtttcccttcagcatcggcaaccccctttggcactgacatggacttctcaccacccaggcccccctacccctcctatccccatgaagaccctgcttgcgaaactccttacctatcagaaggcttcggctatggcatgccccctctgtacccccagacggggcccccaccatcctacagaccgggcctgcggatgttccctgagactaggggtaccacaggttgtgcccaaccacctgcagtttccttccttccccgccccttccctagtgacccgtatggagggcggggctcctctttctccctggggctgccattctctccgccagccccctttcggccgcctcctcttcctgcatccccaccgcttgaaggccccttcccttcccagagtgatgtgcatcccctacctgctgagggatacaataaggtagggccaggctatggccctggggagggggctccggagcaggagaaatccaggggtggctacagcagcggcttccgagacagtgtccctatccagggtatcacgctggaggaaggtgggtgtgggactgggggctgtgagtgtgagtgtgtgcaagagattgctctgcatgtttgctgagggctggagctgggcttttcagagatcgggcatccctggtctctcagggccagttggaggttcccaggaggcatgttcttgatgcctgtggctgcctgaatccaattaactgaattctgaagagtgcatggggtaactgtctcagcctttctcctgtctctgcctctgtcctctgctccaaatcataaaatctcagagctagaagcactttcaagatcattccatccagcgcattcaatttgcaagtttaggcgttgagttccagagagggatggtagcttgctgaggtcccagtcaagcacacttgccattgcctcagctttcccctaaacacggtgtctgtggtcagggttggtgaggaggagctttcctgttttgcctctccttcttcccattggctacacccatctctggccctgctgataccgattcccctgacatttcaggctaagccagcaggaaagggctaggacgggtgcctgggagcccacatggagggagttgggcaagatttgattcggagcaggtgtcaagacgtgttggggaaactgaggcccagtggaatagaagccagtagaggaggaatctagaggcctcctagattaagacctgcctggaatggattgggggtgggtctttggaaaaggaggggacccacctctagcccagtctctcaactgcccctcctttacagtgagtgagatcattggccgagacctgagtggcttccctgcacctcctggagaagagcctcctgcctgaaccacgtgaactgtcatcacctggcaaccccagccccagcctcagccctgccccctttccctccttcctggagtggtggctacagaagcttggggccaaccctggctcctctttccccagcttctgtctgtctcactgtcttccctcccctcccccagctgaggtgtggccctcaggcctggtgctgccttggagggctgggggaaggagtgtgtggaggagggaggagggtgaagactgaggctaggtgccagaatggactggagtgaaggcgtgtctagagtgtgggctggctg

SEQ ID NO: 13856 - DNA, 1476 bp, Homo sapiens
  source 1..1476: mol_type = unassigned DNA
ctgtttaaccctctctctgctctgggagcggccccttacatggtgtatgtgactccatggatattactggtttatttgtgtgtctactgctgaggagggctccctcagagccctgtggcagttttcccaaagagggtggggacagaggaggccacccctccatgcccagcccagccagtcctcttccttgcactgctctgcagcccagcgctcagcccaggagctgccccaggtggaggcctacagccccagtgcctgctctgtgagaggaggcgaggaactggtactgactggctccaacttcctgccagactccaaggtggtgttcattgagaggggtcctgatgggaagctgcaatgggaggaggaggccacagtgaaccgactgcagagcaacgaggtgacgctgaccctgactgtccccgagtacagcaacaagagggtttcccggccagtccaggtctacttttatgtctccaatgggcggaggaaacgcagtcctacccagagtttcaggtttctgcctgtgatctgcaaagaggagcccctaccggactcatctctgcggggtttcccttcagcatcggcaaccccctttggcactgacatggacttctcaccacccaggcccccctacccctcctatccccatgaagaccctgcttgcgaaactccttacctatcagaaggcttcggctatggcatgccccctctgtacccccagacggggcccccaccatcctacagaccgggcctgcggatgttccctgagactaggggtaccacaggttgtgcccaaccacctgcagtttccttccttccccgccccttccctagtgacccgtatggagggcggggctcctctttctccctggggctgccattctctccgccagccccctttcggccgcctcctcttcctgcatccccaccgcttgaaggccccttcccttcccagagtgatgtgcatcccctacctgctgagggatacaataaggtagggccaggctatggccctggggagggggctccggagcaggagaaatccaggggtggctacagcagcggcttccgagacagtgtccctatccagggtatcacgctggaggaagtgagtgagatcattggccgagacctgagtggcttccctgcacctcctggagaagagcctcctgcctgaaccacgtgaactgtcatcacctggcaaccccagccccagcctcagccctgccccctttccctccttcctggagtggtggctacagaagcttggggccaaccctggctcctctttccccagcttctgtctgtctcactgtcttccctcccctcccccagctgaggtgtggccctcaggcctggtgctgccttggagggctgggggaaggagtgtgtggaggagggaggagggtgaagactgaggctaggtgccagaatggactggagtgaaggcgtgtctagagtgtgggctggctg

SEQ ID NO: 13857 - DNA, 447 bp, Homo sapiens
  source 1..447: mol_type = unassigned DNA
cctacccagagtttcaggtttctgcctgtgagtgagatcattggccgagacctgagtggcttccctgcacctcctggagaagagcctcctgcctgaaccacgtgaactgtcatcacctggcaaccccagccccagcctcagccctgccccctttccctccttcctggagtggtggctacagaagcttggggccaaccctggctcctctttccccagcttctgtctgtctcactgtcttccctcccctcccccagctgaggtgtggccctcaggcctggtgctgccttggagggctgggggaaggagtgtgtggaggagggaggagggtgaagactgaggctaggtgccagaatggactggagtgaaggcgtgtctagagtgtgggctggctgttgtgctggaaagctggggacaggttgatggtaataaactgctcaatgaccagtg

SEQ ID NO: 13858 - DNA, 2085 bp, Homo sapiens
  source 1..2085: mol_type = unassigned DNA
acgtagcgcggcgctcggaactgacctactaacacacatctctccgcgcggccacggcgcccgcggacccggcgcgcccgcccgcctcccgcgccgcgccctcgccgccgcccgcctcccgccgcggccccggaggcccggcccggcccgagccccgagcgccggcggcccgactcccggccgcccctttctttctcctcgccggcccgagagcaggaacacgataacgaaggaggcccaacttcattcaataaggagcctgacggatttatcccagacggtagaacaaaaggaagaatattgatggattttaaaccagagtttttaaagagcttgagaatacggggaaattaatttgttctcctacacacatagatagggtaaggttgtttctgatgcagctgagaaaaatgcagaccgtcaaaaaggagcaggcgtctcttgatgccagtagcaatgtggacaagatgatggtccttaattctgctttaacggaagtgtcagaagactccacaacaggtgaggagctgcttctcagtgaaggaagtgtggggaagaacaaatcttctgcatgtcggaggaaacgggaattcattcctgatgaaaagaaagatgctatgtattgggaaaaaaggcggaaaaataatgaagctgccaaaagatctcgtgagaagcgtcgactgaatgacctggttttagagaacaaactaattgcactgggagaagaaaacgccactttaaaagctgagctgctttcactaaaattaaagtttggtttaattagctccacagcatatgctcaagagattcagaaactcagtaattctacagctgtgtactttcaagattaccagacttccaaatccaatgtgagttcatttgtggacgagcacgaaccctcgatggtgtcaagtagttgtatttctgtcattaaacactctccacaaagctcgctgtccgatgtttcagaagtgtcctcagtagaacacacgcaggagagctctgtgcagggaagctgcagaagtcctgaaaacaagttccagattatcaagcaagagccgatggaattagagagctacacaagggagccaagagatgaccgaggctcttacacagcgtccatctatcaaaactatatggggaattctttctctgggtactcacactctcccccactactgcaagtcaaccgatcctccagcaactccccgagaacgtcggaaactgatgatggtgtggtaggaaagtcatctgatggagaagacgagcaacaggtccccaagggccccatccattctccagttgaactcaagcatgtgcatgcaactgtggttaaagttccagaagtgaattcctctgccttgccacacaagctccggatcaaagccaaagccatgcagatcaaagtagaagcctttgataatgaatttgaggccacgcaaaaactttcctcacctattgacatgacatctaaaagacatttcgaactcgaaaagcatagtgccccaagtatggtacattcttctcttactcctttctcagtgcaagtgactaacattcaagattggtctctcaaatcggagcactggcatcaaaaagaactgagtggcaaaactcagaatagtttcaaaactggagttgttgaaatgaaagacagtggctacaaagtttctgacccagagaacttgtatttgaagcaggggatagcaaacttatctgcagaggttgtctcactcaagagacttatagccacacaaccaatctctgcttcagactctgggtaaattactactgagtaagagctgggcatttagaaagatgtcatttgcaatagagcagtccattttgtattatgctgaattttcactggacctgtgatgtcatttcactgtgatgtgcacatgttgtctgtttggtgtctttttgtgcacagattatgatgaagattagattgtgttatcactctgcctgtgtatagtcagatagtccatgcgaaggctgtatatattgaacattatttttgttgttctattataaagtgtgtaagttaccagtttcaataaaggattggtgacaaacacagaa

SEQ ID NO: 13859 - DNA, 1552 bp, Homo sapiens
  source 1..1552: mol_type = unassigned DNA
actctggggtccaggttgacctggaagccagagacttcgagggcctcaccccgctccacacggccatcctggcccttaacgttgctatgcgcccttccgacctctgtccccgggtgctgagcacacaggcccgagacaggctggattgtgtccacatgttgctgcaaatgggtgctaatcacaccagccagagatgaggtcttgctgtgttgtccaggctggtctgcagctcctggcctcaagtgatcctccttcttcagcttcccaaagtgctaggattacaggcgtgaaccaccgcactccgccaagggagatcaagagcaacaagacagttctgcacttggccgtgcaggctgccaaccccactctggttcagctgctgctggagctgccccggggagacctgcggacctttgtcaacatgaaggcccacgggaacacagccctccacatggcggctgccctgccccctgggccggcccaggaggccatcgtgcggcacctgttggcagctggggcggaccccacactgcgcaacctggagaatgagcagcccgttcacctgctgcggcccgggccgggccctgaggggctccggcagctgttgaagaggagccgtgtggcgccgccaggcctgtcctcttaggactcaaacccagaccctggactgattttccagtccccaccgtcctgcgggacagccagcgtatgctaatgttgcaaacccatgataatgtatgtggaatatcctgccattggggttttacattaaaaccccagaatggctgcagaggggtgaacaggccccaatatttggggtgctgtgatacccctcttctacccacaaggagccctcttgatgatttctgtgaaatcgaggccccttgattgtttctgtgaaacaccctgcacccctagtcctttccccactgagatctttcgggttctctcccctaactcagctcttcgttcccagaaacccagatgtaatccccctacgtggtgcttggggcatcccgataccatctcagtaaatctcctacaatggcctcctcaccctccccgggacccacacccttcaggtcctcaccctgagacaggagggaccctctgagatcagggacccttaggtctcactgctctctgattcagagctcagctgggcccccagttccagaccccagcattcccggtcactccctccctaatctgagcatcactcaagctctttattaaactcaatttgggccagatttggtggctcatgcctgtaatcctaacactctgggaggccgaggcgggcggatcacttgaggtgaggagtttgagaccagcctggccaacatggtgaaaccctgtctccactaaaaatacaaaaacaattggctggacatggtggcatgcgcctgtagtcccagctacttgggaggctgaggcagaagaattgattgaacccaggaggcggaggttgcagtgagccgagattgtgccactgcactccagcctaggtgacaaagagagactctgtctcaaaaaaaaaaaaaaaaaaaaa

SEQ ID NO: 13860 - DNA, 1834 bp, Homo sapiens
  source 1..1834: mol_type = unassigned DNA
ttcgccggagcgcgacccggggactcccaggcctgtgggcgggccctgcccaggactgggcggtgccataacccctagtttaaaaactcgcgggtaccggacccaagatcggggacccggcggcggctccgcgggggaaacagcgaggctggcgcagcgccgaggccgcggccctgggggcccgcaatccacgccacggaatccccgagtgagcaggggtgagcgcagccactgcccaacgcaaaccgtgaagaagcttctggaagagcagaggcgccgccagcagcagcagcccgacgctggcggggtgcagggacaatttctccctcccccagagcagcccctgaccccatctgtgaatgaggctgtgactggccaccctcccttcccagcacactcggagactgtgggttctggacctagcagcctgggctttccagactgggaccccaacacgcatgctgcctacactgacagcccctactcttgccctgcttctgctgccgaaaatttcctgcctcctgacttctacccaccctcggacccagggcagccgtgcccatttccccagggcatggaggctggaccctggagagtttctgcacccccttcaggacccccacagttccccgctgtggtccctggaccatcgctggaggtggcccgagctcacatgctggctttggggccacagcagctgctggcccaggatgaggagggggacacgctccttcacctgtttgcggctcgggggctgcgctgggcggcatatgctgcggctgaggtgctccaggtgtaccggcgtcttgacattcgtgagcataagggcaagacccctctcctggtggcggctgctgccaaccagcccctgattgtggaggatctgttgaacctgggagcagagcccaatgccgctgaccatcagggacgttcggtcttgcacgtggccgctacctacgggctcccaggagttctcttggctgtgcttaactctggggtccaggttgacctggaagccagagacttcgagggcctcaccccgctccacacggccatcctggcccttaacgttgctatgcgcccttccgacctctgtccccgggtgctgagcacacaggcccgagacaggctggattgtgtccacatgttgctgcaaatgggtgctaatcacaccagccaggagatcaagagcaacaagacagttctgcacttggccgtgcaggctgccaaccccactctggttcagctgctgctggagctgccccggggagacctgcggacctttgtcaacatgaaggcccacgggaacacagccctccacatggcggctgccctgccccctgggccggcccaggaggccatcgtgcggcacctgttggcagctggggcggaccccacactgcgcaacctggagaatgagcagcccgttcacctgctgcggcccgggccgggccctgaggggctccggcagctgttgaagaggagccgtgtggcgccgccaggcctgtcctcttaggactcaaacccagaccctggactgattttccagtccccaccgtcctgcgggacagccagcgtatgctaatgttgcaaacccatgataatgtatgtggaatatcctgccattggggttttacattaaaaccccagaatggctgcagaggggtgaacaggccccaatatttggggtgctgtgatacccctcttctacccacaaggagccctcttgatgatttctgtgaaatcgaggccccttgattgtttctgtgaaacaccctgcacccctagtcctttccccactgagatctttcgggttctctcccctaactcagct

SEQ ID NO: 13861 - DNA, 1736 bp, Homo sapiens
  source 1..1736: mol_type = unassigned DNA
aaaatttgctgattaaatgaatgtgggtgtgtttgagagggatcctagacagccaagccttctggcatgaaacgctgagaagatgggagtgtctgctggcagagatgaaagtgagcaggggtgagcgcagccactgcccaacgcaaaccgtgaagaagcttctggaagagcagaggcgccgccagcagcagcagcccgacgctggcggggtgcagggacaatttctccctcccccagagcagcccctgaccccatctgtgaatgaggctgtgactggccaccctcccttcccagcacactcggagactgtgggttctggacctagcagcctgggctttccagactgggaccccaacacgcatgctgcctacactgacagcccctactcttgccctgcttctgctgccgaaaatttcctgcctcctgacttctacccaccctcggacccagggcagccgtgcccatttccccagggcatggaggctggaccctggagagtttctgcacccccttcaggacccccacagttccccgctgtggtccctggaccatcgctggaggtggcccgagctcacatgctggctttggggccacagcagctgctggcccaggatgaggagggggacacgctccttcacctgtttgcggctcgggggctgcgctgggcggcatatgctgcggctgaggtgctccaggtgtaccggcgtcttgacattcgtgagcataagggcaagacccctctcctggtggcggctgctgccaaccagcccctgattgtggaggatctgttgaacctgggagcagagcccaatgccgctgaccatcagggacgttcggtcttgcacgtggccgctacctacgggctcccaggagttctcttggctgtgcttaactctggggtccaggttgacctggaagccagagacttcgagggcctcaccccgctccacacggccatcctggcccttaacgttgctatgcgcccttccgacctctgtccccgggtgctgagcacacaggcccgagacaggctggattgtgtccacatgttgctgcaaatgggtgctaatcacaccagccaggagatcaagagcaacaagacagttctgcacttggccgtgcaggctgccaaccccactctggttcagctgctgctggagctgccccggggagacctgcggacctttgtcaacatgaaggcccacgggaacacagccctccacatggcggctgccctgccccctgggccggcccaggaggccatcgtgcggcacctgttggcagctggggcggaccccacactgcgcaacctggagaatgagcagcccgttcacctgctgcggcccgggccgggccctgaggggctccggcagctgttgaagaggagccgtgtggcgccgccaggcctgtcctcttaggactcaaacccagaccctggactgattttccagtccccaccgtcctgcgggacagccagcgtatgctaatgttgcaaacccatgataatgtatgtggaatatcctgccattggggttttacattaaaaccccagaatggctgcagaggggtgaacaggccccaatatttggggtgctgtgatacccctcttctacccacaaggagccctcttgatgatttctgtgaaatcgaggccccttgattgtttctgtgaaacaccctgcacccctagtcctttccccactgagatctttcgggttctctcccctaactcagct

SEQ ID NO: 13862 - DNA, 1399 bp, Homo sapiens
  source 1..1399: mol_type = unassigned DNA
ggcggcggctccgcgggggaaacagcgaggctggcgcagcgccgaggccgcggccctgggggcccgcaatccacgccacggaatccccgagtgagcaggggtgagcgcagccactgcccaacgcaaaccgtgaagaagcttctggaagagcagaggcgccgccagcagcagcagcccgacgctggcggggtgcagggacaatttctccctcccccagagcagcccctgaccccatctgtgaatgaggctgtgactggccaccctcccttcccagcacactcggagactgtgggttctggacctagcagcctgggctttccagactgggaccccaacacgcatgctgcctacactgacagcccctactcttgccctgcttctgctgccgaaaatttcctgcctcctgacttctacccaccctcggacccagggcagccgtgcccatttccccagggcatggaggctggaccctggagagtttctgcacccccttcaggacccccacagttccccgctgtggtccctggaccatcgctggaggtggcccgagctcacatgctggctttggggccacagcagctgctggcccaggatgaggagggggacacgtgagtataagggatagggttgtctgcagactcttggcttggtgggggctgttctcacggctgtcccccacctgtcctcaggctccttcacctgtttgcggctcgggggctgcgctgggcggcatatgctgcggctgaggtgctccaggtgtaccggcgtcttgacattcgtgagcataagggcaagacccctctcctggtggcggctgctgccaaccagcccctgattgtggaggatctgttgaacctgggagcagagcccaatgccgctgaccatcagggacgttcggtcttgcacgtggccgctacctacgggctcccaggagttctcttggtatggccagctggcaggcaggggtttgtctggggggtagactggttgcccagattttggcttccagggccaggaggccaggggatacccttacccagcagtctgccttctcttcctcccaggctgtgcttaactctggggtccaggttgacctggaagccagagacttcgagggtaagttgggtgtgggcagggctggtgtggttggtgtggctgggcgaggtgggtgcagatgcgggtccctcactgtctccattctgcaggcctcaccccgctccacacggccatcctggcccttaacgttgctatgcgcccttccgacctctgtccccgggtgctgagcacacaggcccgagacaggctggattgtgtccacatgttgctgcaaatgggtgctaatcacaccagccaggagatcaagagcaacaagacagttctgcacttggccgtgcaggct

SEQ ID NO: 13863 - DNA, 829 bp, Homo sapiens
  source 1..829: mol_type = unassigned DNA
ttccccagggcatggaggctggaccctggagagtttctgcacccccttcaggacccccacagttccccgctgtggtccctggaccatcgctggaggtggcccgagctcacatgctggctttggggccacagcagctgctggcccaggatgaggagggggacacgctccttcacctgtttgcggctcgggggctgcgctgggcggcatatgctgcggctgaggtgctccaggtgtaccggcgtcttgacattcgtgagcataagggcaagacccctctcctggtggcggctgctgccaaccagcccctgattgtggaggatctgttgaacctgggagcagagcccaatgccgctgaccatcagggacgttcggtcttgcacgtggccgctacctacgggctcccaggagttctcttggtatggccagctggcaggcaggggtttgtctggggggtagactggttgcccagattttggcttccagggccaggaggccaggggatacccttacccagcagtctgccttctcttcctcccaggctgtgcttaactctggggtccaggttgacctggaagccagagacttcgagggtaagttgggtgtgggcagggctggtgtggttggtgtggctgggcgaggtgggtgcagatgcgggtccctcactgtctccattctgcaggcctcaccccgctccacacggccatcctggcccttaacgttgctatgcgcccttccgacctctgtccccgggtgctgagcacacaggcccgagacaggctggattgtgtccacatgttgctgcaaatgggtgctaatcacaccagccagg

SEQ ID NO: 13864 - DNA, 751 bp, Homo sapiens
  source 1..751: mol_type = unassigned DNA
gctggaccctggagagtttctgcacccccttcaggacccccacagttccccgctgtggtccctggaccatcgctggaggtggcccgagctcacatgctggctttggggccacagcagctgctggcccaggatgaggagggggacacgtgagtataagggatagggttgtctgcagactcttggcttggtgggggctgttctcacggctgtcccccacctgtcctcaggctccttcacctgtttgcggctcgggggctgcgctgggcggcatatgctgcggctgaggtgctccaggtgtaccggcgtcttgacattcgtgagcataagggcaagacccctctcctggtggcggctgctgccaaccagcccctgattgtggaggatctgttgaacctgggagcagagcccaatgccgctgaccatcagggacgttcggtcttgcacgtggccgctacctacgggctcccaggagttctcttggtatggccagctggcaggcaggggtttgtctggggggtagactggttgcccagattttggcttccagggccaggaggccaggggatacccttacccagcagtctgccttctcttcctcccaggctgtgcttaactctggggtccaggttgacctggaagccagagacttcgagggtaagttgggtgtgggcagggctggtgtggttggtgtggctgggcgaggtgggtgcagatgcgggtccctcactgtctccattctgcaggcctcacc

SEQ ID NO: 13865 - DNA, 844 bp, Homo sapiens
  source 1..844: mol_type = unassigned DNA
cgcgggggaaacagcgaggctggcgcagcgccgaggccgcggccctgggggcccgcaatccacgccacggaatccccgagtgagcaggggtgagcgcagccactgcccaacgcaaaccgtgaagaagcttctggaagagcagaggcgccgccagcagcagcagcccgacgctggcggggtgcagggacaatttctccctcccccagagcagcccctgaccccatctgtgaatgaggctgtgactggctggaccctggagagtttctgcacccccttcaggacccccacagttccccgctgtggtccctggaccatcgctggaggtggcccgagctcacatgctggctttggggccacagcagctgctggcccaggatgaggagggggacacgtgagtataagggatagggttgtctgcagactcttggcttggtgggggctgttctcacggctgtcccccacctgtcctcaggctccttcacctgtttgcggctcgggggctgcgctgggcggcatatgctgcggctgaggtgctccaggtgtaccggcgtcttgacattcgtgagcataagggcaagacccctctcctggtggcggctgctgccaaccagcccctgattgtggaggatctgttgaacctgggagcagagcccaatgccgctgaccatcagggacgttcggtcttgcacgtggccgctacctacgggctcccaggagttctcttggtatggccagctggcaggcaggggtttgtctggggggtagactggttgcccagattttggcttccagggccaggaggccaggggatacccttacccagcagtctgccttctcttcctcc

SEQ ID NO: 13866 - DNA, 1036 bp, Homo sapiens
  source 1..1036: mol_type = unassigned DNA
tcagggactgcgttcgccggagcgcgacccggggactcccaggcctgtgggcgggccctgcccaggactgggcggtgccataacccctagtttaaaaactcgcgggtaccggacccaagatcggggacccggcggcggctccgcgggggaaacagcgaggctggcgcagcgccgaggccgcggccctgggggcccgcaatccacgccacggaatccccgagtgagcaggggtgagcgcagccactgcccaacgcaaaccgtgaagaagcttctggaagagcagaggcgccgccagcagcagcagcccgacgctggcggggtgcagggacaatttctccctcccccagagcagcccctgaccccatctgtgaatgaggctgtgactggccaccctcccttcccagcacactcggagactgtgggttctggacctagcagcctgggctttccagactgggaccccaacacgcatgctgcctacactgacagcccctactcttgccctgcttctgctgccgaaaatttcctgcctcctgacttctacccaccctcggacccagggcagccgtgcccatttccccagggcatggaggaccccccagacacccagttctatgtaggatcttctctgccacaggctggaccctggagagtttctgcacccccttcaggacccccacagttccccgctgtggtccctggaccatcgctggaggtggcccgagctcacatgctggctttggggccacagcagctgctggcccaggatgaggagggggacacgctccttcacctgtttgcggctcgggggctgcgctgggcggcatatgctgcggctgaggtgctccaggtgtaccggcgtcttgacattcgtgagcataagggcaagacccctctcctggtggcggctgctgccaaccagcccctgattgtggaggatctgttgaacctgggagcagagcccaatgccgctgaccatcagggacgttcggtcttgcacgtggccgctacctacgggctcccaggagttctcttg

SEQ ID NO: 13867 - DNA, 622 bp, Homo sapiens
  source 1..622: mol_type = unassigned DNA
ccaagatcggggacccggcggcggctccgcgggggaaacagcgaggctggcgcagcgccgaggccgcggccctgggggcccgcaatccacgccacggaatccccgagtgagcaggggtgagcgcagccactgcccaacgcaaaccgtgaagaagcttctggaagagcagaggcgccgccagcagcagcagcccgacgctggcggggtgcagggacaatttctccctcccccagagcagcccctgaccccatctgtgaatgaggctgtgactgcacactcggagactgtgggttctggacctagcagcctgggctttccagactgggaccccaacacgcatgctgcctacactgacagcccctactcttgccctgcttctgctgccgaaaatttcctgcctcctgacttctacccaccctcggacccagggcagccgtgcccatttccccagggcatggaggtgagatacagagtgggtacaggatgctgaagggcccctaaaaattcgcagttgcactcctgcagtattctgagatgtctggagctcagttacgattcccttttccaggccgggcgtggtggctcacacctgtaatcccagcactttgggaggctgaggcag

SEQ ID NO: 13868 - DNA, 281 bp, Homo sapiens
  source 1..281: mol_type = unassigned DNA
aacccttcctccgccggaacccaggctcggaaggtgagcaggggtgagcgcagccactgcccaacgcaaaccgtgaagaagcttctggaagagcagaggcgccgccagcagcagcagcccgacgctggcggggtgcagggacaatttctccctcccccagagcagcccctgaccccatctgtgaatgaggctgtgactggccaccctcccttcccagcacactcggagactgtgggttctggacctagcagcctgggctttccagactgggaccccaacac

SEQ ID NO: 13869 - DNA, 1834 bp, Homo sapiens; identical to SEQ ID NO: 13860
  source 1..1834: mol_type = unassigned DNA

SEQ ID NO: 13870 - DNA, 8761 bp, Homo sapiens
  source 1..8761: mol_type = unassigned DNA
ggtggcgacggcgagcacagaaacgatggagttgagccagtcgaccctggttggaagcaagtgagaagagaccaggcgcacccctaaatttctgtgcggagcgcttgtcatcctccccagggaacggtgcacccaaaggaggactggctggactgatttgctagggagagggcggggaagaggaggcaaggtgagcagagaagccccctgcgtatccggactgccagatcgcgcttttgccggactcctgccccctccctgctcaggtgggcgcgcccggtctccagctcacaggggcgcttggaggagaccagaaagtcgccgcctggctgcgcgggatgcctttcgccaagcggatcgtggagccgcaatggctgtgcaggcagcggcgccctgcgcccggcccagcagtggacgcgagcggaggcagcgctgagccgccgccgcccttgcagccgccgggccggagggacctggacgaggtcgaggcgccagggccagaggagccagcccgcgccgtccctgcaccttcagggctgccaccgccgccgccgccactgcccgcgccggccgaccagactcagccgccgcacggagaggcgtccgtggctggcgaggagagcacggcggggatcccggaggcggcgcccgcagccggcgaggcgtcctcggcggcggcggcggcggccgtgctgctcatgctggacctatgcgcggtcagcaacgccgctctggcccgtgtcctccggcagctctcggacgtggcccggcacgcttgcagcctcttccaggagctcgagagcgacatccagctcacccaccgccgcgtctgggcgctgcagggcaagctcggcggcgtgcagcgcgtcctcagcacgcttgaccctaagcaggaggcagtgcccgtctccaacctggacatagagagtaagctgagtgtgtactaccgcgccccgtggcaccagcagcgcaacatcttcctcccagccacaaggccaccctgcgtggaggagctgcaccgccacgcccggcagagcctgcaagccctgcgcagagaacaccggagccggagcgatcgccgagagcaaagagcagctgcccccctttccattgcagctcctccactgccagcctaccctccagctcacagccagaggaggcgtgagtttaaggaccgtcactttttaacgtcccatcccccagaggatgaagatacagatgtcatgttagggcagaggccgaaaaacccaatacacaatatcccttccacactggacaagcagaccaactggagcaaagcactacctctcccgacgccagaggagaagatgaaacaagatgcccaagtgatttcttcttgcattattcccatcaatgttactggagttggctttgacagagaggctagtatacgctgctctctggttcattcacaatcggtactacagcggagacgaaaattgaggaggaggaaaaccatctcgggtatccccagaagagttcaacaagaaatagattctgatgaatcaccagtggccagggaaaggaatgtgattgtgcacacaaacccagacccctccaacactgtcaataggatatccggaaccagggactctgagtgccaaaccgaggatattctgattgctgccccatccagaaggagaatcagagctcaaaggggtcaaagcattgcagcttccctttctcattctgctggcaacatttctgccctagcagacaaaggtgacaccatgtttactcctgcagtgagcagccgcacaagatctcggagccttccccgggaaggtaatagaggtggggatgctgagcccaaagttggcgctaaaccctcagcatatgaagagggagagtcttttgtgggtgaccatgaaagaacccctaatgatttcagtgaggctccaagcagcccgagtgcccaggaccaccagcctactttgggcctggcctgctctcaacatcttcacagcccccagcacaaattaagtgagaggggaaggtcacgtctgtcccgaatggctgctgactctggcagctgtgacatctcctccaactcagacacgtttgggagccccatccactgcatctccacggctggcgtcctccttagcagccacatggaccagaaagatgaccaccagtcatccagtggcaactggagtgggagcagctccacgtgcccctcgcagacctcagaaaccatccctcctgcagcttctcctccactcactggctcttcacactgtgactcggagttgtcactaaacacagcccctcatgccaatgaggatgccagtgttttcgtgacagagcaatacaatgaccacttggataaagtgagaggccatcgggcaaactcctttacctccactgttgcagacctgctggatgatcccaacaacagcaacacaagtgacagtgagtggaattacctacaccaccaccatgatgcctcctgccgccaggattttagtcctgagcgtcccaaggcagacagcctgggctgcccaagcttcacaagcatggccacttatgacagctttctggaaaagtctccatcagacaaagcggacactagctctcacttttcagtagacacggaaggatactatacctccatgcactttgactgtggtctcaaaggtaataagagctatgtctgtcactatgcagccctgggcccagagaatggccagggtgtaggggcttcccctggtcttccagattgtgcctggcaggactacttagaccacaagaggcagggaagaccaagcatctctttcaggaaaccaaaggcaaagccgaccccacctaaacgtagctcatcattgaggaagtctgatggaaacgcagatatttctgagaagaaagaaccaaagataagcagtggtcagcacctgcctcacagttccagggaaatgaagctgcctcttgatttcgccaacacgccttctcgaatggaaaacgccaatcttcccaccaagcaggaaccttcttggataaaccagagtgaacaaggcattaaggaacctcagttagatgcttcggatattccaccattcaaagatgaagttgccgaatccacacactatgcagacctctggctcctaaatgacttgaaaacaaatgatccttatagatctctatctaattcaagcaccgctacgggtaccacagtcattgaatgcatcaaatctccagagagctctgaatcccaaacatcacaatcagaatcaagagccaccaccccatctcttccttctgttgacaatgagtttaaactggcttcaccagaaaagctggctggcttggcatctccatcaagtggctattcaagccagtctgaaacgccaacatcctctttccctacagctttcttttcaggtccattgtctcccggaggtagcaaaagaaaacctaaagtcccagaaagaaaatcctcactacagcaaccctctttaaaagatggaactatatcactgagtaaagaccttgaacttccaattatacctcctacccatcttgatctaagtgctcttcataatgtcttgaacaaaccattccaccaccgtcatccactgcatgtttttactcataataagcagaacacagtaggagaaacactgaggtcgaatcctccaccgtcccttgcaattacaccaacgatcctgaaatctgttaaccttaggtccatcaacaagtctgaagaagttaagcaaaaagaagaaaacaatacagatctcccttatttagaggaaagcacactcacaacggctgccttgtctccaagtaagattaggccgcatacagcaaataaatcagtatctcgtcaatactccactgaagacaccatactgtcctttttagactcttctgcagttgagatgggaccagataaactacatttagaaaaaaactctacttttgatgtgaagaatcgctgcgatccagaaaccataacatcagctggtagcagtcttctagattcaaatgtcacaaaagaccaagtgcgtacagagactgagcctattccagaaaacacgccaaccaaaaactgtgcttttcccacagaaggatttcagagggtctctgctgcccgcccaaatgatttggatggtaaaataatacaatatggacctggtccagacgaaactctagaacaggtacagaaggcaccctctgcaggtctggaggaagttgcacaacctgaatctgtggatgtaatcacatctcagtcagactcaccaactagagcaacagatgtaagcaatcaatttaagcatcaatttgttatgagccgccaccatgacaaagtgcctggtactatcagctatgaatcggagataacatctgtaaattcattccctgaaaaatgttccaagcaggaaaatattgcttcaggtatttcagccaaaagtgcctctgataacagcaaagcagaggagacccaaggaaatgtggatgaggcttcattgaaagaatcatcaccgagtgatgactccatcatttcaccacttagtgaagactcccaagctgaagcagagggtgtgttcgtgtctccaaacaaacctcgaacaactgaggatttatttgcagtcattcacagatccaagaggaaagtacttggaagaaaagattccggggacatgtctgttcgaagcaaatcgagagctcccctcagcagtagcagcagcagcgccagttccatcacttcacccagcagtaatgtgacaacccccaacagccagaggtctcctggtctcatataccgaaatgccaaaaagtccaacacatccaatgaagagtttaagctgttactgctcaagaaaggcagtcgctcagattctagttaccgcatgtctgccactgagatcctgaagagccccatactgcccaaacctcctggggagctcacagcagagtcccctcagagcaccgatgatgcccatcaggggtcacaaggggctgaggcattgtccccactctctccatgctccccacgagttaatgcagaaggcttttcctcgaagagctttgccacctcagcatcagcaagggttggacgttctcgggcccctcctgcagccagcagcagccgctacagtgtccgctgccggctgtacaatacgcccatgcaggcaatctccgagggagagacggaaaattctgacgggagcccacatgacgaccgttcctcccagagttcaacatagactgcctgtaccaggctgcctggcaaaggccaaaacccttactcacatgaggatggaggaacagaacagaggacttgggaaaagtctcaacttgatggggtagcatcactgctaagcaatgaatgaatttctaaatacagtatgtgctgggtaaacagaaagtggtttagacattcttgattagtttccatattttaagtagctgcagtctttcatgtttttctttagcatagtttgatttacgcaatctccttccttgtgaaaatagaggatacaaaattgtctaattttcatgacacctagaaaacgttttcccagagctgcctattcagaaactaaagccctcactgtcattattctttaagaagatgaaattactctggatgtttggtatttttttacattaaaacaaactaaagcaaaatttagaagaaagaactacacatatgtaaataccatatttttgataaaaatgtgtaaatagatttatcaatgatgagtggacatgtggtcaattatctactgcacaccaactgtttatagaatacacaaaaataaaatgtaataactgtattctgtgaataccattttcatatcaaatgccatatttaaatgtccaccaatatgatttctgagtggtaaacctcaaatatgaattttaaactggtgaactaaaggaaatcttgaggtcatatactgaaatatgaataaattaaaataatgaattcagatctaatcatttttatgacaaattgcagcaccaaacaaactaatagcaacccatggctgtgatttgttgtgtggtaatttggacagaatgaaaagcatgcttttgattttttttttaatcagtgagagaagtcatcattctcaacacaaagccctgaacaacagcatttgacagtgtcctttagattttaattttttcaatggattgctttaaagagaatgagtagggaaaatagtagttaattttaggttatgttttatattaggctactggggacataaacggtcataactaatgactgtaatcattaaactccttaaacagtttagaaattagctccaggttcttaaactaacaaaaataaaacctaagcatgccacagagctattgattaatcagtaagtacctgtaatgagttttcagtgaagctttctctctgtgctgatgagattcatgctacctaaaaattaacagaaatgacactgtgaacaatgtagttggaaaataggtatgtgtatatgcattatttatactcattgttaaactgggaatggggaacagctctggttcacaatactacatacaactgagtttttgtctggttttactatagtgtctgcttgatggcaaaaggggagggtggagggtgggagaggaaatgtcagggcatgtgctctgataaaataaaggcagggaaacaagctgaattacttgaaattacttgaattttcttgtcttaaaactgaaaaaaaaatgtagttacacgttaaaatctgcaaatggtttttacacctctgattttaacatgaacttatactaatgtttggaatcttatgtcagaaatataagcagctatgtacttagaataggttttgaatgggagaggtagaacagagagagaattaagaagggatctgacttataaaagactagaatgtgattagagtgatagaacataccaatgttaccaagaaattgacaagctgctggctttaagcttatgcaagtggtagttgggaaagtaggaggtgtggaagagggtttgcattttggattaattcatgcaaaatgaaggaggaagcctggtctaagaagatactgtctttcaatagaaatgatttctaaactgctacagattaagaatagataatctgattgctgttgttttgtttgtttggaaagaaaaaaaatgtctggcttcttctactatttgttttcactaccaaactgtgttactaaatttcttgtcatccttgtatgtaaaatgggtgctgggggtggaggggtataagaggagggagagtcagagagagtgtgtatgggtgtgtgtgagtgtgagtgtgtgtgtacgcacacacactggggatagataagctacctggtaaagggtttgaacatttacaaaatgtcacactttttcttaaaagaaaaatattttggggtttgaataaaatggaccaccatttctcattggaacccattaattaagaaaaccagcatggtttgacaccacatgggaacatgaataaatctgtctcatgatttgaaaagtacaccttgcaaagttttaaaaataaagtttttaggcaaatgcgataagaaaccgtcatttccagtcacagtaggcgatctttcgtaatttcataaaagcagttcgtttgcagtatggcttttgtgtagttaggggttttttaagtgtgaagaaaggtatgtgggctttaaaagtgattctaaatcttgaatagaaaacacatgaattggctttaataaaaatgtcacctttttattattgacattaagtaatggtaccatatattttttaaaatacatattgacttgaattgtgaggcaataagataccttctatatgtaatgatcacagaactaacccttataatatagttttacttattttgtttactctaaaaatctatagcagagtttctctattttatatttcatagatttaaaaaacccaaataaagatggatttaaaattcactgtggaaaagagtattgagttacaaactgagaagaaaaagcaggaagttccctaataatctggaatattctacatggcttgattacatagcaaacaagaccaagatttagggctgtctttaacatcactgccgtcttgaagcagggtacacacgttaggtattgtgaagaacatcaatccgaacttttcttctgttgtttgcactgatgcgattttttgttcttttatgtttatacaacgtatctatgttgtgtaggggaaattttttcattttttaaaaattctactttggttttgttgttgttttgatttgtttttggctaagtagaggacatggactagttgtagcaaacagaacatgctgtttgctcttgccaaaggtcagtgagtgagtgcatttgctgcagtggtggcacgtagagaactagatggtaataaagatttaaaactatgaagaaggttacagtgtaactattttggtactagaaccagttcatgctggccgaaacgacaatggtttatggacttgcatccattttgtatttttgtaatatttgtaaatatgaactttttaaattgctgcaaagatggtttcttttgtaagatgttttcaacgtttacattcaatccaagcctttgtatattttagagctgtgcaacactttaagtcttgtatttatttttagtaaaaatggtgacagtttcattgtgaacccctctcaaaaaaaatgtatcagaaaagtttgattacctagaaagtgtgtatagaaactgcaaataaacgtgactgcaattaaa

SEQ ID NO: 13871 - DNA, 8213 bp, Homo sapiens
  source 1..8213: mol_type = unassigned DNA
ctgatttgccattcaagtgaaccctggagggattagcagccagcctagcacttgggtgagaccatctccccctccaggggggagtcctagatgcagcacagaggttctgtgaaaatctgccatcctccttgcagaaggttgccctctctcgccctccatcccccccgccgtgcttgctgacttaagcagatcagctttcagctctctggcattcagagacgtctttgcataaaagaaaaggcccttccttaaggagcagagcgggaatccaagcatggctctggcctgctgcatgcccaagaatgcagccgtctccaacctggacatagagagtaagctgagtgtgtactaccgcgccccgtggcaccagcagcgcaacatcttcctcccagccacaaggccaccctgcgtggaggagctgcaccgccacgcccggcagagcctgcaagccctgcgcagagaacaccggagccggagcgatcgccgagagcaaagagcagctgcccccctttccattgcagctcctccactgccagcctaccctccagctcacagccagaggaggcgtgagtttaaggaccgtcactttttaacgtttaacagcacccgttcgccctcccccactgaatgttgccacatgaccccgtggagtagaaagtcccatcccccagaggatgaagatacagatgtcatgttagggcagaggccgaaaaacccaatacacaatatcccttccacactggacaagcagaccaactggagcaaagcactacctctcccgacgccagaggagaagatgaaacaagatgcccaagtgatttcttcttgcattattcccatcaatgttactggagttggctttgacagagaggctagtatacgctgctctctggttcattcacaatcggtactacagcggagacgaaaattgaggaggaggaaaaccatctcgggtatccccagaagagttcaacaagaaatagattctgatgaatcaccagtggccagggaaaggaatgtgattgtgcacacaaacccagacccctccaacactgtcaataggatatccggaaccagggactctgagtgccaaaccgaggatattctgattgctgccccatccagaaggagaatcagagctcaaaggggtcaaagcattgcagcttccctttctcattctgctggcaacatttctgccctagcagacaaaggtgacaccatgtttactcctgcagtgagcagccgcacaagatctcggagccttccccgggaaggtaatagaggtggggatgctgagcccaaagttggcgctaaaccctcagcatatgaagagggagagtcttttgtgggtgaccatgaaagaacccctaatgatttcagtgaggctccaagcagcccgagtgcccaggaccaccagcctactttgggcctggcctgctctcaacatcttcacagcccccagcacaaattaagtgagaggggaaggtcacgtctgtcccgaatggctgctgactctggcagctgtgacatctcctccaactcagacacgtttgggagccccatccactgcatctccacggctggcgtcctccttagcagccacatggaccagaaagatgaccaccagtcatccagtggcaactggagtgggagcagctccacgtgcccctcgcagacctcagaaaccatccctcctgcagcttctcctccactcactggctcttcacactgtgactcggagttgtcactaaacacagcccctcatgccaatgaggatgccagtgttttcgtgacagagcaatacaatgaccacttggataaagtgagaggccatcgggcaaactcctttacctccactgttgcagacctgctggatgatcccaacaacagcaacacaagtgacagtgagtggaattacctacaccaccaccatgatgcctcctgccgccaggattttagtcctgagcgtcccaaggcagacagcctgggctgcccaagcttcacaagcatggccacttatgacagctttctggaaaagtctccatcagacaaagcggacactagctctcacttttcagtagacacggaaggatactatacctccatgcactttgactgtggtctcaaaggtaataagagctatgtctgtcactatgcagccctgggcccagagaatggccagggtgtaggggcttcccctggtcttccagattgtgcctggcaggactacttagaccacaagaggcagggaagaccaagcatctctttcaggaaaccaaaggcaaagccgaccccacctaaacgtagctcatcattgaggaagtctgatggaaacgcagatatttctgagaagaaagaaccaaagataagcagtggtcagcacctgcctcacagttccagggaaatgaagctgcctcttgatttcgccaacacgccttctcgaatggaaaacgccaatcttcccaccaagcaggaaccttcttggataaaccagagtgaacaaggcattaaggaacctcagttagatgcttcggatattccaccattcaaagatgaagttgccgaatccacacactatgcagacctctggctcctaaatgacttgaaaacaaatgatccttatagatctctatctaattcaagcaccgctacgggtaccacagtcattgaatgcatcaaatctccagagagctctgaatcccaaacatcacaatcagaatcaagagccaccaccccatctcttccttctgttgacaatgagtttaaactggcttcaccagaaaagctggctggcttggcatctccatcaagtggctattcaagccagtctgaaacgccaacatcctctttccctacagctttcttttcaggtccattgtctcccggaggtagcaaaagaaaacctaaagtcccagaaagaaaatcctcactacagcaaccctctttaaaagatggaactatatcactgagtaaagaccttgaacttccaattatacctcctacccatcttgatctaagtgctcttcataatgtcttgaacaaaccattccaccaccgtcatccactgcatgtttttactcataataagcagaacacagtaggagaaacactgaggtcgaatcctccaccgtcccttgcaattacaccaacgatcctgaaatctgttaaccttaggtccatcaacaagtctgaagaagttaagcaaaaagaagaaaacaatacagatctcccttatttagaggaaagcacactcacaacggctgccttgtctccaagtaagattaggccgcatacagcaaataaatcagtatctcgtcaatactccactgaagacaccatactgtcctttttagactcttctgcagttgagatgggaccagataaactacatttagaaaaaaactctacttttgatgtgaagaatcgctgcgatccagaaaccataacatcagctggtagcagtcttctagattcaaatgtcacaaaagaccaagtgcgtacagagactgagcctattccagaaaacacgccaaccaaaaactgtgcttttcccacagaaggatttcagagggtctctgctgcccgcccaaatgatttggatggtaaaataatacaatatggacctggtccagacgaaactctagaacaggtacagaaggcaccctctgcaggtctggaggaagttgcacaacctgaatctgtggatgtaatcacatctcagtcagactcaccaactagagcaacagatgtaagcaatcaatttaagcatcaatttgttatgagccgccaccatgacaaagtgcctggtactatcagctatgaatcggagataacatctgtaaattcattccctgaaaaatgttccaagcaggaaaatattgcttcaggtatttcagccaaaagtgcctctgataacagcaaagcagaggagacccaaggaaatgtggatgaggcttcattgaaagaatcatcaccgagtgatgactccatcatttcaccacttagtgaagactcccaagctgaagcagagggtgtgttcgtgtctccaaacaaacctcgaacaactgaggatttatttgcagtcattcacagatccaagaggaaagtacttggaagaaaagattccggggacatgtctgttcgaagcaaatcgagagctcccctcagcagtagcagcagcagcgccagttccatcacttcacccagcagtaatgtgacaacccccaacagccagaggtctcctggtctcatataccgaaatgccaaaaagtccaacacatccaatgaagagtttaagctgttactgctcaagaaaggcagtcgctcagattctagttaccgcatgtctgccactgagatcctgaagagccccatactgcccaaacctcctggggagctcacagcagagtcccctcagagcaccgatgatgcccatcaggggtcacaaggggctgaggcattgtccccactctctccatgctccccacgagttaatgcagaaggcttttcctcgaagagctttgccacctcagcatcagcaagggttggacgttctcgggcccctcctgcagccagcagcagccgctacagtgtccgctgccggctgtacaatacgcccatgcaggcaatctccgagggagagacggaaaattctgacgggagcccacatgacgaccgttcctcccagagttcaacatagactgcctgtaccaggctgcctggcaaaggccaaaacccttactcacatgaggatggaggaacagaacagaggacttgggaaaagtctcaacttgatggggtagcatcactgctaagcaatgaatgaatttctaaatacagtatgtgctgggtaaacagaaagtggtttagacattcttgattagtttccatattttaagtagctgcagtctttcatgtttttctttagcatagtttgatttacgcaatctccttccttgtgaaaatagaggatacaaaattgtctaattttcatgacacctagaaaacgttttcccagagctgcctattcagaaactaaagccctcactgtcattattctttaagaagatgaaattactctggatgtttggtatttttttacattaaaacaaactaaagcaaaatttagaagaaagaactacacatatgtaaataccatatttttgataaaaatgtgtaaatagatttatcaatgatgagtggacatgtggtcaattatctactgcacaccaactgtttatagaatacacaaaaataaaatgtaataactgtattctgtgaataccattttcatatcaaatgccatatttaaatgtccaccaatatgatttctgagtggtaaacctcaaatatgaattttaaactggtgaactaaaggaaatcttgaggtcatatactgaaatatgaataaattaaaataatgaattcagatctaatcatttttatgacaaattgcagcaccaaacaaactaatagcaacccatggctgtgatttgttgtgtggtaatttggacagaatgaaaagcatgcttttgattttttttttaatcagtgagagaagtcatcattctcaacacaaagccctgaacaacagcatttgacagtgtcctttagattttaattttttcaatggattgctttaaagagaatgagtagggaaaatagtagttaattttaggttatgttttatattaggctactggggacataaacggtcataactaatgactgtaatcattaaactccttaaacagtttagaaattagctccaggttcttaaactaacaaaaataaaacctaagcatgccacagagctattgattaatcagtaagtacctgtaatgagttttcagtgaagctttctctctgtgctgatgagattcatgctacctaaaaattaacagaaatgacactgtgaacaatgtagttggaaaataggtatgtgtatatgcattatttatactcattgttaaactgggaatggggaacagctctggttcacaatactacatacaactgagtttttgtctggttttactatagtgtctgcttgatggcaaaaggggagggtggagggtgggagaggaaatgtcagggcatgtgctctgataaaataaaggcagggaaacaagctgaattacttgaaattacttgaattttcttgtcttaaaactgaaaaaaaaatgtagttacacgttaaaatctgcaaatggtttttacacctctgattttaacatgaacttatactaatgtttggaatcttatgtcagaaatataagcagctatgtacttagaataggttttgaatgggagaggtagaacagagagagaattaagaagggatctgacttataaaagactagaatgtgattagagtgatagaacataccaatgttaccaagaaattgacaagctgctggctttaagcttatgcaagtggtagttgggaaagtaggaggtgtggaagagggtttgcattttggattaattcatgcaaaatgaaggaggaagcctggtctaagaagatactgtctttcaatagaaatgatttctaaactgctacagattaagaatagataatctgattgctgttgttttgtttgtttggaaagaaaaaaaatgtctggcttcttctactatttgttttcactaccaaactgtgttactaaatttcttgtcatccttgtatgtaaaatgggtgctgggggtggaggggtataagaggagggagagtcagagagagtgtgtatgggtgtgtgtgagtgtgagtgtgtgtgtacgcacacacactggggatagataagctacctggtaaagggtttgaacatttacaaaatgtcacactttttcttaaaagaaaaatattttggggtttgaataaaatggaccaccatttctcattggaacccattaattaagaaaaccagcatggtttgacaccacatgggaacatgaataaatctgtctcatgatttgaaaagtacaccttgcaaagttttaaaaataaagtttttaggcaaatgcgataagaaaccgtcatttccagtcacagtaggcgatctttcgtaatttcataaaagcagttcgtttgcagtatggcttttgtgtagttaggggttttttaagtgtgaagaaaggtatgtgggctttaaaagtgattctaaatcttgaatagaaaacacatgaattggctttaataaaaatgtcacctttttattattgacattaagtaatggtaccatatattttttaaaatacatattgacttgaattgtgaggcaataagataccttctatatgtaatgatcacagaactaacccttataatatagttttacttattttgtttactctaaaaatctatagcagagtttctctattttatatttcatagatttaaaaaacccaaataaagatggatttaaaattcactgtggaaaagagtattgagttacaaactgagaagaaaaagcaggaagttccctaataatctggaatattctacatggcttgattacatagcaaacaagaccaagatttagggctgtctttaacatcactgccgtcttgaagcagggtacacacgttaggtattgtgaagaacatcaatccgaacttttcttctgttgtttgcactgatgcgattttttgttcttttatgtttatacaacgtatctatgttgtgtaggggaaattttttcattttttaaaaattctactttggttttgttgttgttttgatttgtttttggctaagtagaggacatggactagttgtagcaaacagaacatgctgtttgctcttgccaaaggtcagtgagtgagtgcatttgctgcagtggtggcacgtagagaactagatggtaataaagatttaaaactatgaagaaggttacagtgtaactattttggtactagaaccagttcatgctggccgaaacgacaatggtttatggacttgcatccattttgtatttttgtaatatttgtaaatatgaactttttaaattgctgcaaagatggtttcttttgtaagatgttttcaacgtttacattcaatccaagcctttgtatattttagagctgtgcaacactttaagtcttgtatttatttttagtaaaaatggtgacagtttcattgtgaacccctctcaaaaaaaatgtatcagaaaagtttgattacctagaaagtgtgtatagaaactgcaaataaa

SEQ ID NO: 13872 - DNA, 409 bp, Homo sapiens
  source 1..409: mol_type = unassigned DNA
tcatagatttggcctaaccagtatacactgtgttgtgtgcacgtttttaattttttctttttttgcatttcatgttcatagtttaacagcacccgttcgccctcccccactgaatgttgccacatgaccccgtggagtagaaagtcccatcccccagaggatgaagatacagatgtcatgttagggcagaggccgaaaaacccaatacacaatatcccttccacactggacaagcagaccaactggagcaaagcactacctctcccgacgccagaggagaagatgaaacaagatgcccaagtgatttcttcttgcattattcccatcaatgttactggagttggctttgacagagaggctagtatacgctgctctctggttcattcacaatcggtactacagcggagac

SEQ ID NO: 13873 - DNA, 8860 bp, Homo sapiens
  source 1..8860: mol_type = unassigned DNA
ctggatctggatagtgtgtctggagggtaaagcagactgggccagttcatgccattcccgaggctgacaggctacccaggtgcttgtgaggtcctctttgcagccatttcttagtaaaaatcctcctggttcctaacatctgcttccagcagaatttctgtttaactcatggagagttccatcctaggatccctgtgtacatgaagaagatgagagtgagttaaatgctgtgtttgggggaaggaagccttccttccttgatctcttggatgagttgcaaaaactcatcttgcatctgcagtttccctcccttaatactcattacctctatgatggtttctttaatgcgtatgctcacccctgggtgaaaccaaggaagagcaatgctttgaaagatgacaggcaatggagccggtaggtgtagggcatgataaggataccttggggacgggaccacaagggacagaggcagggcaaggtataggccgaagttcaggtggacagcaggggcggcgtgcagaactacagctctgaggccctgcggccagaaggctggagctgaggcagcctttccattcatctctgaggctttcctccacatttttcagaaacaggacccccatctccacccccaagcaggctagccaggggcttgtcagtgttgatgagcgactgtgccaagggtgaggaatgaaggtacggagaggaaattagctagtcataggtagacggttggtgtcttggagcctcccgtgcctcggctcaggggcaaaagttgtccctatcagtatcataaatgccaaacctttctccggccttgagttagttcttaatgtgaatgcagtagtctggacttccactccacccagactttactcctgtcctcttccccaccccagggttggccaaaagcacaacttaaagccactgatggacaacgccctgtttcttgcagccgtctccaacctggacatagagagtaagctgagtgtgtactaccgcgccccgtggcaccagcagcgcaacatcttcctcccagccacaaggccaccctgcgtggaggagctgcaccgccacgcccggcagagcctgcaagccctgcgcagagaacaccggagccggagcgatcgccgagagcaaagagcagctgcccccctttccattgcagctcctccactgccagcctaccctccagctcacagccagaggaggcgtgagtttaaggaccgtcactttttaacgtttaacagcacccgttcgccctcccccactgaatgttgccacatgaccccgtggagtagaaagtcccatcccccagaggatgaagatacagatgtcatgttagggcagaggccgaaaaacccaatacacaatatcccttccacactggacaagcagaccaactggagcaaagcactacctctcccgacgccagaggagaagatgaaacaagatgcccaagtgatttcttcttgcattattcccatcaatgttactggagttggctttgacagagaggctagtatacgctgctctctggttcattcacaatcggtactacagcggagacgaaaattgaggaggaggaaaaccatctcgggtatccccagaagagttcaacaagaaatagattctgatgaatcaccagtggccagggaaaggaatgtgattgtgcacacaaacccagacccctccaacactgtcaataggatatccggaaccagggactctgagtgccaaaccgaggatattctgattgctgccccatccagaaggagaatcagagctcaaaggggtcaaagcattgcagcttccctttctcattctgctggcaacatttctgccctagcagacaaaggtgacaccatgtttactcctgcagtgagcagccgcacaagatctcggagccttccccgggaaggtaatagaggtggggatgctgagcccaaagttggcgctaaaccctcagcatatgaagagggagagtcttttgtgggtgaccatgaaagaacccctaatgatttcagtgaggctccaagcagcccgagtgcccaggaccaccagcctactttgggcctggcctgctctcaacatcttcacagcccccagcacaaattaagtgagaggggaaggtcacgtctgtcccgaatggctgctgactctggcagctgtgacatctcctccaactcagacacgtttgggagccccatccactgcatctccacggctggcgtcctccttagcagccacatggaccagaaagatgaccaccagtcatccagtggcaactggagtgggagcagctccacgtgcccctcgcagacctcagaaaccatccctcctgcagcttctcctccactcactggctcttcacactgtgactcggagttgtcactaaacacagcccctcatgccaatgaggatgccagtgttttcgtgacagagcaatacaatgaccacttggataaagtgagaggccatcgggcaaactcctttacctccactgttgcagacctgctggatgatcccaacaacagcaacacaagtgacagtgagtggaattacctacaccaccaccatgatgcctcctgccgccaggattttagtcctgagcgtcccaaggcagacagcctgggctgcccaagcttcacaagcatggccacttatgacagctttctggaaaagtctccatcagacaaagcggacactagctctcacttttcagtagacacggaaggatactatacctccatgcactttgactgtggtctcaaaggtaataagagctatgtctgtcactatgcagccctgggcccagagaatggccagggtgtaggggcttcccctggtcttccagattgtgcctggcaggactacttagaccacaagaggcagggaagaccaagcatctctttcaggaaaccaaaggcaaagccgaccccacctaaacgtagctcatcattgaggaagtctgatggaaacgcagatatttctgagaagaaagaaccaaagataagcagtggtcagcacctgcctcacagttccagggaaatgaagctgcctcttgatttcgccaacacgccttctcgaatggaaaacgccaatcttcccaccaagcaggaaccttcttggataaaccagagtgaacaaggcattaaggaacctcagttagatgcttcggatattccaccattcaaagatgaagttgccgaatccacacactatgcagacctctggctcctaaatgacttgaaaacaaatgatccttatagatctctatctaattcaagcaccgctacgggtaccacagtcattgaatgcatcaaatctccagagagctctgaatcccaaacatcacaatcagaatcaagagccaccaccccatctcttccttctgttgacaatgagtttaaactggcttcaccagaaaagctggctggcttggcatctccatcaagtggctattcaagccagtctgaaacgccaacatcctctttccctacagctttcttttcaggtccattgtctcccggaggtagcaaaagaaaacctaaagtcccagaaagaaaatcctcactacagcaaccctctttaaaagatggaactatatcactgagtaaagaccttgaacttccaattatacctcctacccatcttgatctaagtgctcttcataatgtcttgaacaaaccattccaccaccgtcatccactgcatgtttttactcataataagcagaacacagtaggagaaacactgaggtcgaatcctccaccgtcccttgcaattacaccaacgatcctgaaatctgttaaccttaggtccatcaacaagtctgaagaagttaagcaaaaagaagaaaacaatacagatctcccttatttagaggaaagcacactcacaacggctgccttgtctccaagtaagattaggccgcatacagcaaataaatcagtatctcgtcaatactccactgaagacaccatactgtcctttttagactcttctgcagttgagatgggaccagataaactacatttagaaaaaaactctacttttgatgtgaagaatcgctgcgatccagaaaccataacatcagctggtagcagtcttctagattcaaatgtcacaaaagaccaagtgcgtacagagactgagcctattccagaaaacacgccaaccaaaaactgtgcttttcccacagaaggatttcagagggtctctgctgcccgcccaaatgatttggatggtaaaataatacaatatggacctggtccagacgaaactctagaacaggtacagaaggcaccctctgcaggtctggaggaagttgcacaacctgaatctgtggatgtaatcacatctcagtcagactcaccaactagagcaacagatgtaagcaatcaatttaagcatcaatttgttatgagccgccaccatgacaaagtgcctggtactatcagctatgaatcggagataacatctgtaaattcattccctgaaaaatgttccaagcaggaaaatattgcttcaggtatttcagccaaaagtgcctctgataacagcaaagcagaggagacccaaggaaatgtggatgaggcttcattgaaagaatcatcaccgagtgatgactccatcatttcaccacttagtgaagactcccaagctgaagcagagggtgtgttcgtgtctccaaacaaacctcgaacaactgaggatttatttgcagtcattcacagatccaagaggaaagtacttggaagaaaagattccggggacatgtctgttcgaagcaaatcgagagctcccctcagcagtagcagcagcagcgccagttccatcacttcacccagcagtaatgtgacaacccccaacagccagaggtctcctggtctcatataccgaaatgccaaaaagtccaacacatccaatgaagagtttaagctgttactgctcaagaaaggcagtcgctcagattctagttaccgcatgtctgccactgagatcctgaagagccccatactgcccaaacctcctggggagctcacagcagagtcccctcagagcaccgatgatgcccatcaggggtcacaaggggctgaggcattgtccccactctctccatgctccccacgagttaatgcagaaggcttttcctcgaagagctttgccacctcagcatcagcaagggttggacgttctcgggcccctcctgcagccagcagcagccgctacagtgtccgctgccggctgtacaatacgcccatgcaggcaatctccgagggagagacggaaaattctgacgggagcccacatgacgaccgttcctcccagagttcaacatagactgcctgtaccaggctgcctggcaaaggccaaaacccttactcacatgaggatggaggaacagaacagaggacttgggaaaagtctcaacttgatggggtagcatcactgctaagcaatgaatgaatttctaaatacagtatgtgctgggtaaacagaaagtggtttagacattcttgattagtttccatattttaagtagctgcagtctttcatgtttttctttagcatagtttgatttacgcaatctccttccttgtgaaaatagaggatacaaaattgtctaattttcatgacacctagaaaacgttttcccagagctgcctattcagaaactaaagccctcactgtcattattctttaagaagatgaaattactctggatgtttggtatttttttacattaaaacaaactaaagcaaaatttagaagaaagaactacacatatgtaaataccatatttttgataaaaatgtgtaaatagatttatcaatgatgagtggacatgtggtcaattatctactgcacaccaactgtttatagaatacacaaaaataaaatgtaataactgtattctgtgaataccattttcatatcaaatgccatatttaaatgtccaccaatatgatttctgagtggtaaacctcaaatatgaattttaaactggtgaactaaaggaaatcttgaggtcatatactgaaatatgaataaattaaaataatgaattcagatctaatcatttttatgacaaattgcagcaccaaacaaactaatagcaacccatggctgtgatttgttgtgtggtaatttggacagaatgaaaagcatgcttttgattttttttttaatcagtgagagaagtcatcattctcaacacaaagccctgaacaacagcatttgacagtgtcctttagattttaattttttcaatggattgctttaaagagaatgagtagggaaaatagtagttaattttaggttatgttttatattaggctactggggacataaacggtcataactaatgactgtaatcattaaactccttaaacagtttagaaattagctccaggttcttaaactaacaaaaataaaacctaagcatgccacagagctattgattaatcagtaagtacctgtaatgagttttcagtgaagctttctctctgtgctgatgagattcatgctacctaaaaattaacagaaatgacactgtgaacaatgtagttggaaaataggtatgtgtatatgcattatttatactcattgttaaactgggaatggggaacagctctggttcacaatactacatacaactgagtttttgtctggttttactatagtgtctgcttgatggcaaaaggggagggtggagggtgggagaggaaatgtcagggcatgtgctctgataaaataaaggcagggaaacaagctgaattacttgaaattacttgaattttcttgtcttaaaactgaaaaaaaaatgtagttacacgttaaaatctgcaaatggtttttacacctctgattttaacatgaacttatactaatgtttggaatcttatgtcagaaatataagcagctatgtacttagaataggttttgaatgggagaggtagaacagagagagaattaagaagggatctgacttataaaagactagaatgtgattagagtgatagaacataccaatgttaccaagaaattgacaagctgctggctttaagcttatgcaagtggtagttgggaaagtaggaggtgtggaagagggtttgcattttggattaattcatgcaaaatgaaggaggaagcctggtctaagaagatactgtctttcaatagaaatgatttctaaactgctacagattaagaatagataatctgattgctgttgttttgtttgtttggaaagaaaaaaaatgtctggcttcttctactatttgttttcactaccaaactgtgttactaaatttcttgtcatccttgtatgtaaaatgggtgctgggggtggaggggtataagaggagggagagtcagagagagtgtgtatgggtgtgtgtgagtgtgagtgtgtgtgtacgcacacacactggggatagataagctacctggtaaagggtttgaacatttacaaaatgtcacactttttcttaaaagaaaaatattttggggtttgaataaaatggaccaccatttctcattggaacccattaattaagaaaaccagcatggtttgacaccacatgggaacatgaataaatctgtctcatgatttgaaaagtacaccttgcaaagttttaaaaataaagtttttaggcaaatgcgataagaaaccgtcatttccagtcacagtaggcgatctttcgtaatttcataaaagcagttcgtttgcagtatggcttttgtgtagttaggggttttttaagtgtgaagaaaggtatgtgggctttaaaagtgattctaaatcttgaatagaaaacacatgaattggctttaataaaaatgtcacctttttattattgacattaagtaatggtaccatatattttttaaaatacatattgacttgaattgtgaggcaataagataccttctatatgtaatgatcacagaactaacccttataatatagttttacttattttgtttactctaaaaatctatagcagagtttctctattttatatttcatagatttaaaaaacccaaataaagatggatttaaaattcactgtggaaaagagtattgagttacaaactgagaagaaaaagcaggaagttccctaataatctggaatattctacatggcttgattacatagcaaacaagaccaagatttagggctgtctttaacatcactgccgtcttgaagcagggtacacacgttaggtattgtgaagaacatcaatccgaacttttcttctgttgtttgcactgatgcgattttttgttcttttatgtttatacaacgtatctatgttgtgtaggggaaattttttcattttttaaaaattctactttggttttgttgttgttttgatttgtttttggctaagtagaggacatggactagttgtagcaaacagaacatgctgtttgctcttgccaaaggtcagtgagtgagtgcatttgctgcagtggtggcacgtagagaactagatggtaataaagatttaaaactatgaagaaggttacagtgtaactattttggtactagaaccagttcatgctggccgaaacgacaatggtttatggacttgcatccattttgtatttttgtaatatttgtaaatatgaactttttaaattgctgcaaagatggtttcttttgtaagatgttttcaacgtttacattcaatccaagcctttgtatattttagagctgtgcaacactttaagtcttgtatttatttttagtaaaaatggtgacagtttcattgtgaacccctctcaaaaaaaatgtatcagaaaagtttgattacctagaaagtgtgtatagaaactgcaaataaa

SEQ ID NO: 13874 - DNA, 8163 bp, Homo sapiens
  source 1..8163: mol_type = unassigned DNA
ctgatttgccattcaagtgaaccctggagggattagcagccagcctagcacttgggtgagaccatctccccctccaggggggagtcctagatgcagcacagaggttctgtgaaaatctgccatcctccttgcagaaggttgccctctctcgccctccatcccccccgccgtgcttgctgacttaagcagatcagctttcagctctctggcattcagagacgtctttgcataaaagaaaaggcccttccttaaggagcagagcgggaatccaagcatggctctggcctgctgcatgcccaagaatgcagccgtctccaacctggacatagagagtaagctgagtgtgtactaccgcgccccgtggcaccagcagcgcaacatcttcctcccagccacaaggccaccctgcgtggaggagctgcaccgccacgcccggcagagcctgcaagccctgcgcagagaacaccggagccggagcgatcgccgagagcaaagagcagctgcccccctttccattgcagctcctccactgccagcctaccctccagctcacagccagaggaggcgtgagtttaaggaccgtcactttttaacgtcccatcccccagaggatgaagatacagatgtcatgttagggcagaggccgaaaaacccaatacacaatatcccttccacactggacaagcagaccaactggagcaaagcactacctctcccgacgccagaggagaagatgaaacaagatgcccaagtgatttcttcttgcattattcccatcaatgttactggagttggctttgacagagaggctagtatacgctgctctctggttcattcacaatcggtactacagcggagacgaaaattgaggaggaggaaaaccatctcgggtatccccagaagagttcaacaagaaatagattctgatgaatcaccagtggccagggaaaggaatgtgattgtgcacacaaacccagacccctccaacactgtcaataggatatccggaaccagggactctgagtgccaaaccgaggatattctgattgctgccccatccagaaggagaatcagagctcaaaggggtcaaagcattgcagcttccctttctcattctgctggcaacatttctgccctagcagacaaaggtgacaccatgtttactcctgcagtgagcagccgcacaagatctcggagccttccccgggaaggtaatagaggtggggatgctgagcccaaagttggcgctaaaccctcagcatatgaagagggagagtcttttgtgggtgaccatgaaagaacccctaatgatttcagtgaggctccaagcagcccgagtgcccaggaccaccagcctactttgggcctggcctgctctcaacatcttcacagcccccagcacaaattaagtgagaggggaaggtcacgtctgtcccgaatggctgctgactctggcagctgtgacatctcctccaactcagacacgtttgggagccccatccactgcatctccacggctggcgtcctccttagcagccacatggaccagaaagatgaccaccagtcatccagtggcaactggagtgggagcagctccacgtgcccctcgcagacctcagaaaccatccctcctgcagcttctcctccactcactggctcttcacactgtgactcggagttgtcactaaacacagcccctcatgccaatgaggatgccagtgttttcgtgacagagcaatacaatgaccacttggataaagtgagaggccatcgggcaaactcctttacctccactgttgcagacctgctggatgatcccaacaacagcaacacaagtgacagtgagtggaattacctacaccaccaccatgatgcctcctgccgccaggattttagtcctgagcgtcccaaggcagacagcctgggctgcccaagcttcacaagcatggccacttatgacagctttctggaaaagtctccatcagacaaagcggacactagctctcacttttcagtagacacggaaggatactatacctccatgcactttgactgtggtctcaaaggtaataagagctatgtctgtcactatgcagccctgggcccagagaatggccagggtgtaggggcttcccctggtcttccagattgtgcctggcaggactacttagaccacaagaggcagggaagaccaagcatctctttcaggaaaccaaaggcaaagccgaccccacctaaacgtagctcatcattgaggaagtctgatggaaacgcagatatttctgagaagaaagaaccaaagataagcagtggtcagcacctgcctcacagttccagggaaatgaagctgcctcttgatttcgccaacacgccttctcgaatggaaaacgccaatcttcccaccaagcaggaaccttcttggataaaccagagtgaacaaggcattaaggaacctcagttagatgcttcggatattccaccattcaaagatgaagttgccgaatccacacactatgcagacctctggctcctaaatgacttgaaaacaaatgatccttatagatctctatctaattcaagcaccgctacgggtaccacagtcattgaatgcatcaaatctccagagagctctgaatcccaaacatcacaatcagaatcaagagccaccaccccatctcttccttctgttgacaatgagtttaaactggcttcaccagaaaagctggctggcttggcatctccatcaagtggctattcaagccagtctgaaacgccaacatcctctttccctacagctttcttttcaggtccattgtctcccggaggtagcaaaagaaaacctaaagtcccagaaagaaaatcctcactacagcaaccctctttaaaagatggaactatatcactgagtaaagaccttgaacttccaattatacctcctacccatcttgatctaagtgctcttcataatgtcttgaacaaaccattccaccaccgtcatccactgcatgtttttactcataataagcagaacacagtaggagaaacactgaggtcgaatcctccaccgtcccttgcaattacaccaacgatcctgaaatctgttaaccttaggtccatcaacaagtctgaagaagttaagcaaaaagaagaaaacaatacagatctcccttatttagaggaaagcacactcacaacggctgccttgtctccaagtaagattaggccgcatacagcaaataaatcagtatctcgtcaatactccactgaagacaccatactgtcctttttagactcttctgcagttgagatgggaccagataaactacatttagaaaaaaactctacttttgatgtgaagaatcgctgcgatccagaaaccataacatcagctggtagcagtcttctagattcaaatgtcacaaaagaccaagtgcgtacagagactgagcctattccagaaaacacgccaaccaaaaactgtgcttttcccacagaaggatttcagagggtctctgctgcccgcccaaatgatttggatggtaaaataatacaatatggacctggtccagacgaaactctagaacaggtacagaaggcaccctctgcaggtctggaggaagttgcacaacctgaatctgtggatgtaatcacatctcagtcagactcaccaactagagcaacagatgtaagcaatcaatttaagcatcaatttgttatgagccgccaccatgacaaagtgcctggtactatcagctatgaatcggagataacatctgtaaattcattccctgaaaaatgttccaagcaggaaaatattgcttcaggtatttcagccaaaagtgcctctgataacagcaaagcagaggagacccaaggaaatgtggatgaggcttcattgaaagaatcatcaccgagtgatgactccatcatttcaccacttagtgaagactcccaagctgaagcagagggtgtgttcgtgtctccaaacaaacctcgaacaactgaggatttatttgcagtcattcacagatccaagaggaaagtacttggaagaaaagattccggggacatgtctgttcgaagcaaatcgagagctcccctcagcagtagcagcagcagcgccagttccatcacttcacccagcagtaatgtgacaacccccaacagccagaggtctcctggtctcatataccgaaatgccaaaaagtccaacacatccaatgaagagtttaagctgttactgctcaagaaaggcagtcgctcagattctagttaccgcatgtctgccactgagatcctgaagagccccatactgcccaaacctcctggggagctcacagcagagtcccctcagagcaccgatgatgcccatcaggggtcacaaggggctgaggcattgtccccactctctccatgctccccacgagttaatgcagaaggcttttcctcgaagagctttgccacctcagcatcagcaagggttggacgttctcgggcccctcctgcagccagcagcagccgctacagtgtccgctgccggctgtacaatacgcccatgcaggcaatctccgagggagagacggaaaattctgacgggagcccacatgacgaccgttcctcccagagttcaacatagactgcctgtaccaggctgcctggcaaaggccaaaacccttactcacatgaggatggaggaacagaacagaggacttgggaaaagtctcaacttgatggggtagcatcactgctaagcaatgaatgaatttctaaatacagtatgtgctgggtaaacagaaagtggtttagacattcttgattagtttccatattttaagtagctgcagtctttcatgtttttctttagcatagtttgatttacgcaatctccttccttgtgaaaatagaggatacaaaattgtctaattttcatgacacctagaaaacgttttcccagagctgcctattcagaaactaaagccctcactgtcattattctttaagaagatgaaattactctggatgtttggtatttttttacattaaaacaaactaaagcaaaatttagaagaaagaactacacatatgtaaataccatatttttgataaaaatgtgtaaatagatttatcaatgatgagtggacatgtggtcaattatctactgcacaccaactgtttatagaatacacaaaaataaaatgtaataactgtattctgtgaataccattttcatatcaaatgccatatttaaatgtccaccaatatgatttctgagtggtaaacctcaaatatgaattttaaactggtgaactaaaggaaatcttgaggtcatatactgaaatatgaataaattaaaataatgaattcagatctaatcatttttatgacaaattgcagcaccaaacaaactaatagcaacccatggctgtgatttgttgtgtggtaatttggacagaatgaaaagcatgcttttgattttttttttaatcagtgagagaagtcatcattctcaacacaaagccctgaacaacagcatttgacagtgtcctttagattttaattttttcaatggattgctttaaagagaatgagtagggaaaatagtagttaattttaggttatgttttatattaggctactggggacataaacggtcataactaatgactgtaatcattaaactccttaaacagtttagaaattagctccaggttcttaaactaacaaaaataaaacctaagcatgccacagagctattgattaatcagtaagtacctgtaatgagttttcagtgaagctttctctctgtgctgatgagattcatgctacctaaaaattaacagaaatgacactgtgaacaatgtagttggaaaataggtatgtgtatatgcattatttatactcattgttaaactgggaatggggaacagctctggttcacaatactacatacaactgagtttttgtctggttttactatagtgtctgcttgatggcaaaaggggagggtggagggtgggagaggaaatgtcagggcatgtgctctgataaaataaaggcagggaaacaagctgaattacttgaaattacttgaattttcttgtcttaaaactgaaaaaaaaatgtagttacacgttaaaatctgcaaatggtttttacacctctgattttaacatgaacttatactaatgtttggaatcttatgtcagaaatataagcagctatgtacttagaataggttttgaatgggagaggtagaacagagagagaattaagaagggatctgacttataaaagactagaatgtgattagagtgatagaacataccaatgttaccaagaaattgacaagctgctggctttaagcttatgcaagtggtagttgggaaagtaggaggtgtggaagagggtttgcattttggattaattcatgcaaaatgaaggaggaagcctggtctaagaagatactgtctttcaatagaaatgatttctaaactgctacagattaagaatagataatctgattgctgttgttttgtttgtttggaaagaaaaaaaatgtctggcttcttctactatttgttttcactaccaaactgtgttactaaatttcttgtcatccttgtatgtaaaatgggtgctgggggtggaggggtataagaggagggagagtcagagagagtgtgtatgggtgtgtgtgagtgtgagtgtgtgtgtacgcacacacactggggatagataagctacctggtaaagggtttgaacatttacaaaatgtcacactttttcttaaaagaaaaatattttggggtttgaataaaatggaccaccatttctcattggaacccattaattaagaaaaccagcatggtttgacaccacatgggaacatgaataaatctgtctcatgatttgaaaagtacaccttgcaaagttttaaaaataaagtttttaggcaaatgcgataagaaaccgtcatttccagtcacagtaggcgatctttcgtaatttcataaaagcagttcgtttgcagtatggcttttgtgtagttaggggttttttaagtgtgaagaaaggtatgtgggctttaaaagtgattctaaatcttgaatagaaaacacatgaattggctttaataaaaatgtcacctttttattattgacattaagtaatggtaccatatattttttaaaatacatattgacttgaattgtgaggcaataagataccttctatatgtaatgatcacagaactaacccttataatatagttttacttattttgtttactctaaaaatctatagcagagtttctctattttatatttcatagatttaaaaaacccaaataaagatggatttaaaattcactgtggaaaagagtattgagttacaaactgagaagaaaaagcaggaagttccctaataatctggaatattctacatggcttgattacatagcaaacaagaccaagatttagggctgtctttaacatcactgccgtcttgaagcagggtacacacgttaggtattgtgaagaacatcaatccgaacttttcttctgttgtttgcactgatgcgattttttgttcttttatgtttatacaacgtatctatgttgtgtaggggaaattttttcattttttaaaaattctactttggttttgttgttgttttgatttgtttttggctaagtagaggacatggactagttgtagcaaacagaacatgctgtttgctcttgccaaaggtcagtgagtgagtgcatttgctgcagtggtggcacgtagagaactagatggtaataaagatttaaaactatgaagaaggttacagtgtaactattttggtactagaaccagttcatgctggccgaaacgacaatggtttatggacttgcatccattttgtatttttgtaatatttgtaaatatgaactttttaaattgctgcaaagatggtttcttttgtaagatgttttcaacgtttacattcaatccaagcctttgtatattttagagctgtgcaacactttaagtcttgtatttatttttagtaaaaatggtgacagtttcattgtgaacccctctcaaaaaaaatgtatcagaaaagtttgattacctagaaagtgtgtatagaaactgcaaataaacgtgactgcaatt

SEQ ID NO: 13875 - DNA, 7500 bp, Homo sapiens
  source 1..7500: mol_type = unassigned DNA
gagcgcttcacagacgggaaggagagcaagtgggcggtttatgattctgccctgtgctggggcgagtgagctgagctctttgatttctcccaagtaaccgtgtgggtgaactgtaaactgggtgcctggcttgaccctgactctttttctctagggtgaggagttacttcaccagggcagctggctttctgccctggtggggaaagatgcccaggagaggagtaggattacaatttgggatgctagggacacgccaaagagtcggggtgccttggctttgtgttttgcaaagtcctgacaagtactcctgaaatgaacacgctgcttcattttttaaattatacttttatttgtttattattttttggccgtggatatcgcggatctagaaacggagtccacaatgtggctagggtaaaacatttttcttttctttcttaacccctccttttccctttctttttaattgggtgacacagaagccgtctttttggataatgcggtgcctgactgtcagcgttgtctaagagggaaacagcaggctcgtggagaggacctgggccaacgcaaaaaacccagcgttttgtttgctgggctgttctttgtctctagttgattttgaaaagaagatgaaaaaggaaggctcttcaggttccttcagactccagccgaatacaggttctctctcacgtgctgtaagttggataaatttctcctccttgtccaggcagacaaagaggctgtttcgcagtgatggagagctctcggtttgtgggcagcaggtggaagtggatgacgaaaactggatatacagagcccagcccagaaaagcggtttccaacctagatgaggaaagccgatggacagtccactacactgccccgtggcaccagcaggagaatgtgttccttcccaccacaagacccccctgtgttgaggacctgcaccgccaagccaagctcaacctcaaatcagtactgagggaatgcgataagttgcggcatgatggctaccgcagttctcagtactactctcagggacccacctttgcggccaacgccagcccattctgtgatgattaccaagatgaagatgaagaaacagatcaaaagtgttctctgtcttcatcagaagaagaaagatttatttccatcaggagacctaaaacaccagcctcaagtgacttctccgaccttaatactcagacgaactggaccaagtcgcttccactgccaacaccagaagagaagatgcgacagcaagcccaaacagtccaggctgacgtggtgcctattaacataactgcatcaggcactggccaagatgatgctgatggccactcagtgtacacccctgatcactactctacactaggaaggttcaatagctgtcggtctgctgggcagcgctcagaaaccagggactccagctgtcagacggaggatgtgaaggtcgtaccaccttccatgaggagaatcagggcacagaaggggcaaggcattgctgcccagatgggccacttctcaggttcctctggcaacatgtctgtgctgagcgattctgcagggatcgtattcccttcccgccttgacagtgatgctggcttccatagtcttccgcgttctggagcaagggcaaacattcagtcccttgagccgaggctgggtgccctcggccctgcaggagacatgaatggcactttcctctaccagagaggtcacccacaagcagatgaaaacttaggccatttaggaggtgcctcagggactggaacacttttgagacccaaatcccaggagttgagacacttcgagagtgaaaatataatgagcccagcgtgtgtggtttctcctcatgcaacctactccaccagcatcatcccaaatgccacactgtcttcctcttccgaggtcatcgctattcccactgctcagagtgcgggacagcgggaaagtaaaagttctggctcatcacatgcaaggataaaatccagagaccacctcatctccaggcatgctgtgaaaggtgatcctcagtctcccggtcgccactggaatgagggccatgccaccattctttcacaggacttagaccctcattcccctggtgaacccgcactgttgtccctctgtgactcagccgtccctctaaatgctccagcaaatagggagaatgggtcccaagctatgccgtataattgtagaaacaacctggccttcccagcccacccccaagatgtggatggcaagagtgaatctagttattcagggggcggagggcacagcagctcggagccctgggaatacaaatcctcaggtaatggaagggcatcccccctgaagccgcatttagcaactcctggctattccactcccacaagtaacatgagcagctgcagtttggaccaaacgtccaacaaagaggatgctgggtcgctgtattctgaggaccacgatggctactgtgcatctgtgcacactgactctggacatggatctgggaatctgtgcaatagcagtgatggctttgggaaccccaggcacagcgtgatcaatgtttttgttggaagagctcagaaaaaccaaggggaccggtccaattaccaggataaatccctatcaagaaacatctctttgaagaaagcaaagaagcctcccctgccaccctcccggacagactccctccgcaggattcccaagaagagcagccagtgcaacgggcaggtgctcaacgagagcctgatcgccacactccagcactcgctgcagctgagcctcccaggcaagagtggcagctcgccctcccagagcccctgcagtgacttggaagagccctggctgccccgctcccggagccagagcacagttagtgctggcagcagcatgacttccgccaccacccccaatgtctactccctgtgcggggccacgccatcgcagagtgacacaagcagcgtcaagtcagagtacacggacccctggggttattacattgactacacgggcatgcaggaagatccggggaacccggcagggggctgttcaaccagcagtggggtgcccactgggaacgggccagtccgccatgtccaagaagggtccagagccacaatgccccaagtgcccggtggttcagtcaaaccaaagatcatgtcaccagagaagtcacacagagtcatttctccatccagtgggtattccagccagtcgaatacacccacagcactcacccctgtgcctgtgtttttaaaatcagtgtcaccagcaaacgggaaggggaagcccaagcccaaggtaccagaaaggaagtcctctctgatatcttcagtatccatttcctcatcgtccacttctctttcttctagtacttctactgaaggaagtggcactatgaagaagctggatccagccgtgggctctcccccggctcctcctcctcctcctgttccctctcctccattcccttgtcctgcagacaggtctcctttccttcctcccccacctcctgtcacagattgctcccagggctctcctctgcctcactctcctgtgttcccccctccgccgccagaagctctcattcctttctgctccccacctgattggtgcctttctcctccccgccctgcactgagccccattcttccagattcacctgtgtccttgccattgcccccacctctcttaccttcctcggaacccccacctgccccacctcttgaccccaaattcatgaaagacaccaggccgcctttcacaaattctggccagccagaatcctcccggggatccttgaggccgccttctaccaaggaggagaccagcaggccccccatgcccctgataaccacggaagcattgcagatggtgcagttgaggcccgtgagaaagaactcaggcgctgaggcggcacagttgtctgaacgaacagctcaggaacaacgaactccagttgctccacagtaccacttaaagccatctgctttcctgaaatcccgaaatagcacaaatgaaatggagagtgaaagccagcctgcctctgtgacaagctcgcttccgacgcctgccaagagctcgagtcagggtgaccatggcagtgcggctgagcgtggtggccctgtgagccgcagccctggagctccaagcgctggggaggcagaggctcggcccagccccagcaccaccccactcccagactcttcacccagcaggaagccaccccccatttccaagaagcccaaactgttcctggtggtaccacctccgcagaaagattttgcagtggagcccgcagagaacgtgagcgaagccctccgagctgtgcccagccccacgacgggagaggagggctctgtgcacagcagggaggcaaaagagagttctgcagcccaagctggctctcatgccacgcaccctggcacctcggttcttgagggaggagctgcaggatccatgtctcccagcagagtggaagccaatgtccccatggttcagcctgatgtctcaccagcccccaagcaggaggagccagccgagaacagtgcggatactgggggcgatggggagagctgcctatctcaacaggacggagcagctggggtgccggagaccaacgcagccggttcatcctcagaggcctgtgacttcctcaaggaagacgggaatgatgaggtaatgacccccagtcgacccaggaccacagaagacctttttgcagctattcacagatccaaaaggaaagtcctcggccgtagagattcagatgatgaccactcccgaaaccattctccctccccgcccgtgacacccaccggcgctgccccaagcctggcctctccaaagcaagtggggtcgattcagagaagcatccgaaagagcagcaccagcagtgacaacttcaaagctctgctgctgaaaaagggcagtcgttcagacaccagcgcccgcatgtctgcagcagagatgctcaagaacacagaccctagattccagaggtcgaggtcagagccttccccagatgcccccgagagcccgtcaagctgctccccaagcaagaacagaagggcgcaggaggagtgggccaagaacgaaggcttgatgcctcggagtctgtccttttccggccccaggtacggccgcagccgaacgccgccttctgccgccagcagcaggtacagcatgcggaaccggatccagagcagccccatgaccgtcatctcggagggagaaggggaagccgtggagcctgtggacagcatagcccgcggggctctgggcgctgcggagggatgttccctggacggactggcgagggaggagatggacgagggcggcctgctctgtggggaggggcctgccgcctccctgcagccccaggcccccggccctgtggatgggacagccagtgcagagggcagagagccctccccacagtgtggcggttctctgagcgaggagagttagggccaagaacgtaactctcccaggtgacacggggggagacgagcaatgcagcactctaggaagcctgctaggcgcccttccctggctcacccggggagcccactctgcttctgtgctgtgggccccggggttgccagccctgcagtgtgagtgaacggttatttaggactcacctggcacttgccctgtggcttaagaacaagtagaagcttaaacttctgaaagtgcttcccggggaagattttttttttttttttttttttttgctaaatgctgggtgtgtatgtgtgcattttccacactttttaatttttaaaaaatacacatatacacaaacaacatgtacagaaatagaagaaagcaagccagacttaagcttggtagagtaacggagtcctctggtctaggcggtaattgctttcagagaattacgtttatagaaatcagcgagttttgtaagaaaggagaagatgttacttcaagaaagaggcagtagagttgctggttcttaatgcacagaacacacagatatatgcacacgtgtgctgctgaggtgaggcaggtctggtgagcacggagaggctgggaaggggctaagtgactaattggttcaggtacttttttctgggggaggtagactttgcttcttttttgtaaaaatgacaaacgtagaagtggcaatgctgtaacctggtgcctgctgctgtgcagccacatacacacaattgtagcctgatttttagaagtgtgggtaattttttaatgaatttcctccttgagtagcagctgaggtcattgacaactgaagtgatggtgtggacatagagagaggggaagggttggaaaggagtaagtgatacactgctggaatttgtttcctgcctatgaaataaaattatttttcagaattaaatttgaaaacttgcactacagaactatgggtggagcttttccttttacaacagtttttttttttttttttttttaaccagagtttaaacttccattaggcaatttcctgtcacttgaaatgtcaacatttgctaacttttggatatccttttggttacaccaaagaaaaagttatggctatttttttttccttgaactgcctacagtatcatgtcctaattcagaaagatttatcaaaatctattatatattatcttactttgaagaaaatgctgaatagctcttgttagtcaaataaactgataaaaattggtagggcctggctatcaattagccctgggaaatgaatttttagattaaaaaggtttttttgcatcatttggtttgtgcatttttatatttgtttataaataattgagttgctaattacttctaatcttctccaatcagattttcaacaattttagacatgggacacacgtgtgtgaagtctttattttaatgtaataatctcattacccccacccttactcccttaacttccatgtacttagactcctttatttgttaaataaactagagtattgtcttcttcattagaaggacctaggatgacaatgcggagagtcttggtctgaatctagtgcgactaccacctgccagcttttggggggtatggaaatactatctaaaagttggactgcatgggtcaaatcattatgagacttataaactaaaactttagatacccatatagaaatgtctttgaggcaaaaacaaacctaaagaatgaaggctctttcccttctctgaaaaaaacaaaacactgctcttcacacaaccggaagtcaagaccagagatttggagcaattgtctactaatttggcacaaagatcgtttctttagaaaagtggcattggcttttgaatatgaaatcttctcatagctgcctaaaaaagactagaatgtatatggatatcagaaacctttaataatacataatttatgcaaagataagataaagcaacataacactaattataaaactatttttaaatccccatttttaatgaaaaatatacatttgtatttaatttcctttgaataaaacaattgtaaagtaaa

SEQ ID NO: 13876 - DNA, 6535 bp, Homo sapiens
  source 1..6535: mol_type = unassigned DNA
aggttcaaggactgttaatggtttgtaactgcctgacaataaactcaacctcagttacatcagcctgggcagatgtctaaggatatgagaccgggggaagaaaaagttagaatctgtagcagaaggacgaagcttgccacctgcctactgggctgagcttttaatgtgatttacatttctaagctctatgtaggtgccctggaaatggtggtcttcattaatgcaaagattaagtctttaattaaactttttaagaagaaaacggtttccaacctagatgaggaaagccgatggacagtccactacactgccccgtggcaccagcaggagaatgtgttccttcccaccacaagacccccctgtgttgaggacctgcaccgccaagccaagctcaacctcaaatcagtactgagggaatgcgataagttgcggcatgatggctaccgcagttctcagtactactctcagggacccacctttgcggccaacgccagcccattctgtgatgattaccaagatgaagatgaagaaacagatcaaaagtgttctctgtcttcatcagaagaagaaagatttatttccatcaggagacctaaaacaccagcctcaagtgacttctccgaccttaatactcagacgaactggaccaagtcgcttccactgccaacaccagaagagaagatgcgacagcaagcccaaacagtccaggctgacgtggtgcctattaacataactggggagaatttcgatcgccaggccagccttcggcggtctctaatttacacagacactctggtaagacgaccgaagaaagtcaaaaggagaaagactattacaggagtccctgacaacatacagaaggagctagcatcaggcactggccaagatgatgctgatggccactcagtgtacacccctgatcactactctacactaggaaggttcaatagctgtcggtctgctgggcagcgctcagaaaccagggactccagctgtcagacggaggatgtgaaggtcgtaccaccttccatgaggagaatcagggcacagaaggggcaaggcattgctgcccagatgggccacttctcaggttcctctggcaacatgtctgtgctgagcgattctgcagggatcgtattcccttcccgccttgacagtgatgctggcttccatagtcttccgcgttctggagcaagggcaaacattcagtcccttgagccgaggctgggtgccctcggccctgcaggagacatgaatggcactttcctctaccagagaggtcacccacaagcagatgaaaacttaggccatttaggaggtgcctcagggactggaacacttttgagacccaaatcccaggagttgagacacttcgagagtgaaaatataatgagcccagcgtgtgtggtttctcctcatgcaacctactccaccagcatcatcccaaatgccacactgtcttcctcttccgaggtcatcgctattcccactgctcagagtgcgggacagcgggaaagtaaaagttctggctcatcacatgcaaggataaaatccagagaccacctcatctccaggcatgctgtgaaaggtgatcctcagtctcccggtcgccactggaatgagggccatgccaccattctttcacaggacttagaccctcattcccctggtgaacccgcactgttgtccctctgtgactcagccgtccctctaaatgctccagcaaatagggagaatgggtcccaagctatgccgtataattgtagaaacaacctggccttcccagcccacccccaagatgtggatggcaagagtgaatctagttattcagggggcggagggcacagcagctcggagccctgggaatacaaatcctcaggtaatggaagggcatcccccctgaagccgcatttagcaactcctggctattccactcccacaagtaacatgagcagctgcagtttggaccaaacgtccaacaaagaggatgctgggtcgctgtattctgaggaccacgatggctactgtgcatctgtgcacactgactctggacatggatctgggaatctgtgcaatagcagtgatggctttgggaaccccaggcacagcgtgatcaatgtttttgttggaagagctcagaaaaaccaaggggaccggtccaattaccaggataaatccctatcaagaaacatctctttgaagaaagcaaagaagcctcccctgccaccctcccggacagactccctccgcaggattcccaagaagagcagccagtgcaacgggcaggtgctcaacgagagcctgatcgccacactccagcactcgctgcagctgagcctcccaggcaagagtggcagctcgccctcccagagcccctgcagtgacttggaagagccctggctgccccgctcccggagccagagcacagttagtgctggcagcagcatgacttccgccaccacccccaatgtctactccctgtgcggggccacgccatcgcagagtgacacaagcagcgtcaagtcagagtacacggacccctggggttattacattgactacacgggcatgcaggaagatccggggaacccggcagggggctgttcaaccagcagtggggtgcccactgggaacgggccagtccgccatgtccaagaagggtccagagccacaatgccccaagtgcccggtggttcagtcaaaccaaagatcatgtcaccagagaagtcacacagagtcatttctccatccagtgggtattccagccagtcgaatacacccacagcactcacccctgtgcctgtgtttttaaaatcagtgtcaccagcaaacgggaaggggaagcccaagcccaaggtaccagaaaggaagtcctctctgatatcttcagtatccatttcctcatcgtccacttctctttcttctagtacttctactgaaggaagtggcactatgaagaagctggatccagccgtgggctctcccccggctcctcctcctcctcctgttccctctcctccattcccttgtcctgcagacaggtctcctttccttcctcccccacctcctgtcacagattgctcccagggctctcctctgcctcactctcctgtgttcccccctccgccgccagaagctctcattcctttctgctccccacctgattggtgcctttctcctccccgccctgcactgagccccattcttccagattcacctgtgtccttgccattgcccccacctctcttaccttcctcggaacccccacctgccccacctcttgaccccaaattcatgaaagacaccaggccgcctttcacaaattctggccagccagaatcctcccggggatccttgaggccgccttctaccaaggaggagaccagcaggccccccatgcccctgataaccacggaagcattgcagatggtgcagttgaggcccgtgagaaagaactcaggcgctgaggcggcacagttgtctgaacgaacagctcaggaacaacgaactccagttgctccacagtaccacttaaagccatctgctttcctgaaatcccgaaatagcacaaatgaaatggagagtgaaagccagcctgcctctgtgacaagctcgcttccgacgcctgccaagagctcgagtcagggtgaccatggcagtgcggctgagcgtggtggccctgtgagccgcagccctggagctccaagcgctggggaggcagaggctcggcccagccccagcaccaccccactcccagactcttcacccagcaggaagccaccccccatttccaagaagcccaaactgttcctggtggtaccacctccgcagaaagattttgcagtggagcccgcagagaacgtgagcgaagccctccgagctgtgcccagccccacgacgggagaggagggctctgtgcacagcagggaggcaaaagagagttctgcagcccaagctggctctcatgccacgcaccctggcacctcggttcttgagggaggagctgcaggatccatgtctcccagcagagtggaagccaatgtccccatggttcagcctgatgtctcaccagcccccaagcaggaggagccagccgagaacagtgcggatactgggggcgatggggagagctgcctatctcaacaggacggagcagctggggtgccggagaccaacgcagccggttcatcctcagaggcctgtgacttcctcaaggaagacgggaatgatgaggtaatgacccccagtcgacccaggaccacagaagacctttttgcagctattcacagatccaaaaggaaagtcctcggccgtagagattcagatgatgaccactcccgaaaccattctccctccccgcccgtgacacccaccggcgctgccccaagcctggcctctccaaagcaagtggggtcgattcagagaagcatccgaaagagcagcaccagcagtgacaacttcaaagctctgctgctgaaaaagggcagtcgttcagacaccagcgcccgcatgtctgcagcagagatgctcaagaacacagaccctagattccagaggtcgaggtcagagccttccccagatgcccccgagagcccgtcaagctgctccccaagcaagaacagaagggcgcaggaggagtgggccaagaacgaaggcttgatgcctcggagtctgtccttttccggccccaggtacggccgcagccgaacgccgccttctgccgccagcagcaggtacagcatgcggaaccggatccagagcagccccatgaccgtcatctcggagggagaaggggaagccgtggagcctgtggacagcatagcccgcggggctctgggcgctgcggagggatgttccctggacggactggcgagggaggagatggacgagggcggcctgctctgtggggaggggcctgccgcctccctgcagccccaggcccccggccctgtggatgggacagccagtgcagagggcagagagccctccccacagtgtggcggttctctgagcgaggagagttagggccaagaacgtaactctcccaggtgacacggggggagacgagcaatgcagcactctaggaagcctgctaggcgcccttccctggctcacccggggagcccactctgcttctgtgctgtgggccccggggttgccagccctgcagtgtgagtgaacggttatttaggactcacctggcacttgccctgtggcttaagaacaagtagaagcttaaacttctgaaagtgcttcccggggaagattttttttttttttttttttttttgctaaatgctgggtgtgtatgtgtgcattttccacactttttaatttttaaaaaatacacatatacacaaacaacatgtacagaaatagaagaaagcaagccagacttaagcttggtagagtaacggagtcctctggtctaggcggtaattgctttcagagaattacgtttatagaaatcagcgagttttgtaagaaaggagaagatgttacttcaagaaagaggcagtagagttgctggttcttaatgcacagaacacacagatatatgcacacgtgtgctgctgaggtgaggcaggtctggtgagcacggagaggctgggaaggggctaagtgactaattggttcaggtacttttttctgggggaggtagactttgcttcttttttgtaaaaatgacaaacgtagaagtggcaatgctgtaacctggtgcctgctgctgtgcagccacatacacacaattgtagcctgatttttagaagtgtgggtaattttttaatgaatttcctccttgagtagcagctgaggtcattgacaactgaagtgatggtgtggacatagagagaggggaagggttggaaaggagtaagtgatacactgctggaatttgtttcctgcctatgaaataaaattatttttcagaattaaatttgaaaacttgcactacagaactatgggtggagcttttccttttacaacagtttttttttttttttttttttaaccagagtttaaacttccattaggcaatttcctgtcacttgaaatgtcaacatttgctaacttttggatatccttttggttacaccaaagaaaaagttatggctatttttttttccttgaactgcctacagtatcatgtcctaattcagaaagatttatcaaaatctattatatattatcttactttgaagaaaatgctgaatagctcttgttagtcaaataaactgataaaaattggtagggcctggctatcaattagccctgggaaatgaatttttagattaaaaaggtttttttgcatcatttggtttgtgcatttttatatttgtttataaataattgagttgctaattacttctaatcttctccaatcagattttcaacaattttagacatgggacacacgtgtgtgaagtctttattttaatgtaataatctcattacccccacccttactcccttaacttccatgtacttagactcctttatttgttaaataaactagagtattgtcttcttcatt

SEQ ID NO: 13877 - DNA, 736 bp, Homo sapiens
  source 1..736: mol_type = unassigned DNA
ggagacagctgtgcctagcactgcaggcttcatcagaccacagagcacagcccctccatggaactgctgcagaatgttctgtctgaaagcggtttccaacctagatgaggaaagccgatggacagtccactacactgccccgtggcaccagcaggagaatgtgttccttcccaccacaagacccccctgtgttgaggacctgcaccgccaagccaagctcaacctcaaatcagtactgagggaatgcgataagttgcggcatgatggctaccgcagttctcagtactactctcagggacccacctttgcggccaacgccagcccattctgtgatgattaccaagatgaagatgaagaaacagatcaaaagtgttctctgtcttcatcagaagaagaaagatttatttccatcaggagacctaaaacaccagcctcaagtgacttctccgaccttaatactcagacgaactggaccaagtcgcttccactgccaacaccagaagagaagatgcgacagcaagcccaaacagtccaggctgacgtggtgcctattaacataactgcatcaggcactggccaagatgatgctgatggccactcagtgtacacccctgatcactactctacactaggaaggttcaatagctgtcggtctgctgggcagcgctcagaaaccagggactccagctgtcagacggaggatgtgaaggtcgtaccaccttccatgaggagaatc

SEQ ID NO: 13878 - DNA, 947 bp, Homo sapiens
  source 1..947: mol_type = unassigned DNA
aggttcaaggactgttaatggtttgtaactgcctgacaataaactcaacctcagttacatcagcctgggcagatgtctaaggatatgagaccgggggaagaaaaagttagaatctgtagcagaaggacgaagcttgccacctgcctactgggctgagcttttaatgtgatttacatttctaagctctatgtaggtgccctggaaatggtggtcttcattaatgcaaagattaagtctttaattaaactttttaagaagaaaacggtttccaacctagatgaggaaagccgatggacagtccactacactgccccgtggcaccagcaggagaatgtgttccttcccaccacaagacccccctgtgttgaggacctgcaccgccaagccaagctcaacctcaaatcagtactgagggaatgcgataagttgcggcatgatggctaccgcagttctcagtactactctcagggacccacctttgcggccaacgccagcccattctgtgatgattaccaagatgaagatgaagaaacagatcaaaagtgttctctgtcttcatcagaagaagaaagatttatttccatcaggagacctaaaacaccagcctcaagtgacttctccgaccttaatactcagacgaactggaccaagtcgcttccactgccaacaccagaagagaagatgcgacagcaagcccaaacagtccaggctgacgtggtgcctattaacataactggtacgctttgctagccagacaggttcagaatgtacttgggagaatgactacagctttttgttttatgctgttagcatttcattgctacatcaaaggtgaatagctgtggtccaacttcatgctctttgtttaatgagaggaatattaaaactacatatgtgtgtgcatataaaatgtctactgcttgttgggttcgaagactatgtcgcca

SEQ ID NO: 13879 - DNA, 506 bp, Homo sapiens
  source 1..506: mol_type = unassigned DNA
cggccgcgctgggccaccgcaccgccgcgctgcaccgccgcctcgacgccctgcaagccgccgctgcgcgcctggaccaccgccgagtgaaaatcccggtttccaacctagatgaggaaagccgatggacagtccactacactgccccgtggcaccagcaggagaatgtgttccttcccaccacaagacccccctgtgttgaggacctgcaccgccaagccaagctcaacctcaaatcagtactgagggaatgcgataagttgcggcatgatggctaccgcagttctcagtactactctcagggacccacctttgcggccaacgccagcccattctgtgatgattaccaagatgaagatgaagaaacagatcaaaagtgttctctgtcttcatcagaagaagaaagatttatttccatcaggagacctaaaacaccagcctcaagtgacttctccgaccttaatactcagacgaactggaccaagtcgcttccactgccaacacca

SEQ ID NO: 13880 - DNA, 568 bp, Homo sapiens
  source 1..568: mol_type = unassigned DNA
agaatatagagttatcctgttgacgagcagttagaattgtattaacgaagaagaagagggaggttactgagcaaagaagtgaattttatcctattttaacatgggacatcgtgccggaacgagttctccatagatgctctgggatttattttgataatgaatgtaatatattgtctggagtctgtgaccgattcctctttcccgtggggtgcagttgcggtttccaacctagatgaggaaagccgatggacagtccactacactgccccgtggcaccagcaggagaatgtgttccttcccaccacaagacccccctgtgttgaggacctgcaccgccaagccaagctcaacctcaaatcagtactgagggaatgcgataagttgcggcatgatggctaccgcagttctcagtactactctcagggacccacctttgcggccaacgccagcccattctgtgatgattaccaagatgaagatgaagaaacagatcaaaagtgttctctgtcttcatcagaagaagaaagatttatttccatcaggagacctaaaacaccagcctcaagtg

SEQ ID NO: 13881 - DNA, 471 bp, Homo sapiens
  source 1..471: mol_type = unassigned DNA
acgaagcttgccacctgcctactgggctgagcttttaatgtgatttacatttctaagctctatgtaggtgccctggaaatggtggtcttcattaatgcaaagattaagtctttaattaaactttttaagaagaaaacggtttccaacctagatgaggaaagccgatggacagtccactacactgccccgtggcaccagcaggagaatgtgttccttcccaccacaagacccccctgtgttgaggacctgcaccgccaagccaagctcaacctcaaatcagtactgagggaatgcgataagttgcggcatgatggctaccgcagttctcagtactactctcagggacccacctttgcggccaacgccagcccattctgtgatgattaccaagatgaagatgaagaaacagatcaaaaggtttgattgggcgtggtggctcacacctgtaatcccagcactttgggaggccac

SEQ ID NO: 13882 - DNA, 609 bp, Homo sapiens
  source 1..609: mol_type = unassigned DNA
tttgatttctcccaagtaaccgtgtgggtgaactgtaaactgggtgcctggcttgaccctgactctttttctctaggaagccgtctttttggataatgcggtgcctgactgtcagcgttgtctaagagggaaacagcaggctcgtggagaggacctgggccaacgcaaaaaacccagcgttttgtttgctgggctgttctttgtctctagttgattttgaaaagaagatgaaaaaggaaggctcttcaggttccttcagactccagccgaatacaggttctctctcacgtgctgtaagttggataaatttctcctccttgtccaggcagacaaagaggctgtttcgcagtgatggagagctctcggtttgtgggcagcaggtggaagtggatgacgaaaactggatatacagagcccagcccagaaaaggtgactcgatttttaaaaaatttaaacatttgaaaaagtttgttatgtagaattctttgtttctatcactcccccttcatgatttttgcccccattaggagtttcttttgaaatgtttgtttttgtattggaattcggcgtcatttgtttacatgtctaaaataaaaatgctcttcctca

SEQ ID NO: 13883 - DNA, 459 bp, Homo sapiens
  source 1..459: mol_type = unassigned DNA
cggccgcgctgggccaccgcaccgccgcgctgcaccgccgcctcgacgccctgcaagccgccgctgcgcgcctggaccaccgccgagtgaaaatccaagccgtctttttggataatgcggtgcctgactgtcagcgttgtctaagagggaaacagcaggctcgtggagaggacctgggccaacgcaaaaaacccagcgttttgtttgctgggctgttctttgtctctagttgattttgaaaagaagatgaaaaaggaaggctcttcaggttccttcagactccagccgaatacaggttctctctcacgtgctgtaagttggataaatttctcctccttgtccaggcagacaaagaggctgtttcgcagtgatggagagctctcggtttgtgggcagcaggtggaagtggatgacgaaaactggatatacagagcccagcccagaaaaggtgactcgatt

SEQ ID NO: 13884 - DNA, 3978 bp, Homo sapiens
  source 1..3978: mol_type = unassigned DNA
aaagaactccagattggacttcctggtgtaaatctcttcttgcttcacacaggtcatttccttggtagggtcgcagaaaaccttaagagctgcagggcttcaaagagaggaacttgcagtccaaagtagcaaaaggtgtctgcattctgagcctcttttcgtaactgagcactcaaggtggggatcattgagataagggcttggtccccaaaccaccacagcatgaatttattgactttctcttctcctcgatcctcatggtcctgggaagcaagcacttttccatttccaaatccagtggctcaaacacctggaaatagcctaaagaaaatgcaagtcaggcctggcagctagagcaggagtcctggctcatggcccttccccggcccagcgctcggccatggcaccctagagtgtgtgtctccactgtgctatttttcagaagaatatgaggaacagtactcggaggccagacttgtggggcagaccttccgctcttctgatgaggccactaagcccacccccaacccaaggccccagtctgccaggcgtctggagtttatattgatggtgagttgcctcatcccccacctgggagagccagcatgcacccactgacaagagacctccagctgcttactttacccactggaagctgctcagccctgctcaccagcagagctaccctgaggccccactgggataggccctgcacagcaggtgcctggcctggtggcctgtccacgctttcctgcctcccagacgaagcctccaactacccagcctaaacagccaccctatgggcactggctcattgccaggcaggaatacaccctttccatcaccttctctcccaacagcctacaaaacggcagctgagcgaggatgagactaccacccagggtgtgagggcccccgaggcctccctgagcctgtctaccacagccgacaagcaaactgcctggaatagccttttccctctgcccatcctagaggagaagcggtggcctcagctttgctccacgcagtctgacattgtgcccatcaacatctctggtcacagcaacagcccagcaggcagtgtggcccactctaccacctccgacatcaggcccagtcactcagttccagaaggggttcatggaagagttgcagttggtcaggatgctcggttcccaagtctcacctcgccagtactgagaactccttccagtgagccggacgaacctcaccaggcacggagtggcccaaaccctcctggcatggagagcatgggaatggtgtacagtgtccccagttcttgcaatggacctacagaatcaaccttctccacttcctggaagggagatgcttttacctacatgactccaagtgccaccagccagagcaatcaagtcaatgaaaatgggaaaaatccttcctgtgggaattcttgggtctctctaaacaaagtcccacctctggttcctaaggaggctgctaccctccttgtcgctcgtgataacccagcaggatgcagtgggtcagctggctaccctgagcgccttattcagcaaaggcacatgcccgaaagaccctccaagattggccttctgaccagtgggacctcgaggctggagacaggccccggtggggccagcagattccgggagcggtcactgtctgtgcccacagactcaggcaccacagatgtggactatgatgaggagcagaaggccaatgaggcctgtgccctgccttttgccagtacgagctctgagggcagtaacagtgctgacaacattgcctcccttagtgcccagcaagaggcccagcacagaaggcagaggtccaagagtatctcacttaggaaggccaaaaagaagccttccccacccacacgcagtgtctcactggtcaaagatgagccaggcctcttgcctgaaggtgggtcagcactacccaaggaccagaggcccaagagcctttgcctctccttggaacatcaaggacatcactcgtcccacccagatgctcagggtcacccagctattccaaaccacaaagatccagaaagtacacaattctcccaccactggtatcttactgactggaagtctggtgacacctaccaatccctgtccagctccagcactgccactggcaccacagtcattgagtgcacccaagttcagggcagctcagagtctcttgcctcaccttccacctccagagccactacaccttcccaactctccattgaagtggaggccagggagatatcatccccgggaaggccccctggactgatgtcaccctccagtggctactccagccagtcggaaacaccaacacccactgtttccatgtccctgaccctgggccacttaccccctccaagcagcagtgtccgggtacgtccagtggtacctgagaggaagtcatcactacccccgacgtcaccaatggagaaatttcccaagtcacggctatcatttgacctaccactgacctcttcacccaacctggatctgtctgggatgagtatctccatccgaagcaaaactaaggtgagtcggcaccactcagagacaaattttggcgtcaagctggcccagaaaactaatcccaaccagccaatcatgcctatggttactcagtccgacctacgttctgttcgcctgaggtcggtcagcaagtctgagccggaagatgatattgagagccctgagtatgccgaggaacccagagcagaagaagtcttcaccttgccagagagaaagacaaaacctcccgtagctgagaagcctccggtggcccggaggcctccaagcttggtccacaagccaccatctgttcctgaggagtatgcactaacttcaccaaccttggctatgccccccaggagctcaattcaacatgcgagaccactccctcaagacagctacacggtagtgcggaaaccaaagccctccagcttcccagatggcagaagcccaggggagtcaacagcaccctcatctcttgttttcacgccttttgccagttcctctgatgctttcttctcaggaacacagcagcctccccagggaagtgtagaggacgagggccccaaggtgagggttctgcctgaaagaattagcctccagagccaggaagaagctgagaaaaagaaaggcaagattccacctcccgtaccaaaaaaacccagcgtgctgtacctgcctctcacttctcccacagctcaaatggaggcctatgtggcagaaccaaggctgcctctcagccccatcatcaccctggaggaagacaccaagtgtcccgccaccggcgatgacctgcaatcacttggtcaaagggtgacttcaactcctcaggctgacagtgaaagggaggcaagccctctgggttagtaaactgtctgctggctttttccttcagtcacaggagagatgagggtgagaatggagtgccagagatggaagcagatgccccagaataattatcctgatcccaagtcagtagcgggcaccctttgagggtttgagttactctaaataggaaccacgggctggccttactgcccttgagatcaagactagcccgaggcagatctccaaggcccagtttaggccactctcccctctaaatctctagtgctgagataatgaaatcaaactaggttctagcaccctaggacttcagcatcccacatccctagccaagcatgcatcctgtcttgggaactactccacctcactgtacagtacttttcattggctgcagtgaatttagttccctacatgggacccagtaccccaccagactgagttcaagtgccatggcaggctcggagccatctgaaacaacggaatatgttgccaccagcagcctctttttgtgccttccggaggaaagggagctcactttcttgggtggtttgagttctttggctcttcctggaaccataaacataatacataatgcttctcatccttt

SEQ ID NO: 13885 - DNA, 2269 bp, Homo sapiens
  source 1..2269: mol_type = unassigned DNA
cttaatgcctttttcagtttgattgtctacatggagatcagggtgataagtttcaataaacatatagacgcccccccacccacccccattagctagaaaagaccaggactgggttgctttaaatgaaccaagcttgaccaacaaacaagacagccatttgttcactcagatctagccgaggtaactcacaagtgcaccttgagatcctccatgtgtctgtcaacagcgataggcaggatctgcgcccagctcatgctgcattctaagaactctcatttcatttgcatataaaattcattacaggaagtaattaactgaaggaacagcatcatcaaaggctcaaggataatggaaaccgtcatcatgattatctactgggacctcatcagccacagtgagatgttctctgacagttacatgagccaggaaattgcagacgggctgcgcctggaggtggaagggaagatagtcagtaggacagaaggtaacatttttgactcgctcattggtggaaatgcctccgctgaaggccctgagggcaaaggtaccgaaagcacagtaatcactggtgtcgatagtgtcatgaatcatcacctgcaagaaacaagcttcacaaaagaagcctacaataagtgcatcaaagattacatgaaatcaatcaaaggcaaactggaagaacagagaccaaaaagagtaaaaccttttatgacaggagctgcagaacagatcaagcacatccttgctaatttcaaaaactaccagaaaacatgaatccagatggcatggttgctctgcggactactgtgaggatggtgtgacccgatatatgattttctttaaggatggtttagaaatggaaaaatgttaacaaatttggcaattactttggatctatcacctgtcatcataactggcttctgtttgtcatccacataacaccaggacttaagacaaatgggactgatatcatcttgagttcttcattattttgactgatttatttggagtggaggcattgttttttagaaaaacatgtcatgtaggttgtctaaaagtaaaatgcatttaaacttaaaaaaaaatacctgagactgggtaatttagaaaaacaatagatttctttatcttgtggttctataggctgagaagttcaagggcatggccctggtttctggcaagggcttttgtgctgtgtcacaacatagtggagaagatcaaagagaaagtggacacatgcaaagaggggaaaacctgagtggcatcccggctttataacaacccactgtcacaggaactaatccattcctgagagaactaatccagtcttgtgagactgagaattcactcactcctgcaagactgccaccaagccattcacgaaggatccatccccatgacccagacacctcccactaggacccaccttccaacatttggggatcaaatttcaacatgagttttgatggagacaaataaaccacatccaaaccatagcacagggactgctaaataccccaacaacagaaatagaaagctcccctaaacaccttctttaactgagacctggctgtctcctgagaaccccacttcgcctgtaggcctctcctcagagattctttccctcccgcaaatacttctgcatctggaggtggagtgggccccttctttgctccccactgcaccttccagaccatgaccactgtacctctcaggcacttccctccattctatccttttgcccaccccctagtcttgcccaaatccaaatcacttcaacattcatgtgaaagatctatcccacttcccacacttcttgtttcttcggcctactcacctctgttgccctccctttctgctccagtcacccactctcagggccccaagtggatcttgcgatggcccagaactgctgcaccattgaaatcttaacttcaatccccacaacctcacatctttctaactttcccatctgattacttcattacactgttcagctttgttgagacttgtatgagctcatcacaaaagaagaaatcccaatgtccaataaacatggaaatgtgcttaacctcatctactgtcagggaaacgaagaatgagggagaatggggcatgaggaaggagcatgagaaaactttttgaggtaatagatatgtgcattatcttgattgtggctctggtttcaaggatgtttactaatcaaatcgtcacttaaaacgtgcagtttgttgtacatcaattatatatcaataaagttgtaaaatataca

SEQ ID NO: 13886 - DNA, 3082 bp, Homo sapiens
  source 1..3082: mol_type = unassigned DNA
gatgaggccactaagcccacccccaacccaaggccccagtctgccaggcgtctggagtttatattgatgcctacaaaacggcagctgagcgaggatgagactaccacccagggtgtgagggcccccgaggcctccctgagcctgtctaccacagccgacaagcaaactgcctggaatagccttttccctctgcccatcctagaggagaagcggtggcctcagctttgctccacgcagtctgacattgtgcccatcaacatctctggtcacagcaacagcccagcaggcagtgtggcccactctaccacctccgacatcaggcccagtcactcagttccagaaggggttcatggaagagttgcagttggtcaggatgctcggttcccaagtctcacctcgccagtactgagaactccttccagtgagccggacgaacctcaccaggcacggagtggcccaaaccctcctggcatggagagcatgggaatggtgtacagtgtccccagttcttgcaatggacctacagaatcaaccttctccacttcctggaagggagatgcttttacctacatgactccaagtgccaccagccagagcaatcaagtcaatgaaaatgggaaaaatccttcctgtgggaattcttgggtctctctaaacaaagtcccacctctggttcctaaggaggctgctaccctccttgtcgctcgtgataacccagcaggatgcagtgggtcagctggctaccctgagcgccttattcagcaaaggcacatgcccgaaagaccctccaagattggccttctgaccagtgggacctcgaggctggagacaggccccggtggggccagcagattccgggagcggtcactgtctgtgcccacagactcaggcaccacagatgtggactatgatgaggagcagaaggccaatgaggcctgtgccctgccttttgccagtacgagctctgagggcagtaacagtgctgacaacattgcctcccttagtgcccagcaagaggcccagcacagaaggcagaggtccaagagtatctcacttaggaaggccaaaaagaagccttccccacccacacgcagtgtctcactggtcaaagatgagccaggcctcttgcctgaaggtgggtcagcactacccaaggaccagaggcccaagagcctttgcctctccttggaacatcaaggacatcactcgtcccacccagatgctcagggtcacccagctattccaaaccacaaagatccagaaagtacacaattctcccaccactggtatcttactgactggaagtctggtgacacctaccaatccctgtccagctccagcactgccactggcaccacagtcattgagtgcacccaagttcagggcagctcagagtctcttgcctcaccttccacctccagagccactacaccttcccaactctccattgaagtggaggccagggagatatcatccccgggaaggccccctggactgatgtcaccctccagtggctactccagccagtcggaaacaccaacacccactgtttccatgtccctgaccctgggccacttaccccctccaagcagcagtgtccgggtacgtccagtggtacctgagaggaagtcatcactacccccgacgtcaccaatggagaaatttcccaagtcacggctatcatttgacctaccactgacctcttcacccaacctggatctgtctgggatgagtatctccatccgaagcaaaactaaggtgagtcggcaccactcagagacaaattttggcgtcaagctggcccagaaaactaatcccaaccagccaatcatgcctatggttactcagtccgacctacgttctgttcgcctgaggtcggtcagcaagtctgagccggaagatgatattgagagccctgagtatgccgaggaacccagagcagaagaagtcttcaccttgccagagagaaagacaaaacctcccgtagctgagaagcctccggtggcccggaggcctccaagcttggtccacaagccaccatctgttcctgaggagtatgcactaacttcaccaaccttggctatgccccccaggagctcaattcaacatgcgagaccactccctcaagacagctacacggtagtgcggaaaccaaagccctccagcttcccagatggcagaagcccaggggagtcaacagcaccctcatctcttgttttcacgccttttgccagttcctctgatgctttcttctcaggaacacagcagcctccccagggaagtgtagaggacgagggccccaaggtgagggttctgcctgaaagaattagcctccagagccaggaagaagctgagaaaaagaaaggcaagattccacctcccgtaccaaaaaaacccagcgtgctgtacctgcctctcacttctcccacagctcaaatggaggcctatgtggcagaaccaaggctgcctctcagccccatcatcaccctggaggaagacaccaagtgtcccgccaccggcgatgacctgcaatcacttggtcaaagggtgacttcaactcctcaggctgacagtgaaagggaggcaagccctctgggttagtaaactgtctgctggctttttccttcagtcacaggagagatgagggtgagaatggagtgccagagatggaagcagatgccccagaataattatcctgatcccaagtcagtagcgggcaccctttgagggtttgagttactctaaataggaaccacgggctggccttactgcccttgagatcaagactagcccgaggcagatctccaaggcccagtttaggccactctcccctctaaatctctagtgctgagataatgaaatcaaactaggttctagcaccctaggacttcagcatcccacatccctagccaagcatgcatcctgtcttgggaactactccacctcactgtacagtacttttcattggctgcagtgaatttagttccctacatgggacccagtaccccaccagactgagttcaagtgccatggcaggctcggagccatctgaaacaacggaatatgttgccaccagcagcct

SEQ ID NO: 13887 - DNA, 3402 bp, Homo sapiens
  source 1..3402: mol_type = unassigned DNA
ctagctgcagctaactcgggtcgggaaaatgcgacagcgactgcccactcgaggtcgtcatggcgacagccagtgaacgtgttcctctcctcgggcaggcccccgagtgtagaggagctgcttcgggaggcgcagctcaatctccagagcctgttgcaagaagaatatgaggaacagtactcggaggccagacttgtggggcagaccttccgctcttctgatgaggccactaagcccacccccaacccaaggccccagtctgccaggcgtctggagtttatattgatgcctacaaaacggcagctgagcgaggatgagactaccacccagggtgtgagggcccccgaggcctccctgagcctgtctaccacagccgacaagcaaactgcctggaatagccttttccctctgcccatcctagaggagaagcggtggcctcagctttgctccacgcagtctgacattgtgcccatcaacatctctgggcagcagtttgataaacatgcaagtttgcgacactcgttgtttaacacagagacagccgtgaaccccaagtccaccctgaggcggaggcggaccattattggattctctaacttttcccagcgagaccaaggtcacagcaacagcccagcaggcagtgtggcccactctaccacctccgacatcaggcccagtcactcagttccagaaggggttcatggaagagttgcagttggtcaggatgctcggttcccaagtctcacctcgccagtactgagaactccttccagtgagccggacgaacctcaccaggcacggagtggcccaaaccctcctggcatggagagcatgggaatggtgtacagtgtccccagttcttgcaatggacctacagaatcaaccttctccacttcctggaagggagatgcttttacctacatgactccaagtgccaccagccagagcaatcaagtcaatgaaaatgggaaaaatccttcctgtgggaattcttgggtctctctaaacaaagtcccacctctggttcctaaggaggctgctaccctccttgtcgctcgtgataacccagcaggatgcagtgggtcagctggctaccctgagcgccttattcagcaaaggcacatgcccgaaagaccctccaagattggccttctgaccagtgggacctcgaggctggagacaggccccggtggggccagcagattccgggagcggtcactgtctgtgcccacagactcaggcaccacagatgtggactatgatgaggagcagaaggccaatgaggcctgtgccctgccttttgccagtacgagctctgagggcagtaacagtgctgacaacattgcctcccttagtgcccagcaagaggcccagcacagaaggcagaggtccaagagtatctcacttaggaaggccaaaaagaagccttccccacccacacgcagtgtctcactggtcaaagatgagccaggcctcttgcctgaaggtgggtcagcactacccaaggaccagaggcccaagagcctttgcctctccttggaacatcaaggacatcactcgtcccacccagatgctcagggtcacccagctattccaaaccacaaagatccagaaagtacacaattctcccaccactggtatcttactgactggaagtctggtgacacctaccaatccctgtccagctccagcactgccactggcaccacagtcattgagtgcacccaagttcagggcagctcagagtctcttgcctcaccttccacctccagagccactacaccttcccaactctccattgaagtggaggccagggagatatcatccccgggaaggccccctggactgatgtcaccctccagtggctactccagccagtcggaaacaccaacacccactgtttccatgtccctgaccctgggccacttaccccctccaagcagcagtgtccgggtacgtccagtggtacctgagaggaagtcatcactacccccgacgtcaccaatggagaaatttcccaagtcacggctatcatttgacctaccactgacctcttcacccaacctggatctgtctgggatgagtatctccatccgaagcaaaactaaggtgagtcggcaccactcagagacaaattttggcgtcaagctggcccagaaaactaatcccaaccagccaatcatgcctatggttactcagtccgacctacgttctgttcgcctgaggtcggtcagcaagtctgagccggaagatgatattgagagccctgagtatgccgaggaacccagagcagaagaagtcttcaccttgccagagagaaagacaaaacctcccgtagctgagaagcctccggtggcccggaggcctccaagcttggtccacaagccaccatctgttcctgaggagtatgcactaacttcaccaaccttggctatgccccccaggagctcaattcaacatgcgagaccactccctcaagacagctacacggtagtgcggaaaccaaagccctccagcttcccagatggcagaagcccaggggagtcaacagcaccctcatctcttgttttcacgccttttgccagttcctctgatgctttcttctcaggaacacagcagcctccccagggaagtgtagaggacgagggccccaaggtgagggttctgcctgaaagaattagcctccagagccaggaagaagctgagaaaaagaaaggcaagattccacctcccgtaccaaaaaaacccagcgtgctgtacctgcctctcacttctcccacagctcaaatggaggcctatgtggcagaaccaaggctgcctctcagccccatcatcaccctggaggaagacaccaagtgtcccgccaccggcgatgacctgcaatcacttggtcaaagggtgacttcaactcctcaggctgacagtgaaagggaggcaagccctctggggagttctgtggaaccaggcaccgaagaaaaaagtttaatcagtgataaaacagctgaatggattgcagaggatgatgatgacgtgtttgtggcttcacgcacaactgaagatttatttactgtgatacacaggtccaaaaggaagctgctcggctggaaggaacctggtgaggcctttgtgggtggcagaacgagttcccactcaccaataaagaacacagctgagtctccaatcagtgagtctaccgccactgcagggtcaggcagcagtgccaacctagatgctggcagaaatgacgatttcaaggccttgctacagaagaagggaagtaaggcaactccaaggtctcgtccctcagcagctgaacttctgaagaccactaacccactggctcggagaattattgcacaattttcaaaagactatgaaaccaccgataaccccagtacctaa

SEQ ID NO: 13888 - DNA, 2955 bp, Homo sapiens
  source 1..2955: mol_type = unassigned DNA
ttcccctcactgcaggacagccgctgagcgggaggtcagccctctgaggggctctgactcgggcctttggctgagaaccttacctagagaaagacaagcccaactcacagtaaacttccctcgcctgtccgctgtgactgggccgacgggtccagggtggctgtgggtggagtgcagcggggtggagaaagagagaggaaactcacttttgaatcctcagttgctttccctaggctgggctgcccaggaacaacttcaatgggcaaaggagtatgtgatcgatgggaccaaggtgctgggaaacggggttcaggaaagtccctgggcacccactgaggagcctagggacagggtttgggacagtgtggagcccgtcggctccctgcccccagtgtgggctcagcacacacttttctcatgtggattcttggttatccacaccgctgggatggagagaactgactctgtcaccctcttctggatccggggaggtcacagcaacagcccagcaggcagtgtggcccactctaccacctccgacatcaggcccagtcactcagttccagaaggggttcatggaagagttgcagttggtcaggatgctcggttcccaagtctcacctcgccagtactgagaactccttccagtgagccggacgaacctcaccaggcacggagtggcccaaaccctcctggcatggagagcatgggaatggtgtacagtgtccccagttcttgcaatggacctacagaatcaaccttctccacttcctggaagggagatgcttttacctacatgactccaagtgccaccagccagagcaatcaagtcaatgaaaatgggaaaaatccttcctgtgggaattcttgggtctctctaaacaaagtcccacctctggttcctaaggaggctgctaccctccttgtcgctcgtgataacccagcaggatgcagtgggtcagctggctaccctgagcgccttattcagcaaaggcacatgcccgaaagaccctccaagattggccttctgaccagtgggacctcgaggctggagacaggccccggtggggccagcagattccgggagcggtcactgtctgtgcccacagactcaggcaccacagatgtggactatgatgaggagcagaaggccaatgaggcctgtgccctgccttttgccagtacgagctctgagggcagtaacagtgctgacaacattgcctcccttagtgcccagcaagaggcccagcacagaaggcagaggtccaagagtatctcacttaggaaggccaaaaagaagccttccccacccacacgcagtgtctcactggtcaaagatgagccaggcctcttgcctgaaggtgggtcagcactacccaaggaccagaggcccaagagcctttgcctctccttggaacatcaaggacatcactcgtcccacccagatgctcagggtcacccagctattccaaaccacaaagatccagaaagtacacaattctcccaccactggtatcttactgactggaagtctggtgacacctaccaatccctgtccagctccagcactgccactggcaccacagtcattgagtgcacccaagttcagggcagctcagagtctcttgcctcaccttccacctccagagccactacaccttcccaactctccattgaagtggaggccagggagatatcatccccgggaaggccccctggactgatgtcaccctccagtggctactccagccagtcggaaacaccaacacccactgtttccatgtccctgaccctgggccacttaccccctccaagcagcagtgtccgggtacgtccagtggtacctgagaggaagtcatcactacccccgacgtcaccaatggagaaatttcccaagtcacggctatcatttgacctaccactgacctcttcacccaacctggatctgtctgggatgagtatctccatccgaagcaaaactaaggtgagtcggcaccactcagagacaaattttggcgtcaagctggcccagaaaactaatcccaaccagccaatcatgcctatggttactcagtccgacctacgttctgttcgcctgaggtcggtcagcaagtctgagccggaagatgatattgagagccctgagtatgccgaggaacccagagcagaagaagtcttcaccttgccagagagaaagacaaaacctcccgtagctgagaagcctccggtggcccggaggcctccaagcttggtccacaagccaccatctgttcctgaggagtatgcactaacttcaccaaccttggctatgccccccaggagctcaattcaacatgcgagaccactccctcaagacagctacacggtagtgcggaaaccaaagccctccagcttcccagatggcagaagcccaggggagtcaacagcaccctcatctcttgttttcacgccttttgccagttcctctgatgctttcttctcaggaacacagcagcctccccagggaagtgtagaggacgagggccccaaggtgagggttctgcctgaaagaattagcctccagagccaggaagaagctgagaaaaagaaaggcaagattccacctcccgtaccaaaaaaacccagcgtgctgtacctgcctctcacttctcccacagctcaaatggaggcctatgtggcagaaccaaggctgcctctcagccccatcatcaccctggaggaagacaccaagtgtcccgccaccggcgatgacctgcaatcacttggtcaaagggtgacttcaactcctcaggctgacagtgaaagggaggcaagccctctggggagttctgtggaaccaggcaccgaagaaaaaagtttaatcagtgataaaacagctgaatggattgcagaggatgatgatgacgtgtttgtggcttcacgcacaactgaagatttatttactgtgatacacag

SEQ ID NO: 13889 - DNA, 12593 bp, Homo sapiens
  source 1..12593: mol_type = unassigned DNA
gccgcggtggctgccagtccagagcagaatgatgggcaactctcaccacaagcaaccgaggagtaaaagccaaagcaggatgcattcagcaacaggtcacagcaacagcccagcaggcagtgtggcccactctaccacctccgacatcaggcccagtcactcagttccagaaggggttcatggaagagttgcagttggtcaggatgctcggttcccaagtctcacctcgccagtactgagaactccttccagtgagccggacgaacctcaccaggcacggagtggcccaaaccctcctggcatggagagcatgggaatggtgtacagtgtccccagttcttgcaatggacctacagaatcaaccttctccacttcctggaagggagatgcttttacctacatgactccaagtgccaccagccagagcaatcaagtcaatgaaaatgggaaaaatccttcctgtgggaattcttgggtctctctaaacaaagtcccacctctggttcctaaggaggctgctaccctccttgtcgctcgtgataacccagcaggatgcagtgggtcagctggctaccctgagcgccttattcagcaaaggcacatgcccgaaagaccctccaagattggccttctgaccagtgggacctcgaggctggagacaggccccggtggggccagcagattccgggagcggtcactgtctgtgcccacagactcaggcaccacagatgtggactatgatgaggagcagaaggccaatgaggcctgtgccctgccttttgccagtacgagctctgagggcagtaacagtgctgacaacattgcctcccttagtgcccagcaagaggcccagcacagaaggcagaggtccaagagtatctcacttaggaaggccaaaaagaagccttccccacccacacgcagtgtctcactggtcaaagatgagccaggcctcttgcctgaaggtgggtcagcactacccaaggaccagaggcccaagagcctttgcctctccttggaacatcaaggacatcactcgtcccacccagatgctcagggtcacccagctattccaaaccacaaagatccagaaagtacacaattctcccaccactggtatcttactgactggaagtctggtgacacctaccaatccctgtccagctccagcactgccactggcaccacagtcattgagtgcacccaagttcagggcagctcagagtctcttgcctcaccttccacctccagagccactacaccttcccaactctccattgaagtggaggccagggagatatcatccccgggaaggccccctggactgatgtcaccctccagtggctactccagccagtcggaaacaccaacacccactgtttccatgtccctgaccctgggccacttaccccctccaagcagcagtgtccgggtacgtccagtggtacctgagaggaagtcatcactacccccgacgtcaccaatggagaaatttcccaagtcacggctatcatttgacctaccactgacctcttcacccaacctggatctgtctgggatgagtatctccatccgaagcaaaactaaggtgagtcggcaccactcagagacaaattttggcgtcaagctggcccagaaaactaatcccaaccagccaatcatgcctatggttactcagtccgacctacgttctgttcgcctgaggtcggtcagcaagtctgagccggaagatgatattgagagccctgagtatgccgaggaacccagagcagaagaagtcttcaccttgccagagagaaagacaaaacctcccgtagctgagaagcctccggtggcccggaggcctccaagcttggtccacaagccaccatctgttcctgaggagtatgcactaacttcaccaaccttggctatgccccccaggagctcaattcaacatgcgagaccactccctcaagacagctacacggtagtgcggaaaccaaagccctccagcttcccagatggcagaagcccaggggagtcaacagcaccctcatctcttgttttcacgccttttgccagttcctctgatgctttcttctcaggaacacagcagcctccccagggaagtgtagaggacgagggccccaaggtgagggttctgcctgaaagaattagcctccagagccaggaagaagctgagaaaaagaaaggcaagattccacctcccgtaccaaaaaaacccagcgtgctgtacctgcctctcacttctcccacagctcaaatggaggcctatgtggcagaaccaaggctgcctctcagccccatcatcaccctggaggaagacaccaagtgtcccgccaccggcgatgacctgcaatcacttggtcaaagggtgacttcaactcctcaggctgacagtgaaagggaggcaagccctctggggagttctgtggaaccaggcaccgaagaaaaaagtttaatcagtgataaaacagctgaatggattgcagaggatgatgatgacgtgtttgtggcttcacgcacaactgaagatttatttactgtgatacacaggtccaaaaggaagctgctcggctggaaggaacctggtgaggcctttgtgggtggcagaacgagttcccactcaccaataaagaacacagctgagtctccaatcagtgagtctaccgccactgcagggtcaggcagcagtgccaacctagatgctggcagaaatgacgatttcaaggccttgctacagaagaagggaagtaaggcaactccaaggtctcgtccctcagcagctgaacttctgaagaccactaacccactggctcggagaattattgcacaattttcaaaagactatgaaaccaccgataaccccagtacctaagccctgggctcaacaagcagggtttacttactaaacttgagtagagaagggggaagagaaagggtctttaaacagaaccatgggaacaacagagcctacatttcttttatattaactcacactctggacagcaggagagaggctacttcatctagagctaaaatcatctggcacttaatcatcttcagacatttttatgttttcatacttataagcttgtcatgactgactaccgagtttcttcttattttcccccagtggtgtgcactaactaagaagaaattttcagatgtcagggcacatgtgccactttttcaattcagtgacccggctgctccatccctggctcctgtcactgaggagtgcagtgtgagagcagattggaggctgccaaacttggggggcatagggtgccattgcttattattcactttcctagggaggctctgatggccctgtgtgcaaacacagaaagactctgatgcctcctcaaccacagtttagctttcccctgcgctcacaagaggtttgcagggtgcacttatttcggcatgaggttgattggatggcttttgtggtgcaaaatatgactgtgactctgtcctgaaacttaatgcctttttcagtttgattgtctacatggagatcagggtgataagtttcaataaacatatagacgcccccccacccacccccattagctagaaaagaccaggactgggttgctttaaatgaaccaagcttgaccaacaaacaagacagccatttgttcactcagatctagccgaggtaactcacaagtgcaccttgagatcctccatgtgtctgtcaacagcgataggcaggatctgcgcccagctcatgctgcattctaagaactctcatttcatttgcatataaaattcattacaggaagtaattaactgaaggaacagcatcatcaaaggctcaaggataatggaaagtaagtgcatcttgccccccaccagtcaattcagatcgtggtttgtggttggtttggttttgtttaaaggaagtccgactctgttccaaaaaccaagaacatataaactaaaaggatctatccaaaatctaaaaggcagtcttgccagttgctatggcccataatgcacacacacacacacacacacacacacacacacacacacacaaaagggctactttttgccatttaggttctgtgtttgaccagctttcaattaaccttgctgggggagagcataagaacctgggtaaatggcatactgaaagagcttcagaataatcattgcgacccctccctgcccccaccccccacgaagcttataggcactaactattcttgtcagctcaattttctaagcagagcaagagcagtgattcatttgatttttgtatgcctgatttctgggaggttggggaggaagacaaagcactgagcaaagaaaacctgctgaccaatgatggaaagttaattgtctactgtcttcaagaggcaaaaagaacagttgaatgaaattgtagcctgcttcacaaagagagttccccagccccttcctacttcacccctcacccaatagattcaatggtcaacctcctggaggatgcagtaaggttccagagacaagcagatctcaactttgataggtcgtattgcccaatgagaagccaccttttagctcaactgcccacactccagctggacagagcagctgaaaaaccacactaagtactgagaaaacttgggcctctcacaagagaagccctaggcctaggccctttgttgttatagttctgaatctgagacttctggaaacaggccaggcccaccaactcccttgcaaccagcacttcgacacttaaaataataaaacagctaggctcagttgcttttgaaagtactagaactacttggtgtgaagttcttaaccaaattccaaattccagggattttgcccaaaataaaatcaattcatccctggcctcagtttatatatgaatgccacatttgtctgctccagacttagaattccaaaaaacagacattttcctctgtagtaaatgaaggagcgtttgtgcttttgcttagcaaaaatgaaaggacaccagggtctccttgggaaccattatgactggttgaacgttaaagctgagtatgggactcacatagtataggccttgttacttctgtggacttttctggaagtttcttgtttactacttctaatgggttttgcctctcccctcaccttgctacctctggaggttttcccaaaagattctgaacctgaattctcagacaccttgatgtttgtcagttacctttagtcttgttttcctctacaatactctatatgcctggaatttttagaatatcttctacatcatcactgtggcccacgcagtggtgttcccattagcacaagaggatttggggcagaaatcatatggtcagagagaacatttaagaccggaagtattcatttaattttttaaattaattttttgtaaagatgggggttttgctatgttgcccacgctggtcttgaactcctgagctcaagcgatcctctcgccttggcctcccaaagtgctgggattaaaggagtaagccactgcacctggcctcatttaatattttgcaacaggtagacgtcccaaataaacaaccaaactgtaaaatttctactaatcactaattaacagaacacaaagcatcttccccactcctaacactcaacctctctcctacctttgattatcataactccactctctctcccacccaggcacttaccacaatgtttgctgccttctgcacctacgctgctgagactggagaagagaggctgaaagcccctctcagaaaggcttgcagagaacccaccactactacaattactagtataaataataatgataataatttttgaaggtggaatagagaagagatttgagtgaaatgaagttggccctaggagctcagcttccatttcaagtcgtccctatcctcttttttcctccccattccagttagtagcaacagatggctctgctagcctgactttgatctagtcaccatccccaggagcggaggttaattgttaaccaaggatgctttgcatttggtgggtagtcagtacatgtttttgagggtagttattcttggtacaatagcaagctttgctggtgtctcctctccttatcctgtactacttggcctgcctcagctcctgactgggcctcccccaccagccccaacttattcctcagccccaacttatccctcagccccaaatcccatgaactgcatccctagcacaacaactcacccataaaggaagtgagacaacaggaagcaaaataattaatgttagcttaatgaccacaaactgaccagttgatctggataaattaccttgaacgtgcaaagacagaggagatcctaccaggctctcctaacaagcactgcacctgacatccagtgtaactatctggacaacacagacccgattgcagtctctctgtacctgtcagtctgagcagatctgtccacgcacctgccctcttcctcatcaatgaacaagttgggaaaaagatgagttcatgctcagtgctctgttcctcactcgttccaccttccattatcaagtctgtgacacaatggtgagctttcgctttaatatgatttgctagggccaggactagggtgaggtgagcgaggcacctagggcgtaaaattcaaagaggtgcccgctctcagggccatgcaagtgccttaccctcgtcccagccctgtgatttgcactctttaaagtaatatcagtttatcttcttcctatgaacaagtatagtccttctgatttggggtcgggggttaactccctatctcttgttgcaccaaatattttattgctacctatttttccattgctataagtctttgtgtgcctatacattaaagaatctttaatagtgttaatatcggaaaacatagttgatttctaagtaatatgctccaggtggcaagttaacacccatttcagcagggatgctcccaaggccagcccttcaacaaaagagtgactgagttgacggtctgtcaccaggatcctccctctcctctttctgctccattctcctaaaccttgcttcccagcaccaactctcttcagtgcctcctacttccttctcctcctaagaaaaacctgctctcaggaaagggataaattcatttactttgagattataaggcttaatgctacctcttttgagggtcagttgcattttaacaagggaaaagccttaagccaatggaatgaagttctacttgcagaatgttaggcatcaactagttgtagaagtgtatttttcaccatggaaaggccaaattccctgacgcctaactccagaatatagaaaatatcttaatcgcctggaatcatttgagttactagctgatggtcaattaaattgtcctgatatccaatgctattcaatatggttactaccaagggactctcagaaatggctactaaaagccactgagaaggcctagatcattcatattgtacattgacatttttacataaatggaattaatactacttaccatttgagtaaagaacacaaggaattgaagagtctgtgaaaatatgtcctgtttgtgaaaggtgaaactgtccaatccatgtccaatcaatgtcagtcgtccagtattggtggtgattattaaacttattggaggtacaactttacctccaataagcttacctttacaagcttctgctttccctgcttcatctctgttatgggctatcagtccagcttggtgtgaaaatgagactatatctataccacagcccccaatcctttcaaaggctttgcatgtatttcagctacaagtgacaaggatattagggatttaaaaggataagagagtgggaaagatgtataaggaagtgcctttgtcaaaaggcagcaaaaagtataatgatataaacataatatgaaataagcaaattttagaatactttgaaacagatttatagaggaatacatagtaaatagttatagacacacatttggggcatttttaataaggttagcaagaagaaatttgcatgagtaatgagcaatgtgaaatgggcattatacttttgttcagtaaagcccaaaatctaggccaatggttctcaaagtgcagttccaggagcagcaacagcagcatccctggagagggagaaagagagagagagagagtgtatgtgtgtgtgtgtgtgtgtgtgtgtgtgtgtgtgtgtgtatgtgcattccagtgatgttactccttcaagcccctgaatcactatagccacgactctccaactgattccaacctttaccattattctggctctcatcataaggaccagtctctggccaagaggtgtatattgttatcttggtcaggcatatgtttgcttggttttaagaaattatcagattgaggagtctcatgttttatgggactccggtgcatatgctcgaaaaaaattaaaaagaacttatcatattggatcaacaaattgctcaacctgcaaaatctttgattagacttagccagcccatctggcctgctttgggtttaaaaaaaaaaaaaagattttttttaactcacaaatggaaaaaagggaaaggtgttaagtttgtttggtattgccagctcttaaatacctgtctttaccgtggtggctgttctccagtaaggctctggcagaagtatatttgattttaagatttttgcctaaatagtagaatttgatagcaacgaactccaaaacaaaatctgaactggaacaactagttaacccctctcagcctctttgtaatgccaagctttatagacatttattccttaggtggtcttgagctttttctaacatccaattttataaaatgttgtgcatgcaaacgcagcattgtgctcattgtacaagtcacctcaaactcattccttcccccatgtgtatcatggcgaagaaatatcaatatatgtatgtgctgaggtcttctgatgaattgtaaattacaaaccttttcattcatttttaaatgagatatatttaccctggctagtggttaaagttttattctttttattatatttcactgctacttttttctactgactccaaagcttactttgggctatatttcttatttctagattgttgtatttatcttatttctatatttatctgcagtcttggaatgttagagctgaaagggaccaacctctctcatttcacacatgaggaagctgaggcccagaaaggtcaaataacttatatacaaggtcacacagtgagtcagtggtggggcccagcctcaattccaggtctcctgcccttgggcccaatctggtttcatttaaagcactacaatttatagaagacccacagctggcttctacttttatgacacatgaatttcccaggtatttcaatgaactaatatatatgctttaagggaaaatgttcaagagttctttaattcattaatccaaagacaaattggattttcagtttataaacattagtttccctccaaattcaatatgtgcaccctacttagtacaatggatgttttccctaaaagttgtgtgaaaaatgagttttttagatatcaagtatcattttttagaggtaaacttcctatgtaagggaaccttctggtgacttctttttgaaaaaccgagattcctcttgtcattgtcccataatgtctctactttttttagtgcaaacttttgtatttggtgtttatttaaaagtagggtacaacccaaccaatattagctttcccagagtctactttagccttcccttcttaatctttatgagaaattttcagactgttaaatgctcatgagatatttagttgtgttctagaaatttcacctggcttgatattctgtcaatccctgggctcaaattccagctccatcttatcaaacaataacagaattccctaatcagtactaagctccgcatgcagtctcttttccagaacattctttgcctaatgttccttagtgtggctctctctttagttggggcctccttccttagtacatgcataccttactattctgtggaattgcaagccatgcatcttttagagccacactagtcaaattgattggcatttccatttattttccattgttcccttgtttctcctggacttcctctcgtttctcttttcgaggatgcttagaggcttctcaccagagattggtgaggtttcccccatcatctagatgggagattgacaaattctgtaaaggttaagacagtaactattttaggctttgtgggctacatgtggtctctgtagcacattcttctttgttgttgctgtttgttcattcgtttgttttgcaacctttggataatgtaaaccactctctttttttttgacagagtctctctctgtagccaggctggagggcaattgtacaatctcggctcattacaacctccacctcccgggttcaggcaattctcctgcctcagcttcccgagtagctgggactataggtgcgtgccaccatgcccagctaatattttttttttttttgtatttttagtagaggcagagtttcaccatgttggccaggatgttctcgatctcctgaccttgtgatccgcccacctcggcctcccaaagtgctgggattacaggtgtgagctaccgcaccctgccaatataaactattcttagctcatgggctatgcaaagccttaggctgacccctgatccagactgtcttctgagacaagcatttctgtgagctgccccatgtgataactgagttgtgcagtagctgatgtggtttattgccttcccatctactgcattgtcagaccagactgactgcacaggagcaggtggaggggggctgcatatgccaaccattactcttcaatagagtgtccttcatgagctctctctctctctcattactgactacctcagtgtagaaaccctcatttttttccccagacctatccttgttacccaatgtgcctctgcttccctgggtttgggataaactggaaggagagaatttctgagttctcttacttattttgttccataacttctccctcatatctgtggttggagactcccacccttgtccaccctttcctgcctcatactagtatcatgagtttagggctgtcgttggaaagtctggcagcccaggccataggattccagttcagcctacgatttcctagggaaatcaccaggttccaaaggctggtttttaaacctagaatatccatgtatccatttcctaatgcagtttggacctgttctagacagagcactcagccttagcaagaaaaccaatgaggtgcagaagatattctgtgcccacagtttttccctgccttctggaccctcagcccctgggatgggctccttgggattgcccatgcaacaacacagccacaagacattcagcacaccacctcctcctgtgttttgaatctctaaatgaattctgttctaaagcttcttcacgtctctctccatcctgctcccatctccacctctaatgcttcttgggagtctgaagctcagattcacattttcacattttctcgtataaacgttgtgggataagaatggatgatatgtatgtgtctgtgtgagtttggtttctcaacctggactgtgagggctaattcacaaatcacaccatacatgcgtgtgtgcatgcgcgcgcgcacacacacacacacacacacacacacacacacagtccagcaccctcatcagttctctggtttaggtccagatctgatgggactggtcaagaaggggatggtgggggctcctgaagcatttgccctttcttgcctcttgagaccttctttccattggcaattcaaaacaggctgacatacagagggctagcactctaatttgatgtggactcagccactcagacctaggtctcaggctgcagcttatcctagctcagcaaattgcttcttagaatctttagcttgatttctgtcatttgagcccagggatctacccacttactgaaatctaaattttaaaaaatcagtgatgaaagtaattttcaggatttccctatttaaaagcatccatgaaacagttcctttatgccttctgtttaggatttccagaattaggaagggaaaccaggcttgtgccttggatccaaaagcagcaaaaatactacacttgccaaaagcaaactgaggaatgagcattggccagtcctagtatgcagtcaagaggtggacttttgttaagttagcccttaccatttagtgcttactgaatgccaacaatgcacttagaaaaataagggagacaagaatttacagaccataccctaaactggaaggtacaggaaagacacatctcctagagctgggaatgtgtccctaacatttcaagaagaagcagaaagtaggagagatcacgatctcagtctttttaggattccaacacaaaatggaagggagccctctgtggggtgatattacaaagggtttttcttgtctttctttaaaaaaaaaaaggcattccttactggcttgctaccagcaattgaactgtattctttatatagctagagctgtttgtgtcttcttaaaataaactttttctgttaaaatca

SEQ ID NO: 13890 - DNA, 452 bp, Homo sapiens
  source 1..452: mol_type = unassigned DNA
aggaagaaaaaagaaggggttagctttggtcctgcctcctttcctttctctcatttgctcgtctctcctccgtccttcgtctggaaatttggtgaacttggccaggaggttccagagcccagggctttccccagcagcctcgtcctctcacctggtccctccttcagctcctgagcacacagtttggaggacagctggacaagtggctggaatgagtagctgcagctaactcgggtcgggaaaatgcgacagcgactgcccactcgaggtcgtcatggcgacagccagtgaacgtgttcctctcctcgggcaggcccccgagtgtagaggagctgcttcgggaggcgcagctcaatctccagagcctgttgcaagaagaatatgaggaacagtactcggaggccagacttgtggggcagaccttccgctcttctgatgaggccactaagccc

SEQ ID NO: 13891 - DNA, 13660 bp, Homo sapiens
  source 1..13660: mol_type = unassigned DNA
ggaggaggagcccggcgaagcagagtcagagggactggtggctccggcgagtgtgcagccccgggggagccggcgctctaggcgaggaacccgtcagcccgcctacccgcccgtcgtctttggcgcccgcacgctctccggcccgcgcccaggggcctgctacacccggagctggggccgccgctcaggggcgctcgggccaggggcgctgctcggggtgagcccgccgcgccgccagactggtcccctgcgcccgcgcccgcggccgggatgccgttctacaggcgcacggtggtaccccagcgcctgtgcccgcgcaacccgccgcagcagctggcggagctccgcgacgtgagccacctggcagcgctcagcctgctccggcagctcgccgacctctgtggccactcgttggctctgctcgaggacctcgaggggcacctgctggccctggggcgccgcacagacagcctgtaccggcgcaccgtgcgcctccgccgccgccttccctgccgcctgcttggcccggaggaggacgaggaagagctagctgcagctaactcgggtcgggaaaatgcgacagcgactgcccactcgaggtcgtcatggcgacagccagtgaacgtgttcctctcctcgggcaggcccccgagtgtagaggagctgcttcgggaggcgcagctcaatctccagagcctgttgcaagaagaatatgaggaacagtactcggaggccagacttgtggggcagaccttccgctcttctgatgaggccactaagcccacccccaacccaaggccccagtctgccaggcgtctggagtttatattgatgcctacaaaacggcagctgagcgaggatgagactaccacccagggtgtgagggcccccgaggcctccctgagcctgtctaccacagccgacaagcaaactgcctggaatagccttttccctctgcccatcctagaggagaagcggtggcctcagctttgctccacgcagtctgacattgtgcccatcaacatctctgggcagcagtttgataaacatgcaagtttgcgacactcgttgtttaacacagagacagccgtgaaccccaagtccaccctgaggcggaggcggaccattattggattctctaacttttcccagcgagaccaaggtcacagcaacagcccagcaggcagtgtggcccactctaccacctccgacatcaggcccagtcactcagttccagaaggggttcatggaagagttgcagttggtcaggatgctcggttcccaagtctcacctcgccagtactgagaactccttccagtgagccggacgaacctcaccaggcacggagtggcccaaaccctcctggcatggagagcatgggaatggtgtacagtgtccccagttcttgcaatggacctacagaatcaaccttctccacttcctggaagggagatgcttttacctacatgactccaagtgccaccagccagagcaatcaagtcaatgaaaatgggaaaaatccttcctgtgggaattcttgggtctctctaaacaaagtcccacctctggttcctaaggaggctgctaccctccttgtcgctcgtgataacccagcaggatgcagtgggtcagctggctaccctgagcgccttattcagcaaaggcacatgcccgaaagaccctccaagattggccttctgaccagtgggacctcgaggctggagacaggccccggtggggccagcagattccgggagcggtcactgtctgtgcccacagactcaggcaccacagatgtggactatgatgaggagcagaaggccaatgaggcctgtgccctgccttttgccagtacgagctctgagggcagtaacagtgctgacaacattgcctcccttagtgcccagcaagaggcccagcacagaaggcagaggtccaagagtatctcacttaggaaggccaaaaagaagccttccccacccacacgcagtgtctcactggtcaaagatgagccaggcctcttgcctgaaggtgggtcagcactacccaaggaccagaggcccaagagcctttgcctctccttggaacatcaaggacatcactcgtcccacccagatgctcagggtcacccagctattccaaaccacaaagatccagaaagtacacaattctcccaccactggtatcttactgactggaagtctggtgacacctaccaatccctgtccagctccagcactgccactggcaccacagtcattgagtgcacccaagttcagggcagctcagagtctcttgcctcaccttccacctccagagccactacaccttcccaactctccattgaagtggaggccagggagatatcatccccgggaaggccccctggactgatgtcaccctccagtggctactccagccagtcggaaacaccaacacccactgtttccatgtccctgaccctgggccacttaccccctccaagcagcagtgtccgggtacgtccagtggtacctgagaggaagtcatcactacccccgacgtcaccaatggagaaatttcccaagtcacggctatcatttgacctaccactgacctcttcacccaacctggatctgtctgggatgagtatctccatccgaagcaaaactaaggtgagtcggcaccactcagagacaaattttggcgtcaagctggcccagaaaactaatcccaaccagccaatcatgcctatggttactcagtccgacctacgttctgttcgcctgaggtcggtcagcaagtctgagccggaagatgatattgagagccctgagtatgccgaggaacccagagcagaagaagtcttcaccttgccagagagaaagacaaaacctcccgtagctgagaagcctccggtggcccggaggcctccaagcttggtccacaagccaccatctgttcctgaggagtatgcactaacttcaccaaccttggctatgccccccaggagctcaattcaacatgcgagaccactccctcaagacagctacacggtagtgcggaaaccaaagccctccagcttcccagatggcagaagcccaggggagtcaacagcaccctcatctcttgttttcacgccttttgccagttcctctgatgctttcttctcaggaacacagcagcctccccagggaagtgtagaggacgagggccccaaggtgagggttctgcctgaaagaattagcctccagagccaggaagaagctgagaaaaagaaaggcaagattccacctcccgtaccaaaaaaacccagcgtgctgtacctgcctctcacttctcccacagctcaaatggaggcctatgtggcagaaccaaggctgcctctcagccccatcatcaccctggaggaagacaccaagtgtcccgccaccggcgatgacctgcaatcacttggtcaaagggtgacttcaactcctcaggctgacagtgaaagggaggcaagccctctggggagttctgtggaaccaggcaccgaagaaaaaagtttaatcagtgataaaacagctgaatggattgcagaggatgatgatgacgtgtttgtggcttcacgcacaactgaagatttatttactgtgatacacaggtccaaaaggaagctgctcggctggaaggaacctggtgaggcctttgtgggtggcagaacgagttcccactcaccaataaagaacacagctgagtctccaatcagtgagtctaccgccactgcagggtcaggcagcagtgccaacctagatgctggcagaaatgacgatttcaaggccttgctacagaagaagggaagtaaggcaactccaaggtctcgtccctcagcagctgaacttctgaagaccactaacccactggctcggagaattattgcacaattttcaaaagactatgaaaccaccgataaccccagtacctaagccctgggctcaacaagcagggtttacttactaaacttgagtagagaagggggaagagaaagggtctttaaacagaaccatgggaacaacagagcctacatttcttttatattaactcacactctggacagcaggagagaggctacttcatctagagctaaaatcatctggcacttaatcatcttcagacatttttatgttttcatacttataagcttgtcatgactgactaccgagtttcttcttattttcccccagtggtgtgcactaactaagaagaaattttcagatgtcagggcacatgtgccactttttcaattcagtgacccggctgctccatccctggctcctgtcactgaggagtgcagtgtgagagcagattggaggctgccaaacttggggggcatagggtgccattgcttattattcactttcctagggaggctctgatggccctgtgtgcaaacacagaaagactctgatgcctcctcaaccacagtttagctttcccctgcgctcacaagaggtttgcagggtgcacttatttcggcatgaggttgattggatggcttttgtggtgcaaaatatgactgtgactctgtcctgaaacttaatgcctttttcagtttgattgtctacatggagatcagggtgataagtttcaataaacatatagacgcccccccacccacccccattagctagaaaagaccaggactgggttgctttaaatgaaccaagcttgaccaacaaacaagacagccatttgttcactcagatctagccgaggtaactcacaagtgcaccttgagatcctccatgtgtctgtcaacagcgataggcaggatctgcgcccagctcatgctgcattctaagaactctcatttcatttgcatataaaattcattacaggaagtaattaactgaaggaacagcatcatcaaaggctcaaggataatggaaagtaagtgcatcttgccccccaccagtcaattcagatcgtggtttgtggttggtttggttttgtttaaaggaagtccgactctgttccaaaaaccaagaacatataaactaaaaggatctatccaaaatctaaaaggcagtcttgccagttgctatggcccataatgcacacacacacacacacacacacacacacacacacacacacaaaagggctactttttgccatttaggttctgtgtttgaccagctttcaattaaccttgctgggggagagcataagaacctgggtaaatggcatactgaaagagcttcagaataatcattgcgacccctccctgcccccaccccccacgaagcttataggcactaactattcttgtcagctcaattttctaagcagagcaagagcagtgattcatttgatttttgtatgcctgatttctgggaggttggggaggaagacaaagcactgagcaaagaaaacctgctgaccaatgatggaaagttaattgtctactgtcttcaagaggcaaaaagaacagttgaatgaaattgtagcctgcttcacaaagagagttccccagccccttcctacttcacccctcacccaatagattcaatggtcaacctcctggaggatgcagtaaggttccagagacaagcagatctcaactttgataggtcgtattgcccaatgagaagccaccttttagctcaactgcccacactccagctggacagagcagctgaaaaaccacactaagtactgagaaaacttgggcctctcacaagagaagccctaggcctaggccctttgttgttatagttctgaatctgagacttctggaaacaggccaggcccaccaactcccttgcaaccagcacttcgacacttaaaataataaaacagctaggctcagttgcttttgaaagtactagaactacttggtgtgaagttcttaaccaaattccaaattccagggattttgcccaaaataaaatcaattcatccctggcctcagtttatatatgaatgccacatttgtctgctccagacttagaattccaaaaaacagacattttcctctgtagtaaatgaaggagcgtttgtgcttttgcttagcaaaaatgaaaggacaccagggtctccttgggaaccattatgactggttgaacgttaaagctgagtatgggactcacatagtataggccttgttacttctgtggacttttctggaagtttcttgtttactacttctaatgggttttgcctctcccctcaccttgctacctctggaggttttcccaaaagattctgaacctgaattctcagacaccttgatgtttgtcagttacctttagtcttgttttcctctacaatactctatatgcctggaatttttagaatatcttctacatcatcactgtggcccacgcagtggtgttcccattagcacaagaggatttggggcagaaatcatatggtcagagagaacatttaagaccggaagtattcatttaattttttaaattaattttttgtaaagatgggggttttgctatgttgcccacgctggtcttgaactcctgagctcaagcgatcctctcgccttggcctcccaaagtgctgggattaaaggagtaagccactgcacctggcctcatttaatattttgcaacaggtagacgtcccaaataaacaaccaaactgtaaaatttctactaatcactaattaacagaacacaaagcatcttccccactcctaacactcaacctctctcctacctttgattatcataactccactctctctcccacccaggcacttaccacaatgtttgctgccttctgcacctacgctgctgagactggagaagagaggctgaaagcccctctcagaaaggcttgcagagaacccaccactactacaattactagtataaataataatgataataatttttgaaggtggaatagagaagagatttgagtgaaatgaagttggccctaggagctcagcttccatttcaagtcgtccctatcctcttttttcctccccattccagttagtagcaacagatggctctgctagcctgactttgatctagtcaccatccccaggagcggaggttaattgttaaccaaggatgctttgcatttggtgggtagtcagtacatgtttttgagggtagttattcttggtacaatagcaagctttgctggtgtctcctctccttatcctgtactacttggcctgcctcagctcctgactgggcctcccccaccagccccaacttattcctcagccccaacttatccctcagccccaaatcccatgaactgcatccctagcacaacaactcacccataaaggaagtgagacaacaggaagcaaaataattaatgttagcttaatgaccacaaactgaccagttgatctggataaattaccttgaacgtgcaaagacagaggagatcctaccaggctctcctaacaagcactgcacctgacatccagtgtaactatctggacaacacagacccgattgcagtctctctgtacctgtcagtctgagcagatctgtccacgcacctgccctcttcctcatcaatgaacaagttgggaaaaagatgagttcatgctcagtgctctgttcctcactcgttccaccttccattatcaagtctgtgacacaatggtgagctttcgctttaatatgatttgctagggccaggactagggtgaggtgagcgaggcacctagggcgtaaaattcaaagaggtgcccgctctcagggccatgcaagtgccttaccctcgtcccagccctgtgatttgcactctttaaagtaatatcagtttatcttcttcctatgaacaagtatagtccttctgatttggggtcgggggttaactccctatctcttgttgcaccaaatattttattgctacctatttttccattgctataagtctttgtgtgcctatacattaaagaatctttaatagtgttaatatcggaaaacatagttgatttctaagtaatatgctccaggtggcaagttaacacccatttcagcagggatgctcccaaggccagcccttcaacaaaagagtgactgagttgacggtctgtcaccaggatcctccctctcctctttctgctccattctcctaaaccttgcttcccagcaccaactctcttcagtgcctcctacttccttctcctcctaagaaaaacctgctctcaggaaagggataaattcatttactttgagattataaggcttaatgctacctcttttgagggtcagttgcattttaacaagggaaaagccttaagccaatggaatgaagttctacttgcagaatgttaggcatcaactagttgtagaagtgtatttttcaccatggaaaggccaaattccctgacgcctaactccagaatatagaaaatatcttaatcgcctggaatcatttgagttactagctgatggtcaattaaattgtcctgatatccaatgctattcaatatggttactaccaagggactctcagaaatggctactaaaagccactgagaaggcctagatcattcatattgtacattgacatttttacataaatggaattaatactacttaccatttgagtaaagaacacaaggaattgaagagtctgtgaaaatatgtcctgtttgtgaaaggtgaaactgtccaatccatgtccaatcaatgtcagtcgtccagtattggtggtgattattaaacttattggaggtacaactttacctccaataagcttacctttacaagcttctgctttccctgcttcatctctgttatgggctatcagtccagcttggtgtgaaaatgagactatatctataccacagcccccaatcctttcaaaggctttgcatgtatttcagctacaagtgacaaggatattagggatttaaaaggataagagagtgggaaagatgtataaggaagtgcctttgtcaaaaggcagcaaaaagtataatgatataaacataatatgaaataagcaaattttagaatactttgaaacagatttatagaggaatacatagtaaatagttatagacacacatttggggcatttttaataaggttagcaagaagaaatttgcatgagtaatgagcaatgtgaaatgggcattatacttttgttcagtaaagcccaaaatctaggccaatggttctcaaagtgcagttccaggagcagcaacagcagcatccctggagagggagaaagagagagagagagagtgtatgtgtgtgtgtgtgtgtgtgtgtgtgtgtgtgtgtgtgtatgtgcattccagtgatgttactccttcaagcccctgaatcactatagccacgactctccaactgattccaacctttaccattattctggctctcatcataaggaccagtctctggccaagaggtgtatattgttatcttggtcaggcatatgtttgcttggttttaagaaattatcagattgaggagtctcatgttttatgggactccggtgcatatgctcgaaaaaaattaaaaagaacttatcatattggatcaacaaattgctcaacctgcaaaatctttgattagacttagccagcccatctggcctgctttgggtttaaaaaaaaaaaaaagattttttttaactcacaaatggaaaaaagggaaaggtgttaagtttgtttggtattgccagctcttaaatacctgtctttaccgtggtggctgttctccagtaaggctctggcagaagtatatttgattttaagatttttgcctaaatagtagaatttgatagcaacgaactccaaaacaaaatctgaactggaacaactagttaacccctctcagcctctttgtaatgccaagctttatagacatttattccttaggtggtcttgagctttttctaacatccaattttataaaatgttgtgcatgcaaacgcagcattgtgctcattgtacaagtcacctcaaactcattccttcccccatgtgtatcatggcgaagaaatatcaatatatgtatgtgctgaggtcttctgatgaattgtaaattacaaaccttttcattcatttttaaatgagatatatttaccctggctagtggttaaagttttattctttttattatatttcactgctacttttttctactgactccaaagcttactttgggctatatttcttatttctagattgttgtatttatcttatttctatatttatctgcagtcttggaatgttagagctgaaagggaccaacctctctcatttcacacatgaggaagctgaggcccagaaaggtcaaataacttatatacaaggtcacacagtgagtcagtggtggggcccagcctcaattccaggtctcctgcccttgggcccaatctggtttcatttaaagcactacaatttatagaagacccacagctggcttctacttttatgacacatgaatttcccaggtatttcaatgaactaatatatatgctttaagggaaaatgttcaagagttctttaattcattaatccaaagacaaattggattttcagtttataaacattagtttccctccaaattcaatatgtgcaccctacttagtacaatggatgttttccctaaaagttgtgtgaaaaatgagttttttagatatcaagtatcattttttagaggtaaacttcctatgtaagggaaccttctggtgacttctttttgaaaaaccgagattcctcttgtcattgtcccataatgtctctactttttttagtgcaaacttttgtatttggtgtttatttaaaagtagggtacaacccaaccaatattagctttcccagagtctactttagccttcccttcttaatctttatgagaaattttcagactgttaaatgctcatgagatatttagttgtgttctagaaatttcacctggcttgatattctgtcaatccctgggctcaaattccagctccatcttatcaaacaataacagaattccctaatcagtactaagctccgcatgcagtctcttttccagaacattctttgcctaatgttccttagtgtggctctctctttagttggggcctccttccttagtacatgcataccttactattctgtggaattgcaagccatgcatcttttagagccacactagtcaaattgattggcatttccatttattttccattgttcccttgtttctcctggacttcctctcgtttctcttttcgaggatgcttagaggcttctcaccagagattggtgaggtttcccccatcatctagatgggagattgacaaattctgtaaaggttaagacagtaactattttaggctttgtgggctacatgtggtctctgtagcacattcttctttgttgttgctgtttgttcattcgtttgttttgcaacctttggataatgtaaaccactctctttttttttgacagagtctctctctgtagccaggctggagggcaattgtacaatctcggctcattacaacctccacctcccgggttcaggcaattctcctgcctcagcttcccgagtagctgggactataggtgcgtgccaccatgcccagctaatattttttttttttttgtatttttagtagaggcagagtttcaccatgttggccaggatgttctcgatctcctgaccttgtgatccgcccacctcggcctcccaaagtgctgggattacaggtgtgagctaccgcaccctgccaatataaactattcttagctcatgggctatgcaaagccttaggctgacccctgatccagactgtcttctgagacaagcatttctgtgagctgccccatgtgataactgagttgtgcagtagctgatgtggtttattgccttcccatctactgcattgtcagaccagactgactgcacaggagcaggtggaggggggctgcatatgccaaccattactcttcaatagagtgtccttcatgagctctctctctctctcattactgactacctcagtgtagaaaccctcatttttttccccagacctatccttgttacccaatgtgcctctgcttccctgggtttgggataaactggaaggagagaatttctgagttctcttacttattttgttccataacttctccctcatatctgtggttggagactcccacccttgtccaccctttcctgcctcatactagtatcatgagtttagggctgtcgttggaaagtctggcagcccaggccataggattccagttcagcctacgatttcctagggaaatcaccaggttccaaaggctggtttttaaacctagaatatccatgtatccatttcctaatgcagtttggacctgttctagacagagcactcagccttagcaagaaaaccaatgaggtgcagaagatattctgtgcccacagtttttccctgccttctggaccctcagcccctgggatgggctccttgggattgcccatgcaacaacacagccacaagacattcagcacaccacctcctcctgtgttttgaatctctaaatgaattctgttctaaagcttcttcacgtctctctccatcctgctcccatctccacctctaatgcttcttgggagtctgaagctcagattcacattttcacattttctcgtataaacgttgtgggataagaatggatgatatgtatgtgtctgtgtgagtttggtttctcaacctggactgtgagggctaattcacaaatcacaccatacatgcgtgtgtgcatgcgcgcgcgcacacacacacacacacacacacacacacacacagtccagcaccctcatcagttctctggtttaggtccagatctgatgggactggtcaagaaggggatggtgggggctcctgaagcatttgccctttcttgcctcttgagaccttctttccattggcaattcaaaacaggctgacatacagagggctagcactctaatttgatgtggactcagccactcagacctaggtctcaggctgcagcttatcctagctcagcaaattgcttcttagaatctttagcttgatttctgtcatttgagcccagggatctacccacttactgaaatctaaattttaaaaaatcagtgatgaaagtaattttcaggatttccctatttaaaagcatccatgaaacagttcctttatgccttctgtttaggatttccagaattaggaagggaaaccaggcttgtgccttggatccaaaagcagcaaaaatactacacttgccaaaagcaaactgaggaatgagcattggccagtcctagtatgcagtcaagaggtggacttttgttaagttagcccttaccatttagtgcttactgaatgccaacaatgcacttagaaaaataagggagacaagaatttacagaccataccctaaactggaaggtacaggaaagacacatctcctagagctgggaatgtgtccctaacatttcaagaagaagcagaaagtaggagagatcacgatctcagtctttttaggattccaacacaaaatggaagggagccctctgtggggtgatattacaaagggtttttcttgtctttctttaaaaaaaaaaaggcattccttactggcttgctaccagcaattgaactgtattctttatatagctagagctgtttgtgtcttcttaaaataaactttttctgttaaaatca

SEQ ID NO: 13892 - DNA, 5412 bp, Homo sapiens
  source 1..5412: mol_type = unassigned DNA
accgggtttgcgggaccgcagttcgggaacatgttggcctcgagcagccggatccgggctgcgtggacgcgggcgctgctgctgccgctgctgctggcggggcctgtgggctgcctgagccgccaggagctctttcccttcggccccggacagggggacctggagctggaggacggggatgacttcgtctctcctgccctggagctgagtggggcgctccgcttctacgacagatccgacatcgacgcagtctacgtcaccacaaatggcatcattgctacgagtgaacccccggccaaagaatcccatcccgggctcttcccaccaacattcggtgcagtcgcccctttcctggcggacttggacacgaccgatggcctggggaaggtttattatcgagaagacttatccccctccatcactcagcgagcagcagagtgtgtccacagagggttcccggagatctctttccagcctagtagcgcggtggttgtcacttgggaatccgtggccccctaccaagggcccagcagggacccagaccagaaaggcaagagaaacacgttccaggctgttctagcctcctctgattccagctcctatgccattttcctttatcctgaggatggtctgcagttccatacgacattctcaaagaaggaaaacaaccaagttcctgccgtggttgcattcagtcaaggttcagtgggattcttatggaagagcaacggagcttataacatatttgctaatgacagggaatcagttgaaaatttggccaagagtagtaactctgggcagcagggtgtctgggtgtttgagattgggagtccagccaccaccaatggcgtggtgcctgcagacgtgatcctcggaactgaagatggggcagagtatgatgatgaggatgaagattatgacctggcgaccactcgtctgggcctggaggatgtgggcaccacgcccttctcctacaaggctctgagaaggggaggtgctgacacatacagtgtgcccagcgtcctctccccgcgccgggcagctaccgaaaggccccttggacctcccacagagagaaccaggtctttccagttggcagtggagacttttcaccagcagcaccctcaggtcatagatgtggatgaagttgaggaaacaggagttgttttcagctataacacggattcccgccagacgtgtgctaacaacagacaccagtgctcggtgcacgcagagtgcagggactacgccacgggcttctgctgcagctgtgtcgctggctatacgggcaatggcaggcaatgtgttgcagaaggttccccccagcgagtcaatggcaaggtgaaaggaaggatctttgtggggagcagccaggtccccattgtctttgagaacactgacctccactcttacgtagtaatgaaccacgggcgctcctacacagccatcagcaccattcccgagaccgttggatattctctgcttccactggccccagttggaggcatcattggatggatgtttgcagtggagcaggacggattcaagaatgggttcagcatcaccgggggtgagttcactcgccaggctgaggtgaccttcgtggggcacccgggcaatctggtcattaagcagcggttcagcggcatcgatgagcatgggcacctgaccatcgacacggagctggagggccgcgtgccgcagattccgttcggctcctccgtgcacattgagccctacacggagctgtaccactactccacctcagtgatcacttcctcctccacccgggagtacacggtgactgagcccgagcgagatggggcatctccttcacgcatctacacttaccagtggcgccagaccatcaccttccaggaatgcgtccacgatgactcccggccagccctgcccagcacccagcagctctcggtggacagcgtgttcgtcctgtacaaccaggaggagaagatcttgcgctatgctctcagcaactccattgggcctgtgagggaaggctcccctgatgctcttcagaatccctgctacatcggcactcatgggtgtgacaccaacgcggcctgtcgccctggtcccaggacacagttcacctgcgagtgctccatcggcttccgaggagacgggcgaacctgctatgaggtggagaaaacccggtgccagcacgagcgagaacacattctcggggcagcgggggcgacagacccacagcgacccattcctccggggctgttcgttcctgagtgcgatgcgcacgggcactacgcgcccacccagtgccacggcagcaccggctactgctggtgcgtggatcgcgacggccgcgaggtggagggcaccaggaccaggcccgggatgacgcccccgtgtctgagtacagtggctcccccgattcaccaaggacctgcggtgcctaccgccgtgatccccttgcctcctgggacccatttactctttgcccagactgggaagattgagcgcctgcccctggagggaaataccatgaggaagacagaagcaaaggcgttccttcatgtcccggctaaagtcatcattggactggcctttgactgcgtggacaagatggtttactggacggacatcactgagccttccattgggagagctagtctacatggtggagagccaaccaccatcattagacaagatcttggaagtccagaaggtatcgctgttgatcaccttggccgcaacatcttctggacagactctaacctggatcgaatagaagtggcgaagctggacggcacgcagcgccgggtgctctttgagactgacttggtgaatcccagaggcattgtaacggattccgtgagagggaacctttactggacagactggaacagagataaccccaagattgaaacttcctacatggacggcacgaaccggaggatccttgtgcaggatgacctgggcttgcccaatggactgaccttcgatgcgttctcatctcagctctgctgggtggatgcaggcaccaatcgggcggaatgcctgaaccccagtcagcccagcagacgcaaggctctcgaagggctccagtatccttttgctgtgacgagctacgggaagaatctgtatttcacagactggaagatgaattccgtggttgctctcgatcttgcaatttccaaggagacggatgctttccaaccccacaagcagacccggctgtatggcatcaccacggccctgtctcagtgtccgcaaggccataactactgctcagtgaacaatggcggctgcacccacctatgcttggccaccccagggagcaggacctgccgttgccctgacaacaccttgggagttgactgtatcgaacagaaatgaagacaagagtgccttatttcctttccaagtatttcacagcaacactctacttgaagcaacttggtccagattgaaaagtgtcctctggctgagtggccactaggcccagacccagcccagcctgagccccaacaacttttccctcactgttccccaaaacatgcaccctggacttctctaatagaaaagtctccacccctacacaaggacagaaccctccacccctacccccaaccctcagacagacttatacacccctgagtgaggattacatgcccatcccagtgtcctaggaccttttcccaatactagccccccagtggtgaacagaacctcccaaatttgagttgcacccttccctgtggccttatgagctcagcctcgctttgaggtacccaccgtcctgtcagctccttgacctatgagccggggcctgactaggaaaagttgggagttaaggaggaaattagcattccttaatgttttgttttggtgctctgaatttcttctttattatagtcctatagttttactcctcagttcctcaccatcatcatcttgtctaagacccccattataatattcatgcgctgctttttcatcaaaacctaccctgtcctagagatctatgggcatttggtggatgataatgagcagcccctcccagatagaatgtcaatatttgagcagtaggatattggcatttgttagttaaaggcttaaatcaaaagaatgtccaatggtaggaatttcaaggtgtaggtcagatatttgagaataggggatttttttgatgtgccttaaattataccaaagattactaattattcctctttgcccaaaatacttgcatccaaggttctagtctctgttgctgtgctggtctttagccccactgcttgcactgatgtccctccttttcacggagacctatctgaggtacaggatggggctggcaccagatgatgtcccaccacagtccctcacctccggcctccacatgacagaaccaatttacactcaaccatgacctcacccctccttggtttctccctcgatctgtggccctttttggatgtattcttatctaacaacacaatccggaaagactgaattgaatatttatactaatggttcatatcctttattgctcaatgatctaattaaagggatcattgccacatttcatgtttatatttctacaatttgtttagaaaacatctcctgaccatatcagtagctcgtgttatctttttatcaactgcttcccagagtcctaaaacaatagaaattttggattgaaaagttcagcataaggagtttgagtcagtaaaggatgggataaaggagtcgagatgattcaatgaaaagtatcacaaaaaagagattgatcaacaagagaaataaaaaagcccaagaggaagtggtaggggaaggaatttaagaacagcaataagtaaaactcttaagtaactccaaaaagaaaatggtacattttgccaaagaccacttatacttgagaacatggaagaatttgcctgatactctctttggggaaaagagtctctcctcttttcctcaaaccccagtacactcagcctctctgccccaccttctcctgactttgtcctcacttgcttctgcagtacattggaacctgaattgaaagaaagtcttccttgaataattggagtttgtcttgagaggcaaatatagccccaagaatcacaagattcgaggaccatgtaggtcttttacgtagcccaaatccataaattagtctcactttttgtatttatcgtttcatattaaaccctctatatcaaatgttcatcatgattttgtatgatttttataactattttattcattttattagatttattctaaaattttttaatggtaaattcttaaactgtggaaaccactgaaggtgcttattaactgttctcccagatttgtacaagtattggatgattccttgagtttacagctgtacaaatagtgtggaaaataaactttttttaaaaaagaaaa

SEQ ID NO: 13893 - DNA, 5864 bp, Homo sapiens
  source 1..5864: mol_type = unassigned DNA
ggctgccaggggcgtccggttacatccccgccttcctctgtcctggccgcgggaccgggtttgcgggaccgcagttcgggaacatgttggcctcgagcagccggatccgggctgcgtggacgcgggcgctgctgctgccgctgctgctggcggggcctgtgggctgcctgagccgccaggagctctttcccttcggccccggacagggggacctggagctggaggacggggatgacttcgtctctcctgccctggagctgagtggggcgctccgcttctacgacagatccgacatcgacgcagtctacgtcaccacaaatggcatcattgctacgagtgaacccccggccaaagaatcccatcccgggctcttcccaccaacattcggtgcagtcgcccctttcctggcggacttggacacgaccgatggcctggggaaggtttattatcgagaagacttatccccctccatcactcagcgagcagcagagtgtgtccacagagggttcccggagatctctttccagcctagtagcgcggtggttgtcacttgggaatccgtggccccctaccaagggcccagcagggacccagaccagaaaggcaagagaaacacgttccaggctgttctagcctcctctgattccagctcctatgccattttcctttatcctgaggatggtctgcagttccatacgacattctcaaagaaggaaaacaaccaagttcctgccgtggttgcattcagtcaaggttcagtgggattcttatggaagagcaacggagcttataacatatttgctaatgacagggaatcagttgaaaatttggccaagagtagtaactctgggcagcagggtgtctgggtgtttgagattgggagtccagccaccaccaatggcgtggtgcctgcagacgtgatcctcggaactgaagatggggcagagtatgatgatgaggatgaagattatgacctggcgaccactcgtctgggcctggaggatgtgggcaccacgcccttctcctacaaggctctgagaaggggaggtgctgacacatacagtgtgcccagcgtcctctccccgcgccgggcagctaccgaaaggccccttggacctcccacagagagaaccaggtctttccagttggcagtggagacttttcaccagcagcaccctcaggtcatagatgtggatgaagttgaggaaacaggagttgttttcagctataacacggattcccgccagacgtgtgctaacaacagacaccagtgctcggtgcacgcagagtgcagggactacgccacgggcttctgctgcagctgtgtcgctggctatacgggcaatggcaggcaatgtgttgcagaaggttccccccagcgagtcaatggcaaggtgaaaggaaggatctttgtggggagcagccaggtccccattgtctttgagaacactgacctccactcttacgtagtaatgaaccacgggcgctcctacacagccatcagcaccattcccgagaccgttggatattctctgcttccactggccccagttggaggcatcattggatggatgtttgcagtggagcaggacggattcaagaatgggttcagcatcaccgggggtgagttcactcgccaggctgaggtgaccttcgtggggcacccgggcaatctggtcattaagcagcggttcagcggcatcgatgagcatgggcacctgaccatcgacacggagctggagggccgcgtgccgcagattccgttcggctcctccgtgcacattgagccctacacggagctgtaccactactccacctcagtgatcacttcctcctccacccgggagtacacggtgactgagcccgagcgagatggggcatctccttcacgcatctacacttaccagtggcgccagaccatcaccttccaggaatgcgtccacgatgactcccggccagccctgcccagcacccagcagctctcggtggacagcgtgttcgtcctgtacaaccaggaggagaagatcttgcgctatgctctcagcaactccattgggcctgtgagggaaggctcccctgatgctcttcagaatccctgctacatcggcactcatgggtgtgacaccaacgcggcctgtcgccctggtcccaggacacagttcacctgcgagtgctccatcggcttccgaggagacgggcgaacctgctatgatattgatgaatgttcagaacaaccctcagtgtgtgggagccacacaatctgcaataatcacccaggaaccttccgctgcgagtgtgtggagggctaccagttttcagatgagggaacgtgtgtggctgtcgtggaccagcgccccatcaactactgtgaaactggccttcataactgcgacataccccagcgggcccagtgtatctacacaggaggctcctcctacacctgttcctgcttgccaggcttttctggggatggccaagcctgccaagatgtagatgaatgccagccaagccgatgtcaccctgacgccttctgctacaacactccaggctctttcacgtgccagtgcaaacctggttatcagggagacggcttccgttgcgtgcccggagaggtggagaaaacccggtgccagcacgagcgagaacacattctcggggcagcgggggcgacagacccacagcgacccattcctccggggctgttcgttcctgagtgcgatgcgcacgggcactacgcgcccacccagtgccacggcagcaccggctactgctggtgcgtggatcgcgacggccgcgaggtggagggcaccaggaccaggcccgggatgacgcccccgtgtctgagtacagtggctcccccgattcaccaaggacctgcggtgcctaccgccgtgatccccttgcctcctgggacccatttactctttgcccagactgggaagattgagcgcctgcccctggagggaaataccatgaggaagacagaagcaaaggcgttccttcatgtcccggctaaagtcatcattggactggcctttgactgcgtggacaagatggtttactggacggacatcactgagccttccattgggagagctagtctacatggtggagagccaaccaccatcattagacaagatcttggaagtccagaaggtatcgctgttgatcaccttggccgcaacatcttctggacagactctaacctggatcgaatagaagtggcgaagctggacggcacgcagcgccgggtgctctttgagactgacttggtgaatcccagaggcattgtaacggattccgtgagagggaacctttactggacagactggaacagagataaccccaagattgaaacttcctacatggacggcacgaaccggaggatccttgtgcaggatgacctgggcttgcccaatggactgaccttcgatgcgttctcatctcagctctgctgggtggatgcaggcaccaatcgggcggaatgcctgaaccccagtcagcccagcagacgcaaggctctcgaagggctccagtatccttttgctgtgacgagctacgggaagaatctgtatttcacagactggaagatgaattccgtggttgctctcgatcttgcaatttccaaggagacggatgctttccaaccccacaagcagacccggctgtatggcatcaccacggccctgtctcagtgtccgcaaggccataactactgctcagtgaacaatggcggctgcacccacctatgcttggccaccccagggagcaggacctgccgttgccctgacaacaccttgggagttgactgtatcgaacagaaatgaagacaagagtgccttatttcctttccaagtatttcacagcaacactctacttgaagcaacttggtccagattgaaaagtgtcctctggctgagtggccactaggcccagacccagcccagcctgagccccaacaacttttccctcactgttccccaaaacatgcaccctggacttctctaatagaaaagtctccacccctacacaaggacagaaccctccacccctacccccaaccctcagacagacttatacacccctgagtgaggattacatgcccatcccagtgtcctaggaccttttcccaatactagccccccagtggtgaacagaacctcccaaatttgagttgcacccttccctgtggccttatgagctcagcctcgctttgaggtacccaccgtcctgtcagctccttgacctatgagccggggcctgactaggaaaagttgggagttaaggaggaaattagcattccttaatgttttgttttggtgctctgaatttcttctttattatagtcctatagttttactcctcagttcctcaccatcatcatcttgtctaagacccccattataatattcatgcgctgctttttcatcaaaacctaccctgtcctagagatctatgggcatttggtggatgataatgagcagcccctcccagatagaatgtcaatatttgagcagtaggatattggcatttgttagttaaaggcttaaatcaaaagaatgtccaatggtaggaatttcaaggtgtaggtcagatatttgagaataggggatttttttgatgtgccttaaattataccaaagattactaattattcctctttgcccaaaatacttgcatccaaggttctagtctctgttgctgtgctggtctttagccccactgcttgcactgatgtccctccttttcacggagacctatctgaggtacaggatggggctggcaccagatgatgtcccaccacagtccctcacctccggcctccacatgacagaaccaatttacactcaaccatgacctcacccctccttggtttctccctcgatctgtggccctttttggatgtattcttatctaacaacacaatccggaaagactgaattgaatatttatactaatggttcatatcctttattgctcaatgatctaattaaagggatcattgccacatttcatgtttatatttctacaatttgtttagaaaacatctcctgaccatatcagtagctcgtgttatctttttatcaactgcttcccagagtcctaaaacaatagaaattttggattgaaaagttcagcataaggagtttgagtcagtaaaggatgggataaaggagtcgagatgattcaatgaaaagtatcacaaaaaagagattgatcaacaagagaaataaaaaagcccaagaggaagtggtaggggaaggaatttaagaacagcaataagtaaaactcttaagtaactccaaaaagaaaatggtacattttgccaaagaccacttatacttgagaacatggaagaatttgcctgatactctctttggggaaaagagtctctcctcttttcctcaaaccccagtacactcagcctctctgccccaccttctcctgactttgtcctcacttgcttctgcagtacattggaacctgaattgaaagaaagtcttccttgaataattggagtttgtcttgagaggcaaatatagccccaagaatcacaagattcgaggaccatgtaggtcttttacgtagcccaaatccataaattagtctcactttttgtatttatcgtttcatattaaaccctctatatcaaatgttcatcatgattttgtatgatttttataactattttattcattttattagatttattctaaaattttttaatggtaaattcttaaactgtggaaaccactgaaggtgcttattaactgttctcccagatttgtacaagtattggatgattccttgagtttacagctgtacaaatagtgtggaaaataaactttttttaaaaaagaaaa

SEQ ID NO: 13894 - DNA, 1252 bp, Homo sapiens
  source 1..1252: mol_type = unassigned DNA
aatttgcttgataaacatgcaggatttctttgccagtcataaagctactagctcaaagcaggctgggtgacctcagatggctccgctgggactggaaggtcactggagccactggtgaaaatgatgctgtcactaccaactcaaaaggtcacctatcagtgtgccatgtgccacctcctggagcacacacatgtgcacacacatacactcacacgtgtgtgcaggtgcacacctcccccagaggctgcagccaagacgggcatcccacatcagagggatgaatggcaggtctgtcccgccagctgtgtgctctctcccacccgaagaaagcagcagagactcagacggcggagcctggaggagcccacgcagtctgttcccggcacccggtgcgtgtgaagggacttgagggcagcgagatggaatcagcaagagaaaacatcgaccttcaacctggaagctccgaccccaggagccagcccatcaacctgaaccattacgccaccaagaagagcgtggcggagagcatgctggacgtggccctgttcatgtccaacgccatgcggctgaaggcggtgctggagcagggaccatcctctcactactacaccaccctggtcaccctcatcagcctctctctgctcctgcaggtggtcatcggtgtcctgctcgtggtcattgcacggctgaacctgaatgaggtagaaaagcagtggcgactcaaccagctcaacaacgcagccaccatcttggtcttcttcactgtggtcatcaatgttttcattacagccttcggggcacataaaacagggttcctggctgccagggcctcaaggaatcctctctgaatgcagcctgggacccaggttctgggcctggaacttctgcctccttcctccgtgatctgccaggctcgtgggcactttccacagcccaggagagcttctgaaaggacagtatagctgcccttgctccctacccacagcacctgagttaaaaagtgatttttatgttattggtctaagggacttccatcttggtctgaagtcctgagctcagacgcaggtactgccagccataccttcctggtagcatctgctggacctaagtaaggcatgtctgtctaaggccaagtctgcccggcttaaggatgctggttctgactctaccccactgcttccttctgctccaggcctcaattttcccttcttgtaaaatggaatctatatctataaaggtttcttcaaatcca

SEQ ID NO: 13895 - DNA, 793 bp, Homo sapiens
  source 1..793: mol_type = unassigned DNA
ccagtaattgcttggtggggcaagaggcttcagttccaagtcagcaaatgggatctgagtcatgatgtatatgcctggaagctccgaccccaggagccagcccatcaacctgaaccattacgccaccaagaagagcgtggcggagagcatgctggacgtggccctgttcatgtccaacgccatgcggctgaaggcggtgctggagcagggaccatcctctcactactacaccaccctggtcaccctcatcagcctctctctgctcctgcaggtggtcatcggtgtcctgctcgtggtcattgcacggctgaacctgaatgaggtagaaaagcagtggcgactcaaccagctcaacaacgcagccaccatcttggtcttcttcactgtggtcatcaatgttttcattacagccttcggggcacataaaacagggttcctggctgccagggcctcaaggaatcctctctgaatgcagcctgggacccaggttctgggcctggaacttctgcctccttcctccgtgatctgccaggctcgtgggcactttccacagcccaggagagcttctgaaaggacagtatagctgcccttgctccctacccacagcacctgagttaaaaagtgatttttatgttattggtctaagggacttccatcttggtctgaagtcctgagctcagacgcaggtactgccagccataccttcctggtagcatctgctggacctaagtaaggcatgtctgtctaaggccaagtctgcccggcttaaggatgctggttctgactctacccc

SEQ ID NO: 13896 - DNA, 670 bp, Homo sapiens
  source 1..670: mol_type = unassigned DNA
gctaagaacaaaacgttggctttggcttcgttgcaaagcagccgctcggtggccgtacaacgcttcatctctccgagcctcggtttcctcatctccagccctaaaatgacgacacgccccacaggtcttgggaggattaagtgaggggacatgagcctggaagctccgaccccaggagccagcccatcaacctgaaccattacgccaccaagaagagcgtggcggagagcatgctggacgtggccctgttcatgtccaacgccatgcggctgaaggcggtgctggagcagggaccatcctctcactactacaccaccctggtcaccctcatcagcctctctctgctcctgcaggtggtcatcggtgtcctgctcgtggtcattgcacggctgaacctgaatgaggtagaaaagcagtggcgactcaaccagctcaacaacgcagccaccatcttggtcttcttcactgtggtcatcaatgttttcattacagccttcggggcacataaaacagggttcctggctgccagggcctcaaggaatcctctctgaatgcagcctgggacccaggttctgggcctggaacttctgcctccttcctccgtgatctgccaggctcgtgggcactttccacagcccaggagagcttctgaaaggacagtatagctgcc

SEQ ID NO: 13897 - DNA, 945 bp, Homo sapiens
  source 1..945: mol_type = unassigned DNA
gttgcaaagcagccgctcggtggccgtacaacgcttcatctctccgagcctcggtttcctcatctccagccctaaaatgacgacacgccccacaggtcttgggaggattaagtgaggggacatgagcctggaagctccgaccccaggagccagcccatcaacctgaaccattacgccaccaagaagagcgtggcggagagcatgctggacgtggccctgttcatgtccaacgccatgcggctgaaggcggtgctggagcagggaccatcctctcactactacaccaccctggtcaccctcatcagcctctctctgctcctgcaggtggtcatcggtgtcctgctcgtggtcattggtgaggagcccagcctgcagtcagaccttctgcctcggcacccgtggctggcagaaaggccccacgtgtcccctgggccaccctgcattggcacaggcagctttgcaaccacacgctgacctgcagtgagccctccgctaacagaggcccaaagaccaacttccaccccgcgagggcaggcgccctgtcctgtctcctggtatcccatggagcagaccctccgcagtacctgctgaatgactgcgccagcacctcgctaactgctaactcactcactcgctcaccgcttctccatgagcactcgtccccacgcttacaggacccagcttaagttcccaaatcctggtgggatgaagcacactagggtgccccattgtactggttggcgagggcagaggcatctcagcccgatgacgaccacctcccttgatttctgccacatgggtttctgaagggcccctctctccaaactctggtgggtgttgtgggggcagctccgtgctgtggccccgtctctgaccctttccccccactccacttccctgcagcacggctgaacctgaatgaggtagaaaagcagtggcgactca

SEQ ID NO: 13898 - DNA, 323 bp, Homo sapiens
  source 1..323: mol_type = unassigned DNA
gcgtggctcaaacgaccgccgctaagaacaaaacgttggctttggcttcgttgcaaagcagccgctcggtggccgtacaacgcttcatctctccgagcctcggtttcctcatctccagccctaaaatgacgacacgccccacaggtcttgggaggattaagtgaggggacatgaggtggtcatcggtgtcctgctcgtggtcattggtgaggagcccagcctgcagtcagaccttctgcctcggcacccgtggctggcagaaaggccccacgtgtcccctgggccaccctgcattggcacaggcagctttgcaaccacacgct

SEQ ID NO: 13899 - DNA, 1600 bp, Homo sapiens
  source 1..1600: mol_type = unassigned DNA
agcacggggcggtgactccagagctgggagcctggcagcgtcctcaccccaggaaggcatgcgcccctctgcgggcggccccagccctgggccccctgcccccggaattgcccaagatgccgggtgactcctccccggggactctcccactctgggacgcgtcactctccccacccctgggtccggaccccggcggcttctcgcgcgcgagccacgcgggggacaagtcgcggccacctgctccggagctggggagcccgggcgccgtccgcccgcgcgtcggttcgtgtgccccgggccccatggagctgcgggtcagcaacaccagctgcgagaacggttccctgctccacctctactgctcctcccaagaagtcctgtgccagattgtcaatgacctcagccctgaggtgcccagcaatgccacctttcacagctggcaggaaagaatcaggcagaactatggcttctacatcggcctgggcctggcattcctgtctagcttcctcatcggcagcagcgtcatcctcaagaagaaaggcctcttgcgactcgtggccacgggagccactcgagctgtggctgctggagaagttgccaactttggagcctacgcatttgcacctgcaacagtcgtcacgcctctgggagcgctgagtgtcctcataagtgccatcctctcctcatatttcctgagggagagtctgaacctgctggggaagctgggctgtgtgatctgtgtggccggaagcacagtgatggtgatacatgctcctgaggaagagaaggtcactaccatcatggagatggcttccaagatgaaagacacagggttcatcgtgtttgctgtgcttctgctggtgtcatgcctcatcctcatctttgtcattgccccacgttacgggcaaaggaatatcctcatctacatcatcatctgctctgtgatcggggccttctctgtggctgctgtcaaggggctgggcatcaccatcaagaacttcttccaggggctgccagttgtccggcacccgctcccctacatcctgtccctcatcctggcactgtccctcagcactcaggtcaacttcctcaacagagcactggacattttcaacacttccctggtgttccccatctactacgtgttcttcaccacggtggtcgttacctcgtccatcatcctcttcaaggagtggtacagcatgtctgctgtggacattgcaggcaccctctcgggctttgtcaccatcatcttgggcgtgttcatgctgcatgctttcaaagacctggacatcagctgcgccagcttgccccacatgcacaaaaacccacccccttctcccgccccggaacccactgttattagactggaagacaagaacgtccttgtggacaatatagaacttgccagcacctcatcaccagaagagaaacccaaagtatttataatccattcctgaagcttggaatatgtgagtgagaggatgagtccgatggtacagcctgccctcccaatttcaaaaccacctggttattttccagtgcaactgttaccaatgggctctcttttcttgagaagttcatttatacctcatcactg

SEQ ID NO: 13900 - DNA, 3274 bp, Homo sapiens
  source 1..3274: mol_type = unassigned DNA
agcacggggcggtgactccagagctgggagcctggcagcgtcctcaccccaggaaggcatgcgcccctctgcgggcggccccagccctgggccccctgcccccggaattgcccaagatgccgggtgactcctccccggggactctcccactctgggacgcgtcactctccccacccctgggtccggaccccggcggcttctcgcgcgcgagccacgcgggggacaagtcgcggccacctgctccggagctggggagcccgggcgccgtccgcccgcgcgtcggttcgtgtgccccgggccccatggagctgcgggtcagcaacaccagctgcgagaacggttccctgctccacctctactgctcctcccaagaagtcctgtgccagattgtcaatgacctcagccctgaggtgcccagcaatgccacctttcacagctggcaggaaagaatcaggcagaactatggcttctacatcggcctgggcctggcattcctgtctagcttcctcatcggcagcagcgtcatcctcaagaagaaaggcctcttgcgactcgtggccacgggagccactcgagctgtggatggaggcttcggctacctgaaagatgcaatgtggtgggctggatttctcaccatggctgctggagaagttgccaactttggagcctacgcatttgcacctgcaacagtcgtcacgcctctgggagcgctgagtgtcctcataagtgccatcctctcctcatatttcctgagggagagtctgaacctgctggggaagctgggctgtgtgatctgtgtggccggaagcacagtgatggtgatacatgctcctgaggaagagaaggtcactaccatcatggagatggcttccaagatgaaagacacagggttcatcgtgtttgctgtgcttctgctggtgtcatgcctcatcctcatctttgtcattgccccacgttacgggcaaaggaatatcctcatctacatcatcatctgctctgtgatcggggccttctctgtggctgctgtcaaggggctgggcatcaccatcaagaacttcttccaggggctgccagttgtccggcacccgctcccctacatcctgtccctcatcctggcactgtccctcagcactcaggtcaacttcctcaacagagcactggacattttcaacacttccctggtgttccccatctactacgtgttcttcaccacggtggtcgttacctcgtccatcatcctcttcaaggagtggtacagcatgtctgctgtggacattgcaggcaccctctcgggctttgtcaccatcatcttgggcgtgttcatgctgcatgctttcaaagacctggacatcagctgcgccagcttgccccacatgcacaaaaacccacccccttctcccgccccggaacccactgttattagactggaagacaagaacgtccttgtggacaatatagaacttgccagcacctcatcaccagaagagaaacccaaagtatttataatccattcctgaagcttggaatatgtgagtgagaggatgagtccgatggtacagcctgccctcccaatttcaaaaccacctggttattttccagtgcaactgttaccaatgggctctcttttcttgagaagttcatttatacctcatcactgtttccaggagaaaaatctttacccaaatagcaatggtggcagaacttcctggaaacagattcagtgaccaaatacccaagtttacatcagtgcctgcaggttccctggaccttccttctcattcattctttcggtgccatctctatgccgttgggaagaagatggagtctgacccactgaatgtagcacagtccaaggacttctctaagatattggtcattggaagttccttcacaccaattctcctcctgagacggaatctccgttgttgttgttgttgttgttttctagcccaaggatgacatagagctggctcccagaggcccacagagcaattggccatgcctccctatccagagctgacagggacacaaccagtgtaaaatatcctgttgcctttgtcacttcctctttggaggcagaagcaagacctcagctgaccttcttactgtgaaagccacttgatgtctcagggaaaaatttcaaccagctcattccccgagcactccagcctggcagtcagcacctcggcatccacccagtccatcccaccatcaccccttccccctctacttacatcctaaggagtcggtcactgagacataaaggcagtaatcgcagaactggaaacaaaacaataatagagccacagccaaactctggtggccaaacccagtgttgcattttgtcttactctgaaagaagaacagcaaattcactgcttcaaagtggcctggctgccaagctagaatttggcagaacgcactttactattcctcaaggagtcaaccaacctatgatctggggaggtgggaagaggatgaggagcaaagttgggatttggcagaaggcagtcccaggctctctggatactaggggctaacttttgtgttgactctggtgctcatctgggaacttaggagaaacgagctcaggggtaatttctgggttgcagccttaaaggcttggacagctgtgaatctcaatggccaactggaggtgcagacttggcatggggtgcattctagctgttgaccagattgctaccgagtcccctcctccactgatgagctgcccacactgggaagcagcatgccctgactgttccaacaccacctgctatggggagtacctttggtcccctcacatttggccagaggcatacaaaaaaccagagcagctggagagggagataattactattccttcccttcctatctcctttctagccacaagagtgtgggggttggagaagaaccattagaaagggaaattagtgggctggtgtatctggaaagagggaagacttgatcctcagccccgaggttggtgcagggcctcccctgtgtgactctacctgcactctgtgtttatatcctgtgccctaagtgggccaagcccaggtaaattcctgctggccttggaactccaaggtttggctgaccagcagactggctccctgactcttcagcctcaaatccccagtttttgatgaatgtggatttctgtctgtaattaaaagcaatgcaacaagttggctcttgagaatggcagtaaactgagggccctaagagtgtggtctgcagggtcaagaataaagattacagattatattta

SEQ ID NO: 13901 - DNA, 1151 bp, Homo sapiens
  source 1..1151: mol_type = unassigned DNA
ttctcgcgcgcgagccacgcgggggacaagtcgcggccacctgctccggagctggggagcccgggcgccgtccgcccgcgcgtcggttcgtgtgccccgggccccatggagctgcgggtcagcaacaccagctgcgagaacggttccctgctccacctctactgctcctcccaagaagtcctgtgccagattgtcaatgacctcagccctgaggtgcccagcaatgccacctttcacagctggcaggaaagaatcaggcagaactatggcttctacatcggcctgggcctggcattcctgtctagcttcctcatcggcagcagcgtcatcctcaagaagaaaggcctcttgcgactcgtggccacgggagccactcgagctgtggatggaggcttcggctacctgaaagatgcaatgtggtgggctggatttctcaccaggagaacatcttaccatcaaagtcagtcttcatccatgaagcgtctactcccagagaggtttgcacagagctggcaaccatgaaggtgtattttctcaacttgcctttaaacatagctcgataatatcactgcctgttggtagtggactcttgacttctacatggtagaagctggaactcctaggccaacttcccccagtccgcaggcagttaatgtgttggcccacttagaacatagctggtccgttacttaaagtttgcccaaatttgcatactcacacatttcccccactttccacccaccctctcctgctatcaaaccctgactcttttaggtggaaaattaaccaggtttccattcataatcccctatgtcaagttttgatcctcgtctcagccagagctatcccagtgaccatctgcttttaaaggggagacccaggtggttctctatcagcagagagatggaaaaagacacttttctgataaccacacacagctatcacatattgagggtttactgtctgctaaactttctaagtgttatcctgtgtattaactcaggagtttacaaactggaaactcagatagagagaaagaacttaggccccttgggaatgtcagatttttcttttcctgctaattaattaattaatttatttattgagacggagtttcactcttgttgcccaggctggagtgcaatggtgca

SEQ ID NO: 13902 - DNA, 788 bp, Homo sapiens
  source 1..788: mol_type = unassigned DNA
cctgctccggagctggggagcccgggcgccgtccgcccgcgcgtcggttcgtgtgccccgggccccatggagctgcgggtcagcaacaccagctgcgagaacgctgggatggctgagaggagtcagggaaggaaagttccctgctccacctctactgctcctcccaagaagtcctgtgccagattgtcaatgacctcagccctgaggtgcccagcaatgccacctttcacagctggcaggaaagaatcaggcagaactatggcttctacatcggcctgggcctggcattcctgtctagcttcctcatcggcagcagcgtcatcctcaagaagaaaggcctcttgcgactcgtggccacgggagccactcgagctgtggatggaggcttcggctacctgaaagatgcaatgtggtgggctggatttctcaccatggctgctggagaagttgccaactttggagcctacgcatttgcacctgcaacagtcgtcacgcctctgggagcgctgagtgtcctcataagtgccatcctctcctcatatttcctgagggagagtctgaacctgctggggaagctgggctgtgtgatctgtgtggccggaagcacagtgatggtgatacatgctcctgaggaagagaaggtcactaccatcatggagatggcttccaagatgaaagacacagggttcatcgtgtttgctgtgcttctgctggtgtcatgcctcatcctcatctttgtcattgccccacgttacgggcaaaggaatatcctcatctacatcatcatc

SEQ ID NO: 13903 - DNA, 567 bp, Homo sapiens
  source 1..567: mol_type = unassigned DNA
gcgggtcagcaacaccagctgcgagaacggtgcgtacggcagggctggggaccaggcgggctccgcgcttcgcgccctcccctccttgccaccgctctccctcgcatcctctcctcccaggggggccaaagctggggaggggcagggccagcacgaggtggctcccacccagctttgaagatctgggttctggctgagacttcactttcatcttcgcagctgggatggctgagaggagtcagggaaggaaagttccctgctccacctctactgctcctcccaagaagtcctgtgccagattgtcaatgacctcagccctgaggtgcccagcaatgccacctttcacagctggcaggaaagaatcaggcagaactatggcttctacatcggcctgggcctggcattcctgtctagcttcctcatcggcagcagcgtcatcctcaagaagaaaggcctcttgcgactcgtggccacgggagccactcgagctgtggatggaggcttcggctacctgaaagatgcaatgtggtgggctggatttctcaccatggctgctggagaagttgc

SEQ ID NO: 13904 - DNA, 709 bp, Homo sapiens
  source 1..709: mol_type = unassigned DNA
gtgggggctcgacggtggccgacgtgggacagtctggctgtggcaggggtctcggaaaccatgggttattgcagtggcaggtgcacgcttatctttatctgtggcatgcaactggtactgaagatggatggggatcattaggtttctcttattatattgtcccacaaatatcttaaccgtttgtgtgctggagaggcaaatatttgacttccttggatatcagtgggcacctatcctggcaaattttgtacatattattatcgtcattcttggtttgtttggaactattcaatatagacctcgttacataacaggatatgctgtctggctagtcctctgggttacgtggaatgtgtttgttatctgcttctatttggaggctggggacctctcaaagcacccatctgtgaactggtggaaggagccatgtttatcaaacagagagtggaagaaagcaccagaactgcaaatccagaatttcagtctacagagtaaggaagggacaaggctggccctgcatctattcctgtagaccctgcaatgccaggggatatagcacaaggccattgtaagttccatgaggaactaggaaagagaaaaaaaaaagagaagcatctaaaaatatgttaaaagttcacatttctggtgctgttttggacattttttatgggaaagttctttgtaagtaatacaatatctttgaaagaaa

SEQ ID NO: 13905 - DNA, 1106 bp, Homo sapiens
  source 1..1106: mol_type = unassigned DNA
gtgggggctcgacggtggccgacgtgggacagtctggctgtggcaggggtctcggaaaccatgggttattgcagtggcaggtgcacgcttatctttatctgtggcatgcaactggtttgtgtgctggagaggcaaatatttgacttccttggatatcagtgggcacctatcctggcaaattttgtacatattattatcgtcattcttggtttgtttggaactattcaatatagacctcgttacataacaggatatgctgtctggctagtcctctgggttacgtggaatgtgtttgttatctgcttctatttggaggctggggacctctcaaaggaaacagaccttatcctgacttttaatatatcaatgcaccgatcttggtggatggagaatggaccaggatgtacggtgacgtcagtgacacctgccccagactgggccccagaagaccatcgctacatcacggtctcagggtgtttgctggagtaccagtacatagaagtggctcatagttccctccagattgtcctcgcagtaagtgttggcagccaaccgctccttctagtgcctctggggttgttttatttctgtgcgaactcagtgcacacaaatggaatctgtgggtaaagtgtggcctttttgctttttcctcattaatgcgacttttaacaggaaatcctcaggttaaactaaaccatcctctggacttagtgtgctgattttcttcgacaattagtaaataccctttgttatcatcagcattttacataggaaatccaatcagtcaagatgtgattacgtgacttttggtagacttttccaaggattctgaagggatgatcagagatttttttcataacgttctacagtactcaaaattataagatttccataagtgttttctcttttagtgcttcttttggctgtgctgctagccctgggatttctctttttcatttgccctatctccttcttccttcctagatttctcccaggcaccatccatcacctttaatctcccactttttttccagaaaaaatcacattttctatagattctaattctaagacattcatgcccccatttttcatagtactgtaacaat

SEQ ID NO: 13906 - DNA, 3115 bp, Homo sapiens
  source 1..3115: mol_type = unassigned DNA
gtgggggctcgacggtggccgacgtgggacagtctggctgtggcaggggtctcggaaaccatgggttattgcagtggcaggtgcacgcttatctttatctgtggcatgcaactggtttgtgtgctggagaggcaaatatttgacttccttggatatcagtgggcacctatcctggcaaattttgtacatattattatcgtcattcttggtttgtttggaactattcaatatagacctcgttacataacaggatatgctgtctggctagtcctctgggttacgtggaatgtgtttgttatctgcttctatttggaggctggggacctctcaaaggaaacagaccttatcctgacttttaatatatcaatgcaccgatcttggtggatggagaatggaccaggatgtacggtgacgtcagtgacacctgccccagactgggccccagaagaccatcgctacatcacggtctcagggtgtttgctggagtaccagtacatagaagtggctcatagttccctccagattgtcctcgcactggcaggtttcatctacgcctgttatgttgtgaaatgtataactgaagaagaggacagctttgatttcataggtggctttgactcttatggctatcaagggcctcagaagacatctcatttacaactacagcctatgtacatgtcaaaataatacagatgacttcagtatgtcagcccatggacctttcaaagaacttttttcgcagtggcctcctgcatttcatgaagagcaagaagcaactgagtttaaatacatacacgtattaacaaaacaaatgcaaagcctctacatacaacactgacacacacacacacacacacgtgagcacgcacacaccaattccacttgacctcctctttctaactgaaacagacaaatatgcaggacacgcccatcttggatttcctgaaagcaggcccctttctcccaggccttcggaaagttcagaaggagatgtgttgatgcccaacggttgccggccattgctaactcctctgcagcccagcgggttggcctctgtgagctgggaagtcatccaaggcacattagtttgagagctctgtcttctgcactccatacatcttgacagcaccacggctacttaggcaatgtaattgcaaaaacaaacgaaacatgccatgatgaccttgtacccgaagtccgaaatggcagattgtttgccctaaaggctgtaccgtacatacttgccttaacccacctacattgtgtgcccaagaatcccagtgcagacagccccaagccacttcctttaggctaacacactgctattaattctaaatgagttcaagcctgtgtgtttcatgtcaaggaacaagactgaatagctcagcagctccagtgtgtctgtataagaaaagtgccagctgtcagcaaagtgctttaccatagagcctccatggtggcccaaaagagacaagtaacaataacaatatctgtcatctttataattctaaaatatggtcttctgatggggttgggggtgggacagagtaaaacattaatctactaaactcactaatctactggaagcagaaagcagaaatggcttaactcgctgattttatttattgcactctaggtgcttttataagtatctacaattgtcttttactaacacagaaacagctgtggatttctatcaacagaggccaactgaatatgtattagctatgtttactcttttatatctaattcaaattgaagactctacgtaggtgaacttttttttctaacttcagtgtacaagattatttttgggtgggtggggggagcaatagttaccttggtgaaatatttgagatctttttgtggtatttgggggatctgttgtgtgttagagtgtatttcaaccctcctgtattattgtggcagaaaaactgtgctgttaacgtagttggcaacaagatgcctttggaaacttaatagtaggtcaatgtgtttatggaatattctgaactcctaggaaattttgttctatattttaaagcattatttggttttcattagtggaaaacataattagctcaggcttatcaggaactcagatgagtcatattttttcttggatacacctgagacattaaactcaattttttaaaactaacacaccattctttagtgcagtgaaattcaaaagttataaattggcatggagcaagttttttctttgatttctatgaagtttcagttattggattaaactactttagaccttagcccattcggatctacatacaccagttccattactgtgtttgcatggatgtctgtaatatacacacacatatacatttgaaaatgatagaggaacaaagagttatcattggaacataaactataaaaaaagattccagcactcatgcttgaatttcctcagtgggttgtatgtttgtccatacatacatgtataaaataaacaattgcaaacatgtcagtgaaacctcatatgacgcttttatagtgacatgcatgtttaatgtatgagaaaaatatttaccaatgtattgtcctttgagtcctaaaatataaatactatacatgccagaaactattctaatgtgacttttaatgtgactattaaaaatgaggtttcactgtacattcatgctgtgatgcgatttcaccttatagtacatgtatatgggtacagaaaataaaccctcatattcctgctttaagttacagccaagttttcaccaaatcacaactatcatcaccaccaaaattttaaaaaacagtagttgactactaaaaagtaatcagtggacaggtcatttatgggatcagtaagcacagtagtgtgattatatctgggaaaacatctacagttgtacagctgtatcctcctcaaaatccggtgaagaatgctatttttctaggctgagcttttgttataaacttaatattcagaaggcaagggttatgatcctgatgtgtcctttttttttgcatttgttaattctgaatgtatttttaacagaatgatttttttgacttactagtgtaatttgcattttaaaaataaatggaaaaatacttaagtttctgagccatccct

SEQ ID NO: 13907 - DNA, 563 bp, Homo sapiens
  source 1..563: mol_type = unassigned DNA
gtggctttgactcttatggctatcaagggcctcagaagacatctcatttacaactacagcctatgtacatgcaaattcccttggataacaactgataacaaattctatatatcagcatcaagtgatatgctgaattgcaagcgaagatcaaaatagaaagtcaaaataatacagatgacttcagtatgtcagcccatggacctttcaaagaacttttttcgcagtggcctcctgcatttcatgaagagcaagaagcaactgagtttaaatacatacacgtattaacaaaacaaatgcaaagcctctacatacaacactgacacacacacacacacacacgtgagcacgcacacaccaattccacttgacctcctctttctaactgaaacagacaaatatgcaggacacgcccatcttggatttcctgaaagcaggcccctttctcccaggccttcggaaagttcagaaggagatgtgttgatgcccaacggttgccggccattgctaactcctctgcagcccagcgggttggcctctgtgagctgggaagtcatccaaggcac

SEQ ID NO: 13908 - DNA, 148 bp, Homo sapiens
  source 1..148: mol_type = unassigned DNA
ggtttgtgtgctggagaggcaaatatttgacttccttggatatcagtgggcacctatcctggcaaattttgtacatattattatcgtcattcttggtttgtttggaactattcaatatagacctcgttacataacaggataccatgtg

SEQ ID NO: 13909 - DNA, 3052 bp, Homo sapiens
  source 1..3052: mol_type = unassigned DNA
cttatttgtccctctggtatatttacaggtactgaagatggatggggatcattaggtttctcttattatattgtcccacaaatatcttaaccgtttgtgtgctggagaggcaaatatttgacttccttggatatcagtgggcacctatcctggcaaattttgtacatattattatcgtcattcttggtttgtttggaactattcaatatagacctcgttacataacaggatatgctgtctggctagtcctctgggttacgtggaatgtgtttgttatctgcttctatttggaggctggggacctctcaaaggaaacagaccttatcctgacttttaatatatcaatgcaccgatcttggtggatggagaatggaccaggatgtacggtgacgtcagtgacacctgccccagactgggccccagaagaccatcgctacatcacggtctcagggtgtttgctggagtaccagtacatagaagtggctcatagttccctccagattgtcctcgcactggcaggtttcatctacgcctgttatgttgtgaaatgtataactgaagaagaggacagctttgatttcataggtggctttgactcttatggctatcaagggcctcagaagacatctcatttacaactacagcctatgtacatgtcaaaataatacagatgacttcagtatgtcagcccatggacctttcaaagaacttttttcgcagtggcctcctgcatttcatgaagagcaagaagcaactgagtttaaatacatacacgtattaacaaaacaaatgcaaagcctctacatacaacactgacacacacacacacacacacgtgagcacgcacacaccaattccacttgacctcctctttctaactgaaacagacaaatatgcaggacacgcccatcttggatttcctgaaagcaggcccctttctcccaggccttcggaaagttcagaaggagatgtgttgatgcccaacggttgccggccattgctaactcctctgcagcccagcgggttggcctctgtgagctgggaagtcatccaaggcacattagtttgagagctctgtcttctgcactccatacatcttgacagcaccacggctacttaggcaatgtaattgcaaaaacaaacgaaacatgccatgatgaccttgtacccgaagtccgaaatggcagattgtttgccctaaaggctgtaccgtacatacttgccttaacccacctacattgtgtgcccaagaatcccagtgcagacagccccaagccacttcctttaggctaacacactgctattaattctaaatgagttcaagcctgtgtgtttcatgtcaaggaacaagactgaatagctcagcagctccagtgtgtctgtataagaaaagtgccagctgtcagcaaagtgctttaccatagagcctccatggtggcccaaaagagacaagtaacaataacaatatctgtcatctttataattctaaaatatggtcttctgatggggttgggggtgggacagagtaaaacattaatctactaaactcactaatctactggaagcagaaagcagaaatggcttaactcgctgattttatttattgcactctaggtgcttttataagtatctacaattgtcttttactaacacagaaacagctgtggatttctatcaacagaggccaactgaatatgtattagctatgtttactcttttatatctaattcaaattgaagactctacgtaggtgaacttttttttctaacttcagtgtacaagattatttttgggtgggtggggggagcaatagttaccttggtgaaatatttgagatctttttgtggtatttgggggatctgttgtgtgttagagtgtatttcaaccctcctgtattattgtggcagaaaaactgtgctgttaacgtagttggcaacaagatgcctttggaaacttaatagtaggtcaatgtgtttatggaatattctgaactcctaggaaattttgttctatattttaaagcattatttggttttcattagtggaaaacataattagctcaggcttatcaggaactcagatgagtcatattttttcttggatacacctgagacattaaactcaattttttaaaactaacacaccattctttagtgcagtgaaattcaaaagttataaattggcatggagcaagttttttctttgatttctatgaagtttcagttattggattaaactactttagaccttagcccattcggatctacatacaccagttccattactgtgtttgcatggatgtctgtaatatacacacacatatacatttgaaaatgatagaggaacaaagagttatcattggaacataaactataaaaaaagattccagcactcatgcttgaatttcctcagtgggttgtatgtttgtccatacatacatgtataaaataaacaattgcaaacatgtcagtgaaacctcatatgacgcttttatagtgacatgcatgtttaatgtatgagaaaaatatttaccaatgtattgtcctttgagtcctaaaatataaatactatacatgccagaaactattctaatgtgacttttaatgtgactattaaaaatgaggtttcactgtacattcatgctgtgatgcgatttcaccttatagtacatgtatatgggtacagaaaataaaccctcatattcctgctttaagttacagccaagttttcaccaaatcacaactatcatcaccaccaaaattttaaaaaacagtagttgactactaaaaagtaatcagtggacaggtcatttatgggatcagtaagcacagtagtgtgattatatctgggaaaacatctacagttgtacagctgtatcctcctcaaaatccggtgaagaatgctatttttctaggctgagcttttgttataaacttaatattcagaaggcaagggttatgatcctgatgtgtcctttttttttgcatttgttaattctgaatgtatttttaacagaatgatttttttgacttactagtgtaatttgcatttt

SEQ ID NO: 13910 - DNA, 1268 bp, Homo sapiens
  source 1..1268: mol_type = unassigned DNA
aaagactcttaactagacaggccgatcctccccagcggcactccctttcattcttcccttcccaccacacacacacacacacacacacacccggacccagacagcccactccactttccagacgcccacctcctacatactcccctcccctaaacagacattcacccactcgccatctgtagcctccttccaaccccccgccccgcccgcctggctccccctccccaagaaacagacctgcacagtgggacgcagggacccccgccagacgctcgggtcgtgcgcacccctgggccgggccgggcggggactactccggagtcaggaggcagcagcggcggaggacgaggatctctggcagtcagcgccgctcggacgccgccggcaccatgggctgctgcaccggacgctgctcgctcatctgcctctgcgcgctgcagttggtctcagcattagagaggcagatctttgacttccttggtttccagtgggcgcctattcttggaaattttctacacataatagttgtcatattgggtttgtttgggaccattcagtacagacctcgatacataatggtgtatacagtgtggactgccctctgggtcacctggaatgtgttcattatctgcttttatttggaagtaggtggactctcaaaggacaccgatctaatgacattcaatatctctgtacatcggtcatggtggagagaacatgggcctggttgtgtcagaagagtgctgcctccctcagcccatggcatgatggacgattacacgtacgtctctgtcacaggctgcatcgttgacttccagtacctggaggtcatccacagtgctgtccaaatactactctctttggtgggttttgtgtatgcctgttatgtgatcagtatttccatggaagaagaagacacatttgatttcataggtggacttgatacacactcctactaccaggatcatgttgagttaaagcctgttaaaccagtcgaaataagtaatgacattgaaccagaaatgcggctgctgaacttgacttagggagcaaaggaccattgactgcgcgcctcggtggatccgacccgcctgacattccttccagaggctagactgtgcttcctggctttcccacgaatcatggagcattttggtcacagcctttgtattattagcattgttctctagatgagttctaggtgcttgggtgggtatttttttagtcgttttcttcttatatgaacacttgtaagttgtaaaaaaaaa

SEQ ID NO: 13911 - DNA, 1114 bp, Homo sapiens
  source 1..1114: mol_type = unassigned DNA
acacacacacacccggacccagacagcccactccactttccagacgcccacctcctacatactcccctcccctaaacagacattcacccactcgccatctgtagcctccttccaaccccccgccccgcccgcctggctccccctccccaagaaacagacctgcacagtgggacgcagggacccccgccagacgctcgggtcgtgcgcaccgcactgacctcggcccgccccgccgggaaactaacaaaggcgggcgcgagccccgagccctggagccgcgagcggcggccgcggggccgaggagcctgggccgggccgggcggggactactccggagtcaggaggcagcagcggcggaggacgaggatctctggcagtcagcgccgctcggacgccgccggcaccatgggctgctgcaccggacgctgctcgctcatctgcctctgcgcgctgcagttggtctcagcattagagaggcagatctttgacttccttggtttccagtgggcgcctattcttggaaattttctacacataatagttgtcatattgggtttgtttgggaccattcagtacagacctcgatacataatggtgtatacagtgtggactgccctctgggtcacctggaatgtgttcattatctgcttttatttggaagtaggtggactctcaaaggacaccgatctaatgacattcaatatctctgtacatcggtcatggtggagagaacatgggcctggttgtgtcagaagagtgctgcctccctcagcccatggcatgatggacgattacacgtacgtctctgtcacaggctgcatcgttgacttccagtacctggaggtcatccacagtgctgtccaaatactactctctatatttttcctataggtttctgctgtggagccgtactcactgcagaccctgaaggaggaggaatacctgctttctgcccctcagtggtctcagctgccgttcttctcacatatgcatcatccatacacatcaagatgttttgcggctttatgtcagtatgagtaatcttggtcttactgtgtagatattctaacccttgaaggaaatgtcaaatgatactcttcagacaacgtactgg

SEQ ID NO: 13912 - DNA, 1988 bp, Homo sapiens
  source 1..1988: mol_type = unassigned DNA
agccgcgagcggcggccgcggggccgaggagcctgggccgggccgggcggggactactccggagtcaggaggcagcagcggcggaggacgaggatctctggcagtcagcgccgctcggacgccgccggcaccatgggctgctgcaccggacgctgctcgctcatctgcctctgcgcgctgcagttggtctcagcattagagaggcagatctttgacttccttggtttccagtgggcgcctattcttggaaattttctacacataatagttgtcatattgggtttgtttgggaccattcagtacagacctcgatacataatggtgtatacagtgtggactgccctctgggtcacctggaatgtgttcattatctgcttttatttggaagtaggtggactctcaaaggacaccgatctaatgacattcaatatctctgtacatcggtcatggtggagagaacatgggcctggttgtgtcagaagagtgctgcctccctcagcccatggcatgatggacgattacacgtacgtctctgtcacaggctgcatcgttgacttccagtacctggaggtcatccacagtgctgtccaaatactactctctttggtgggttttgtgtatgcctgttatgtgatcagtatttccatggaagaagaagacacatattcatgtgatctgcaagtatgcaaacatctttttatccagatgctgcaaattattgaataagcaagaattagtaagatattatcaccaaattgtcacatcagtcaagcctcatgtgcttcctaagaactgaggtgatgcattattttagagtgtcattctaaaccccagattcaacatcttcctaatctttctagtgcagtctaatatataaattttatgaaaagcataggtttttttttaaccagcagtgctctttgagaatttacattgattcctaaagattgccattgctttgtataaaatgttataaattatcttagcatcttacctggaatttccactaaattcaccaatttatgatttgtgaaatctgattttactttttgaaaattttcatgtgaatttcccattttcagtgttgtagcacctctctcttcctctaagatcctgcaagctcatcaaaagccatgatcttattataccagcagttttatttattcaatctttcaacaagtagttattgaacttctataatgtgccaggctctggagctcgccttacaccaaacagacacaatcgatccattcgaagtgtcgtaattacacattgagggaccaactagaccttttctcattgtaaacttggagcaaaagtaaattcattaaaataaatttacattatagtgccacaaaaaaatgaacagaaccagaaagcattttttacaaaaattaacagaacagtgtgatagaggggaaaaggatgtgagatcatggtgccctaccttcaatagggtggccagaaaacacctctctgaagaagcagcatttgagctgagacctgaagaacgaggagtcagtgatgcagagaacctcaggagatgccttccaatctgagaaaagaggtgtacaagcaacatggtgccggcacctgctcagcttttggaaaggactcaggaagcttttactcatgatggaaggcaaagcgggaggaggcacatcacatagcaagagtggaagcaagagagacgtcatgctcttttaagcaatcagctctcaggtgaactaatagagtgagaactcactcatttctgtggggagggcatcaagctatttataatggatccatcctcatgacacaaacactgctatctcccacctctaacactggagatgacacttgaacatgagatttggaggggacaaatatcaaaactatatcatatggtttgcagatattttcttccatccttgagttatcttttcattttgttaattgtttcctttgctgtgctgaagctttgtttaatgaaatcccatttgtct

SEQ ID NO: 13913 - DNA, 414 bp, Homo sapiens
  source 1..414: mol_type = unassigned DNA
ggccgaggagcctgggccgggccgggcggggactactccggagtcaggaggcagcagcggcggaggacgaggatctctggcagtcagcgccgctcggacgccgccggcaccatgggctgctgcaccggacgctgctcgctcatctgcctctgcgcgctgcagttggtctcagcattagagaggcagatctttgacttccttggtttccagtgggcgcctattcttggaaattttctacacataatagttgtcatattgggtttgtttgggaccattcagtacagacctcgatacataatggtggacaccgatctaatgacattcaatatctctgtacatcggtcatggtggagagaacatgggcctggttgtgtcagaagagtgctgcctccctcagcccatggcatgatggac

SEQ ID NO: 13914 - DNA, 1421 bp, Homo sapiens
  source 1..1421: mol_type = unassigned DNA
tccgtggctgtgcagcttgggtgtcctgtgctcggcttaggggcacaggcttgcgggcggacctagggacggcggaggcatcgtgtccttcctgcaggaaggaaggagcttccggcgctttcctgggaggctcgctggggccgcggagataacctgaggtcctgcaacaggctgggggcccaaggaccatcccaggccttggaacagttggtatctttcagtcgccgccctggagaggcaggtgtttgacttcctgggctaccagtgggcgcccatcctggccaactttgtccacatcatcatcgtcatcctgggactcttcggcaccatccagtaccggctgcgctatgtcatggtgtacacgctgtgggcagccgtctgggtcacctggaacgtcttcatcatctgcttctacctggaagtcggtggcctcttaaaggacagcgagctactgaccttcagcctctcccggcatcgctcctggtggcgtgagcgctggccaggctgtctgcatgaggaggtgccagcagtgggcctcggggccccccatggccaggccctggtgtcaggtgctggctgtgccctggagcccagctatgtggaggccctacacagttgcctgcagatcctgatcgcgcttctgggctttgtctgtggctgccaggtggtcagcgtgtttacggaggaagaggacagctgcctgcgtaagtgaggaaacagctgatcctgctcctgtggcctccagcctcagcgaccgaccagtgacaatgacaggagctcccaggccttgggacgcgcccccacccagcaccccccaggcggccggcagcacctgccctgggttctaagtactggacaccagccagggcggcagggcagtgccacggctggctgcagcgtcaagagagtttgtaatttcctttctcttaaaaaaaaaaaagaaaagaaaacatacaaaagaaaaggcaaaaccccacatgcccacctcctctggcaacatgggggtcacagctctgcccccaggctgtcgtctcgtcgaggagcccctccctcaggtgcccacctggggctgctggaccctcgggctgcaagcactgctgctgggatgcagcctccccaggaagtcaatgtgaggcccgagacccctcaagcggtgagggcccctgttgaacatggagggttcctaaccccaaactcgtgccagaagaacccccaccccacccaggagctgaggctgatggagccctagggtgggggctgggcttgaccaggaacagcagagccaggccccaaggcatagggcagggcacatggtggtgacgagcaggcagtactcttgtaaagggggctcttgggcaaacagtcccaaaggctcccccaggtatcatcaagttggtaaataaacaggaacatggccctca

SEQ ID NO: 13915 - DNA, 1430 bp, Homo sapiens
  source 1..1430: mol_type = unassigned DNA
gggtccaggctgcggcgcgtggggagcgggcggagcgggggcgggggccgagcgcggggcacccgggggcctcctgtataggcgggcaccatgggctcctgctccggccgctgcgcgctcgtcgtcctctgcgcttttcagctggtcgccgccctggagaggcaggtgtttgacttcctgggctaccagtgggcgcccatcctggccaactttgtccacatcatcatcgtcatcctgggactcttcggcaccatccagtaccggctgcgctatgtcatggtgtacacgctgtgggcagccgtctgggtcacctggaacgtcttcatcatctgcttctacctggaagtcggtggcctcttaaaggacagcgagctactgaccttcagcctctcccggcatcgctcctggtggcgtgagcgctggccaggctgtctgcatgaggaggtgccagcagtgggcctcggggccccccatggccaggccctggtgtcaggtgctggctgtgccctggagcccagctatgtggaggccctacacagttgcctgcagatcctgatcgcgcttctgggctttgtctgtggctgccaggtggtcagcgtgtttacggaggaagaggacagctttgatttcattggtggatttgatccatttcctctctaccatgtcaatgaaaagccatccagtctcttgtccaagcaggtgtacttgcctgcgtaagtgaggaaacagctgatcctgctcctgtggcctccagcctcagcgaccgaccagtgacaatgacaggagctcccaggccttgggacgcgcccccacccagcaccccccaggcggccggcagcacctgccctgggttctaagtactggacaccagccagggcggcagggcagtgccacggctggctgcagcgtcaagagagtttgtaatttcctttctcttaaaaaaaaaaaagaaaagaaaacatacaaaagaaaaggcaaaaccccacatgcccacctcctctggcaacatgggggtcacagctctgcccccaggctgtcgtctcgtcgaggagcccctccctcaggtgcccacctggggctgctggaccctcgggctgcaagcactgctgctgggatgcagcctccccaggaagtcaatgtgaggcccgagacccctcaagcggtgagggcccctgttgaacatggagggttcctaaccccaaactcgtgccagaagaacccccaccccacccaggagctgaggctgatggagccctagggtgggggctgggcttgaccaggaacagcagagccaggccccaaggcatagggcagggcacatggtggtgacgagcaggcagtactcttgtaaagggggctcttgggcaaacagtcccaaaggctcccccaggtatcatcaagttggtaaataaacaggaacatggccctca

SEQ ID NO: 13916 - DNA, 797 bp, Homo sapiens
  source 1..797: mol_type = unassigned DNA
ccctggcagagatctgcaggtgaatggacaccaccctcctggggccacgtggggtcctttgtcccagcccgaccaaccctccaggctggacagcgagctactgaccttcagcctctcccggcatcgctcctggtggcgtgagcgctggccaggctgtctgcatgaggaggtgccagcagtgggcctcggggccccccatggccaggccctggtgtcaggtgctggctgtgccctggagcccagctatgtggaggccctacacagttgcctgcagatcctgatcgcgcttctgggctttgtctgtggctgccaggtggtcagcgtgtttacggaggaagaggacagctttgatttcattggtggatttgatccatttcctctctaccatgtcaatgaaaagccatccagtctcttgtccaagcaggtgtacttgcctgcgtaagtgaggaaacagctgatcctgctcctgtggcctccagcctcagcgaccgaccagtgacaatgacaggagctcccaggccttgggacgcgcccccacccagcaccccccaggcggccggcagcacctgccctgggttctaagtactggacaccagccagggcggcagggcagtgccacggctggctgcagcgtcaagagagtttgtaatttcctttctcttaaaaaaaaaaaagaaaagaaaacatacaaaagaaaaggcaaaaccccacatgcccacctcctctggcaacatgggggtcacagctctgcccccaggctgtcgtctcgtcgaggagcccctccctcaggtgcccac

SEQ ID NO: 13917 - DNA, 462 bp, Homo sapiens
  source 1..462: mol_type = unassigned DNA
cctgaggctgggctggcaagaagcccctcagccttgtcgggaaccctggcgtatgcatctggcaaggctggcgccacgtgacccagcttctgggctttgtctgtggctgccaggtggtcagcgtgtttacggaggaagaggacagctttgatttcattggtggatttgatccatttcctctctaccatgtcaatgaaaagccatccagtctcttgtccaagcaggtgtacttgcctgcgtaagtgaggaaacagctgatcctgctcctgtggcctccagcctcagcgaccgaccagtgacaatgacaggagctcccaggccttgggacgcgcccccacccagcaccccccaggcggccggcagcacctgccctgggttctaagtactggacaccagccagggcggcagggcagtgccacggctggctgcagcgtcaagagagtttgtaatttcctttctctt

SEQ ID NO: 13918 - DNA, 793 bp, Homo sapiens
  source 1..793: mol_type = unassigned DNA
tccaactcccaccccgggccccggaccgcagctggtcgtagtggccgcggaggacggcagcttttgggggccgggcgggagaagcgtccgttcatccgcggaaccaagctgaggtcgccgccctggagaggcaggtgtttgacttcctgggctaccagtgggcgcccatcctggccaactttgtccacatcatcatcgtcatcctgggactcttcggcaccatccagtaccggctgcgctatgtcatggtgtacacgctgtgggcagccgtctgggtcacctggaacgtcttcatcatctgcttctacctggaagtcggtggcctcttaaaggacagcgagctactgaccttcagcctctcccggcatcgctcctggtggcgtgagcgctggccaggctgtctgcatgaggaggtgccagcagtgggcctcggggccccccatggccaggccctggtgtcaggtgctggctgtgccctggagcccagctatgtggaggccctacacagttgcctgcagatcctgatcgcgcttctgggctttgtctgtggctgccaggtggtcagcgtgtttacggaggaagaggacagctttgatttcattggtggatttgatccatttcctctctaccatgtcaatgaaaagccatccagtctcttgtccaagcaggtgtacttgcctgcgtaagtgaggaaacagctgatcctgctcctgtggcctccagcctcagcgaccgaccagtgacaatgacaggagctcccaggccttgggacgcgcccccacccagcaccccc

SEQ ID NO: 13919 - DNA, 506 bp, Homo sapiens
  source 1..506: mol_type = unassigned DNA
gtctgggtcacctggaacgtcttcatcatctgcttctacctggaagtcggtggcctcttaaaggacagcgagctactgaccttcagcctctcccggcatcgctcctggtggcgtgagcgctggccaggctgtctgcatgaggaggtgccagcagtgggcctcggggccccccatggccaggccctggtgtcaggtgctggctgtgccctggagcccagctatgtggaggccctacacagttgcctgcagatcctgatcgcgaatcccagatggcttgctccacagaggaggaggaacccctggtggctgctggctggagtgggctggggccaaagcttctgggctttgtctgtggctgccaggtggtcagcgtgtttacggaggaagaggacagctttgatttcattggtggatttgatccatttcctctctaccatgtcaatgaaaagccatccagtctcttgtccaagcaggtgtacttccccacaggccagaccccactgaga

SEQ ID NO: 13920 - DNA, 872 bp, Homo sapiens
  source 1..872: mol_type = unassigned DNA
tccgtggctgtgcagcttgggtgtcctgtgctcggcttaggggcacaggcttgcgggcggacctagggacggcggaggcatcgtgtccttcctgcaggaaggaaggagcttccggcgctttcctgggaggctcgctggggccgcggagataacctgaggtcctgcaacaggctgggggcccaaggaccatcccaggccttggaacagttggtatctttcagtcgccgccctggagaggcaggtgtttgacttcctgggctaccagtgggcgcccatcctggccaactttgtccacatcatcatcgtcatcctgggactcttcggcaccatccagtaccggctgcgctatgtcatggtgtacacgctgtgggcagccgtctgggtcacctggaacgtcttcatcatctgcttctacctggaagtcggtggcctcttaaaggacagcgagctactgaccttcagcctctcccggcatcgctcctggtggcgtgagcgctggccaggctgtctgcatgaggaggtgccagcagtgggcctcggggccccccatggccaggccctggtgtcaggtgctggctgtgccctggagcccagctatgtggaggccctacacagttgcctgcagatcctgatcgcgcttctgggctttgtctgtggctgccaggtggtcagcgtgtttacggaggaagaggacagctgtgagtatggggcctctgcaggcagtggggcgggagacggctacagaggtggcagctctgagtctgtcccgtctggggcaaggcgagagacctccccacttggaagggacctcacgcccagcagggccttgctcacggccgtaggcctgagcgaggactcgccacacaccaggg

SEQ ID NO: 13921 - DNA, 663 bp, Homo sapiens
  source 1..663: mol_type = unassigned DNA
tggcttctggggtgctctgcagtggaggcctgtgctgtccacgtgtaatgtcagcccggtgaggcgaggacaggtcacggcagctcagccagggatgctgtgtccgtacgccgacctgcgctggggctcccttgagctggctgtcccaccgcctcattcccggggcacccacgtgggaaagctctgagacgtgtcccagggtgggcttgggggacccctttctccatgctgtgcatctgggggccgccagactcaggagcagaggccgcccctcctatgcgatcatgggaccccttcccccgggggctggatgcaagcaggtgtgcccgggagctgtgttcagctgccgccccatcctctcctctccctagtacacgctgtgggcagccgtctgggtcacctggaacgtcttcatcatctgcttctacctggaagtcggtggcctcttaaaggacagcgagctactgaccttcagcctctcccggcatcgctcctggtggcgtgagcgctggccaggctgtctgcatgaggaggtgccagcagtgggcctcggggccccccatggccaggccctggtgtcaggtgctggctgtgccctggagcccagctatgtggaggccctacacagttgcctgcagatcctgatcgcgcttctgggctttg

SEQ ID NO: 13922 - DNA, 535 bp, Homo sapiens
  source 1..535: mol_type = unassigned DNA
ttctggggtgctctgcagtggaggcctgtgctgtccacgtgtaatgtcagcccggtgaggcgaggacaggtcacggcagctcagccagggatgctgtgtccgtacgccgacctgcgctggggctcccttgagctggctgtcccaccgcctcattcccggggcacccacgtgggaaagctctgagacgtgtcccagggtgggcttgggggacccctttctccatgctgtgcatctgggggccgccagactcaggagcagaggccgcccctcctatgcgatcatgggaccccttcccccgggggctggatgcaagcaggtgtgcccgggagctgtgttcagctgccgccccatcctctcctctccctagtacacgctgtgggcagccgtctgggtcacctggaacgtcttcatcatctgcttctacctggaagtcggtggcctcttaaaggggctctctgctctggccagtgtagcacaggtgggcactggggcaggtgcccagccaggcagacgggcccccgcttcctggaaccac

SEQ ID NO: 13923 - DNA, 17105 bp, Homo sapiens
  source 1..17105: mol_type = unassigned DNA
gccaatgggcgcgcggggaggcgcgggccgcggcggcgggctgggggctcggcgctcccgggcgtcagtcgggccgcggcgacggcggcaggagcgcgtcccggcgccgcctcgggctccgctcggctcgggggctgcttcgggaggaggagagccaagggaggcgccaggcccgcgggccgggcgcatggcttagggacgctcccggccgccgcagccccagcatggggaaacttcactccaagccggccgccgtgtgcaagcgcagggagagcccggaaggtgacagcttcgccgtgagcgctgcctgggctcggaagggcatcgaggagtggatcgggagacagcgctgcccgggcggtgtctcgggaccccgacagctgcggttggcgggcaccataggccgaagcacccgggagctcgtgggcgacgtgttgagagacacgctcagcgaggaagaggaggacgactttcggctggaagtggccctgcctcctgagaagactgacgggctgggcagcggagatgagaagaagatggagagagtgagcgaaccctgcccaggctccaagaagcagctgaagtttgaagagctccagtgcgacgtgtccatggaggaggacagccggcaggagtggaccttcaccctgtatgactttgacaacaacggcaaggtcacccgagaggacatcaccagcttgctgcacaccatctatgaggtggtggactcctctgtcaaccactccccaacatccagcaagatgctgcgggtaaagctcaccgtggcccccgatggcagccagagcaagaggagcgtccttgtcaatcaggctgacctgcagagcgcaaggccccgagcagagaccaagcccactgaggacctgcggagctgggagaagaagcagcgagccccgctcaggttccagggtgacagccgcctggagcagtctggctgctaccaccattgcgtagatgagaacatcgagaggagaaaccactacttagatctcgccgggatagaaaactacacgtcccaatttgggcctggctccccttccgtggcccagaagtcagaactgcccccccgcacctccaatcccactcgatctcgctcccatgagccggaagccatccacatcccacaccgaaagccccaaggcgtggacccggcctccttccacttccttgacaccccaatcgccaaggtctcagagctccagcaacggctccggggcacccaggacgggagcaagcactttgtgaggtcccccaaggcccagggcaagagtgtgggtgtgggccacgtggccagaggggcaagaaacaagccccctctgggacccgccatccctgcggtgtccccctccgcccacctggctgccagcccggccctcctcccctccctagcccccctcgggcacaagaagcacaagcaccgagccaaggagagccagcagggctgccggggcctgcaggcaccactggcctcaggtggccctgtcctggggcgggagcacctgcgggagctgcccgccttggtggtgtatgagagccaggccgggcagccggtccagagacatgagcaccaccaccaccatgaacatcaccaccattaccaccacttctaccagacatagagcccctccccagggccccaccctgccatatgaaggaccccacccccgacaccacaaggcattattattctattaattattgttattatgatgattattgttattaataattattgttactccactaatatttagctagcctacatgtagaagatctatggaaacacagaactaaacttttatttatatgttgtggggactgcataactagcccaggaaatgactctggttttgagtggcctgtaatgggcagaggctccctcggggctcgggatctgcagcatctatgtggatcagcccacacccttcccagagccagggagcccttagcctcaactctgccccaccccagcctcttccaggagagcacccttacttggcccggcttccagagaccctcgaaatctccgagaagataaacagctgctacctcttagtattattctgattttattttgcccttaactgattgttatatgctacaagggatttcagtggactgcagagtgcgaacgtcttgctgttgtgtttttatgtcccaacctagaaaccttagctgtcttttctggagttgtctttcatgcttttccagtgggatcaagcccttttccccaagagtcccatctcttctgccatgcacgacatgaaaatccacttctcttccttctccttcttctctctctactttacagtgatacacacacgtatttaaggactatccctgagaccatccttctcattttggaaactgctagggagggaaccaaccacttaaacaagcgtggttttccaagatccaggcaattgtgtgctgttggttgtggtggaggatgtggcacatatatacgtacctacacggttctctaacagagctttctgtatctatagatagatgccatctgtccatttctatgtatctttctataaatatacactctcaggtatcttttctggtgtgtataaatcagtggtttgcttccctggatgcttctggaacccagatgtgaccctgcttgtctccttttggggctggacggctctcagatgctttcatcagaggtccattctcgggttttggggtctgatggattttggagagaactgctggggtacagaaacttggtgggaaaaggggactgtggccagagttgggaccctggagcagcatcctctgcagagaaggattttgtctggccagagcctggagaaacctgaaaaagaaccagtcagctagccagggtctcagagaaaagcagattacacactcaaattgggtaatttgagcagagcttaataaaggcagtatttacaaagtgtgggctaagcctcccatgagagtgcagaaccctggggctagcagtgtggggcgctattcccacccctgggcctgagtggggaaggagttatctttagcagacagaggattgctggaggagtgagaggggcacctgaaggagctgtgacctttgcttaaaggatgcagccagtcatggggaccctccagggaaattaatatcctgacctgctttcctgccccccagccccctcaatccattggctgaggccgctggaagccaccgggccaagggagcttgttgatgtgggtcacacgggcatgttcccaggtcagagaggagagtggagagtgaatctagggagactcaagagggagaagtgactccagctaccttcctttctgccgttttgtctcccagctggcattctcttttccagagcctcgagtttgggtttaatgtagttagtaaggagttacttccaaaggtagtgggcttagttgtcaccgtattcttaattttattaatgactgatgtgcctgggattggattaatacattaatccttaggacagccccatgaggcagcttggtggcagctcaggaagcatgtctaaggctcagaagttcataactcccttgaggccgcacagagggcggagctggaattctggtctcccactcgatcccttcgccactggtgcagagcttaatcacggccatgggctgcccttgttttgggttgtgggtttctgttcagtgagaacgcaactcaatccaaagtgaatgaaaccaagttggaaggcagggagggaactggctttgagatgacagggtccaggatgtgaatgcagctgagactggttcttgtccctccctcttgtccctcggattgataacttgtactcaactacatgcttttgtcagggaaccctggctgctggccttctgggtcccctaaccataagaaaaaggaccttccgttagtgtaaagcccaaggcaggattctgcttggctgggcttcgatctggtacccatagctggaccaatcatgacatcccagatggggtcacgtggccaacctgccgcaagggggtggggtctgtaccggaagacaggaggggaggggtgcagatcggacaggaagtaatggcatcccaggccccgaattgctgcaaccctggaggccagcccggagttgagactactggttttagagcagttcctctgcctccctaagctccacacctgtcaggattctgttacttcttggtaactgggacttgcccaactttaaaaacattatttaaaaaaatagtaatgtgcacatgtaaaagattcaaatagtatatatacaaggtgtacagtaaaaagtaaacttccctccatcccaggcctgccagcatccctgatgccgactttctgggtgtggcctagggcccctcagtgtaatgtaggggttgtgagcacagactttggtgccagtttgctaggttcgaatcctgactccctctttgtagctctgtgcttcaattgaaatactgtgcctcagtttctcctttataaaggcagggatcatgagagtgcctgtcccttgtgagcactatgaaagtgttagctgttctttaccagaataaatgcatttctatatcttcccatatgcattttgttaatttttaaagtatttcaaacacaaagtttgaaacagaaaattgtgtaacattaactatgaacttaccacccagaatttacaaatgctgacattttgcaatatttatttcggatctatttttaagggggggaaccctgcagttactgcttaatcctcttcccaccccacccttttatttttacacaaggagcatagtgttcatacttatgctatttttttcagtaactgaatatatttggagatctccctccctaggtcatagagctctgcccccttctctctaacagctgctcagccttctgtgactagaggtgctgtcaccagcttgccccatcccctcctggtggtcataagggtcatctctcatcccaggctctggcgaacactgtgctgagagtccttgcatacagctctcccggtgcccacaggcaggaacacaggcgacagaaagtttccacgtggaactgcagagttcaagagcaagtgtgatttcaattttgatgagattgtacatgacctctaaaagaggttatactggccgggcacggtggctcacgcctgtaatctcaacactttgggagaccgaggtgggtggatcacctgaggtcaggagttcgagaccaacctgggcaacatggtgaaaccccgtttctactaaaaatacaaaaaattagctgggcatggtggtgcgtgcctgtaatctcagctactcgggaggccaaggcacgagaatcgcttgaacctgggaggcagagattgcagtgagctaagattgcaccactgtactccagcctgggcgacagagtgagactccatctcaaataaataaagaggttatactgaataatgaggaatcaaaggaagaagaagaaagagagaggaaggaaggttggaaggaaggaaggagggaaaattagaaggggaaaccatgattgctggtgaggttttgagcacattttcctgcaggctggtatgggtgagaggtttggtcttgtttgcaaatcttctgaaggccattccagaggagcagttgccactgccccatcccctgagctctgagcgtgggggttcccctggggagactcctggtgagaggatgccgatttctgctgatctgtcactgggtaccgaggactgggtgtgtttaaggcagacagccaggtgaggatcccagctactggggcctgctgtcatctcctgggagtacccgggggtcaggagcctaggggactcttgcacttcacatccagccatgctaattacactttttggcaaaggaaacagctaggagcagtttctttcactcctacagccccgttttctcagtgtttagacctcgaattattactgggctagagggaaggcagcctctgaagtgtggcaggaggaggggaagtctgcctgcatcttggtgtgtctgtcagatgccagcactaataacctggcttctgtgaggcctgtcagtgctctcaggaatgaaaggggacccctgagaggtgctcagtaccagcaggctgtgaatgctctctacccaccaccctcacctcctcgttaaagatggtgctacctgccacacagcagacatctggtcgctgcacacccgaaagaccccaaggcagtctgccccttgtccagccacacgccagcacccaccctcctggcccctgcctcggcctccccagaccagctgcacccagcccccaacacgcaccccttctccagatgtgtgcagggcctcattttgcagagcaaagacagatgtttcagccacacgctttattaacttctaaaacctgtgctcaggacactcttcaacagtcatgaaaagtttgatcacttgccacagtcaggacctttgtgtggggctctgatctgatgttcggtctcatcatctcccaaaccagcagtcgtttgtaccccaaccctctgctcaggggctcatacccccaaatgattttcctgatttatgtatttccctacaaagggctttctatacctagcatctgcctccagcatgagaagggggaataggtgagacccatttgccagtagcagacggggaccctggggagaaaatggcagagcctgttggagactccctgtctccagctgaccagccaatgggattcctcttccctccactgtctcccacaaagtagaagaatcctggtacatttagcccatgagcctggcacagatccctatctagacatgaggccctttagacatgactttggcattgaccagcctgttggcaatgggtcggggaggcagaggggatgctcacaccagtaattctcatcccctgaatgcttgggatcacctggggagagttcacaaaatactggtgcaggggtcccacctctgatgatgctgagtggtgggtctggggtgtggcccaggcatcatgatgtttcaggcccccaggtgacttcttaggcagcccagctaagcccctagagccttgcaatttcccccaaatgacctcagagggcccgatttgagggaaatgcctaacttcaggggccgtaagaatcccccagggagcatgtgaaatgcagataccaggcccacccccagagatgagctgaggtgggtcaggggtgaagtgcagggatcagtgtttttcacaagctccatacctccaggaaatggtgttgtggttgggcccgtagaaaacattctgagagtcctgttgcctgtgccttggtgcacgtggggtggaatcccagtggccctgccttgaggaggatgtgcattaacgtggtaggggagacagagacagctccacctgccccctgccccaccggggacctccaaaaacttcatggatgttagagcaagcagccatgctgcagcagaggatgaggctggcggatttagtaagagccctctgtgtttgggctgagttctttctctagttgccctgtcatctggcctctggataacccacctctcctccctcatcctaaaattacagatggcgaaagatggccacatttagtgagacccctaaggtcctccaactagggtgggtccacagtggcccctggtgcatggaccacacactctcttccctcctctggctcaggactacggtctgaaattagggagatatgaatgtctttcttgaaaacttctcttcccagtcttcccactttgcttgggggtccttggtcaaggccagctttggggactagggcttgttgcgactaccagctgtctcattttgctgtactgcaaactcaggcttggttccaagcttatgggggccctgtccttcccctagtagggtttgttttggggtcacatctggtcatacccttcagagagctcttccccagcctctacatcagggagagaggtaggtagggaggagcattcaaggattagaagaaggactaaagtacaacagccttggaggaactgccaggaactaagggcgagcactggagaaggcaacctgggaccccctgcgcttctgagcaggaagaccaagaccttcaggggccctaagcactgaaaacatcattcctcatccccaagccctggcatccccctgttcttctaaaataattcttttctaggtatttctgattgcaaaattctggatgggttcatccaagctgacctttgctgttttttcccttcccaacaaggcctcactttttggagccaccttagctggtgcctaggcagaggggcagtcagcagtggttatcaggatcctggctctatgggttgccttcctcctggtctgtaaagcccctgcaggcagggacttcttagatagctgcttccttagggcatggcatgtagtgggtggttaatgaatggaagagagggaatgagtgatcaagggagggaggagggagtggagtggagatttctcatcctttcctgttaatttatgacatcctcctgcctatgagtccttgactctggagttttacaaagcagtcacatttcaaataaaagtctgggaaagcaacacatcatcgccaacttttaattttgctaaataaggatattagaaaaagaatagaaaattgcagtcccttactgtttaaagaaaaaccaaaagaagttaaaaagaaaaaaaaaacaacctcattatgttgtctttgtttttgttttgttttctttccttggaaatcagtgaaagtttggtcagccacacattgtagtagggctagaatttttcttcccattttagagacgggagacctgagactccaggtgggggtgtggagtccaaatggacagttcttcccaaagctgagcgcagaccggcttgcaggtcctttttccagtcatggcctcagctgtctgcaaaggacttgggggaggctgacagctctgatgtctggagagggggcttctgcaacctccaacactggtcagtaactccacagaggccattggcgggggtggtctgcttgtatcagcaggcctgtcatggccagttcaatggtcggggctgaactatgtctcttggtgcctggtagaggggttggagtgggcctgaggccaacttgctcagagccacactccccaggaagctgtggagtctggaactctgccctgccttcctgtcccctgcccactctaagcctccagaagtcaatcctctgctcaccgggaccgtacctagcctggcccatcgatgtgtcatgtttgacccatcaagggtttcaaaaatttttaattaatttccaaaatctgagggtttcacctaaaaacctggatgtttggcttttctcataaaaatcagaaagtgggtttaccccaggctcctgttcccacatggctgcaatccgcccgcctcttccaatggtgcacatgccttttttcctgcgcccggagcccctctcagcctgattttgaggcctggctttgatgcgattcagctcatgacccctgcgcagcctcaagcacctaagttttggaggtcagtgatgccacttaaaaacctgttcagggcagagcgttagacaggaggatggctaagggagcagcttcaggcatgggaggactttcatggggaagtctttggggcagtcctggagaccctcacaatgtggccccactcctcctttagatggggcaaggtgggctggaacccccagcaaagggtcccaggctgtgtgagaccccgcccagcactccttaaacagccaagacaggtggaaagccccaactcaaaagactggctggattgtacccggctcagtgacttcccctctttgagactcagtttgcttttctgtaaagtggacctaatgaggcccgcttggcttcagctccagggactttggagatttaagcaaagcaagaaatgggaaaggagtttgttacatatcaggcttcctggaggaatgccccccagctctcttggagggggaagcaaaaagactgctgatcaggcaggggacgggaactccccgagtggccacatgggcagtctcagtaggagtctcaggccaggctctgtctgtggattcccacttctctgggctgcatctcactgttcaggctagagtctggtccttgcccatctgcaggtccaggaagatgtggccccaaattctctggacctgatgtcctagatcctgtgcacttggcttcatggatagagtctgagaaggttgcaggatccagtagctggaccacagaatgcagcctgggggtttggctaagatgagcagactggcccatggttgagactttggacctgagctgagtcctggttctactacttcctagatgtgtgacctgggacaagtgactcacctctgtgccttggtgtttttctctaacatggggctaattggggtaactaccttactgagctgttatgagtaaatgatccagtgggcgtgaagcgttcagcgcagagcctggcacgtaataggccctcgataagtaaaacagcaacagtagctgcagttaggagaatgtgaccccagaaggctcatgggaaaggaggtgcagtcctgatggatgaagggtacctgtcctccaccccggctgcagagcccccagtgagacagctgctgtggcatgctgcctctgctacacactcaaaaaacacttgaggacatgacttttccctctcaagtttgatgggatcactctgttccttccagacccgacttgtggtgtgaacttggacaagcccctgctgtctctggccttcagtaccatatttgtattatgaaactgcccttggcttgaagctagactatgggggtggcagctctaagtcctacaaacagtaggggtagtggtggggatgggcagcctgaaagccatgccagcagtgccttccttggggaaagaggtggcctctggagcaatgcttcgctaccctacatctgggtctgtccttgcccaactcctaagctgcaggatcgctgaggagtccacattgccatatctgccacttacagagtgcctactgtgcacccagcccacattcactagtgtcctcaaaacagccttgagaggaaaccaacgaggaaacagagttacagttcagttaagcaacttacctaacttgtggctaatgcatggtaggattaaacataagcctgacatatgctagccacatgaccctccctttccaggagcctgctggcattgatacaggttgacaaagaccagtcctactccgttgtctgccattactccagccaagtccagggacacgtgaggcaaggggagctggggctgctggtgtggccgagacctcagcctcagcaagatggtgccccaagctctcagggtgccctgtggtccccttcattcataacattgatcatgtttgtaactgtagttgattctcactcatcgcagtagttacatcttataaagtcacctctgacactgagttagcgcatactgaactactgatcctaggggaaatacagggttaggttcctgccagcttctggtcacaacattttcattaccaatcagtgcataaccttgttttatgtgtgcttctgtttaaagatgcctaatttactatatattcttgattcgttaacattgaactcagccaacagctctataactcatgactgaatgaagcttatctagcacacatattttctctgcaaggcatatcagagccttctgtgcttaagagcacaagatggcacttcagcgtcatgcctggggagcattttaagcagccaaatcaccaacacaaagcacaaacatgcacaaagcatgatgctaaacagactgtgagaaggatgtttgtgtataggatgagaactgaaccacgaaagcagagcatcatcttgttcgacctcagttgagaacatgttgtcgggccactcagacttttcactgctctgcgcatatcacgaatgaagtgaatgcaccatgagtattgattttgggtgatagacaaattttagtgaataggcaatttcgtaaatacagaatccacggagggtgaggatccaccgtatgtacttatctatgcctctaattatttggtttccaccaaagcacttgttcaccagattatcttataatcccaaaggcccagcaaagacaggtgcttgttcaatgtctgttgagcgactgaaggacaacacattcctggcctccccacccgcccccagcgggacctagcacatggcctgctgttgacactccatgtgtctttgttgatagaattcataaagacagatgggaaaaggggcacccctcttgcgggttcctgatgctgagagttgttggaatgttgatgctgcccccagagaagggtgacagcatgcagacagactggaaacccagaacctcctggggatattcagatggtgtcactgggctcggcctgtgggctctcagcacatctaggtactggggcccagggtgactctgagtggctcaagtcccctggccagatcctctccagatgggcccctggccatcttagccaacatcacctgattctgtttcctctgactctgtcctcaaaaggcagcatctgattgtgatttggtccagaaattcctggccagaatatttccagtgtggtgcatgtgaacttcccgccttcccttccttccctcctccctcctttcttcactggggagaaagaatttggcattcgagtatctcaccccgtcttgctaagcagtttagttagactgcaggccagtctctgtggtgtgaccaccccccagtggcaaggagctgccaaaactgagcttctgggcaagacgtgggcagagcaaagagagacccacacttggcacttcctgcccagaaaggacctgctcaggcctggctggcctttaccaccgtcatctccaggctttctgttcatccgtactttcaaagatttagtgatcaagtactatgtgtcaggaaccatgctcagcactcgataaaacagacatcatctctacctacctttgtggagctttaatctagtgtgggggacggggggactgcttccacccagaaacgacatttttatccactgcgataacttctggggagacatgggagggaataacagaggggacatgatggagatgggggactgcagagggactctccaggaagccacatttagggggtgacctcaagggtgaggaagaattagccaggtggaaagttagagggagcagctggtacaagggcctcaagggtggatggagggtgaacgcttgatgaactggtgcaggcctgtatggccgggtacagctggcaacgaggaggcccggtatgggcagaatctgggggcctgaatggtggagagtctgcttgtcaccccaagagacacatcaggaagctaggtggtcagtcgggagagagaggatgtgacactctagccaccaccacgcagagaagggattggaaacagtagcccggagaggaggctctcttggtaggatcccacggcaaccgaatggatgcacgttgtttatgacgttcttacccatgaaagcgctcaaggatccgcttgcttgcttacatgtgggatcagcactaccttccgtgctgccgaacatcttcttaagcgagggaaagaacaaaaagaaaagttggcaagaaagaaagggcaaagacagagagactgggagagaaagaggccccaatttcctctctctggtagttgctgaattggctctcgtgaaggcagaaagggaagggctgacttatgtccctctgccaggagaggggaaaggagggaggcatgatattgacttaaacgtgggggatttaaaaggcccctatgttcccactttgtgctttgcttctaacagacagcctgggacctttgaagtcggtctggcccagtggggagcgggcttctgtggagacaagatgctaacgggggcgggggaagggggccagggggcggccgaaactctattaggcatgctctagcaaaaagaaaggcaaatccaatgataatgtacatctgtttcagggaatttataagctttgaacattttttatgggcagataagtgggtccttttcttaccataacttagaacttcaaagctgagtgtgtggataatgcaaattgctgaaatatgagattttccctacaaagaggtttccaaaaaagacgaggaagaaaaagaggggggggggagagagaacgaaggctaactgatgccacagtcttttatgtacatggcaaaaacgggacagaaattgatttttatgaaagaagaaattgatgggagacatggcgtggggaggaggcggccttgtggcaggtgctgggaggcagggactggggccgggcgggtccacccaggctgtgggtcagccctgcagggttgagctgcctggctgtggctcaggccctggggacacagtgccctccctctaggagccttaatggggaaaacaagaacactgtcactcgtaatgggcatgaaaggacacttcagagccagccaaggcagtgtcagcccagaacaacaccctggaacacccaagggggctccaaggcaggatgggaccccctggtttgggaaaatcagaaaaggcctcctggaggagaggggctctagggggcaggtatgatcctgaagggaagacagtggggtgggacatttcagatggcaaaacagctgggtcaggatatccccagggtcatgcctctgccacccagaccccaccacattcagccctctgtgcttttcttgtctcccacatccccagccccagtaactagcagggacacagtcaacattcaatatgtgcatgttgaatgaatgaatgaatgaatgtgagatcgtgagaacacacagctggttggcaagcagcatcaaccagctctttcttttcactatattacatatctacagtggtagagtcatactagaagacatgatgggatggtggtgtggtctctgtagttgaccccatcatcctttctgtccataggtgattcgtctaagccagacatggcaaagtcctcacctttgccagtgactgattcaggaaagatcatgtgtgaccttattctgggcaatgagatctgaagggaagtctgttgaggaacttgtaacatgtcatggtagtggccatcttgctacagcctgaggaccacagagcacacacagagagtgctgggtccttgggaatgatgttgagcaagcacttatacatgacctggcagccacccagcatctgtactttagttatttggtttttctcaggaggagatcctgagatgaagactcaggagcaggttgttgattttgaggtggtcctgggaaagacagggaggagagtggggaagtgaggcagaaaaggaagggaagttccactccaggagcccacgtggaacatacctcagagttatcccacctgcacagggagggagctgaggtatttacccacccatccttgtcagtcattggtcaagggctatttctgtgcataggcataggcttcagcagaattgcaggtactggcagtcggaaattggaccagcaaacagaaatgattcctacaggggatacaagccaggcacaggcagtgtctgttacttggggttcctgttgcttagagttgaaagcatcataacccatcccaggtgatcatagaaggacctcaaaggaaaaggtgaggggtttggacatttcctgagaatccatgggggaaccattcagggtttggggcaggtgtcaaccacaagaacattaaacaggctcttttggcagcaaagttgggagtggtgttgaagtaactgggaaaactccacagaggctcagcgtccacctctacctgacaccctgccagcaacctgggtgatttccgcaggtgtctgaaccccgatctctcagtgttatggcccccaccaccaggaaggcctccttttctctcttctatagccactcactcctgggccccactgtgaacccagaaatgccacaccatggaagccacacactctgctgtctccttctgtcctcattcctgtccttctcacagtcagtccctcttggctcttcctagagtccctttcattccctcatttccacttcctgccgctgtactgtcacctgtggcctggatttgcactcttggtccaacaccctcaactccaacacctctgtctttctgccccatccactagacaaaagctgactctggaaaacattaggcactcagaatcaagggttctggggtcagatggataattgccatcatcctcaccaagttgccactggactttcttgcccctaaatccactgggcatttcattgctacctttcttgacttcttgattgtttttgtgatactgacacatcccccctttcagaacaccctctgcccttggattctgtgcacaggaagctagttgctcccctgaatacactctttcttccttgtaatacagcctctgattttgagcccaagaataaagactacagttctcagactccttcgcaaataaattttgtgactaaactctagtcaacagtaagtgtcatgtagcagctcctgggaatctcctttaaaaagagagcttgtttatacctattgtcatctctgttcttctgtgccccttcttccattttgctgcctggaaagcagatgtgatggctggaattccagtcaccattttggaccatgaggacaacaccctagagatgtggagtggctaaaagaagcctgtgttcctgagaacttagaggaccaggacctctattccaggcttggacacctacatttagactattatatgaggaagcaatcaacttctcacttgtttcaaccactttcacttgcagtcaaacctgaattgtaagtgaaattgctttcctgatagcaaacctgttggattttctccagaatccctgggccacttttagcagtcagattcgtctaatcctcctttaaagatggtggcagtgaaactggtacatgggacctgactgggctttgtttgcaactttctgataatttataattatttcaaaataaaaaaattttaaaaata

SEQ ID NO: 13924 - DNA, 477 bp, Homo sapiens
  source 1..477: mol_type = unassigned DNA
agtcgggccgcggcgacggcggcaggagcgcgtcccggcgccgcctcgggctccgctcggctcgggggctgcttcgggaggaggagagccaagggaggcgccaggcccgcgggccgggcgcatggcttagggacgctcccggccgccgcagccccagcatggggaaacttcactccaagccggccgccgtgtgcaagcgcagggagagcccggaaggtgacagcttcgccgtgagcgctgcctgggctcggaagggcatcgaggagtggatcgggagacagcgctgcccgggcggtgtctcgggaccccgacagctgcggttggcgggcaccataggccgaagcacccgggagctcgtgggcgacgtgttgagagacacgctcagcgaggaagaggaggacgactttcggctggaagctgctgtcagaaggttgtggactcaaacatcttggcaagcaaccctgagactaaaatatt

SEQ ID NO: 13925 - DNA, 748 bp, Homo sapiens
  source 1..748: mol_type = unassigned DNA
ttcctttgtctttgaagacccacagaccaccaggcacccctgcaggcatccctccccaggccaaacctcccctgcccgggctctggctgccctcctgggccagttctgtcttggccaaagtgctccctgtccactcaaggtctggggagggcagaggacaggtggccgccccttggcctggcctctaggcccaggcttccactacccagtcagtgttgccacagataggggaccagccccgcccatctctctgcatccaggagctccagtgcgacgtgtccatggaggaggacagccggcaggagtggaccttcaccctgtatgactttgacaacaacggcaaggtcacccgagaggacatcaccagcttgctgcacaccatctatgaggtggtggactcctctgtcaaccactccccaacatccagcaagatgctgcgggtaaagctcaccgtggcccccgatggcagccagagcaagaggagcgtccttgtcaatcaggctgacctgcagagcgcaaggccccgagcagagaccaagcccactgaggacctgcggagctgggagaagaagcagcgagccccgctcaggttccagggtgacagccgcctggagcagtctggctgctaccaccattgcgtagatgagaacatcgagaggagaaaccactacttagatctcgccgggatagaaaactacacgtcccaatttgggcctggctccccttccgtggcccagaagtcagaact

SEQ ID NO: 13926 - DNA, 564 bp, Homo sapiens
  source 1..564: mol_type = unassigned DNA
acttggccctatattttctcaaaattcttgtttctctggcactagttaacatgtggatctgaactaaagcactaagagagaacctttctctgtactctacctttgctccagttatgattatctactttgccatctgttagtatcagggttcaattaatttgccggtattgagaattctgtattcctaggtttatcccttccttaacttatttctcctcccatctcccatttcttcacatctgactacacttagtgcacagcaaaaggaaaatagtgtttctcactgatttgggttccaggtcaaagataaattcccactcagtttggaggcttactgaaatgtctaggtgcttgctctgaaacttcaagaggaagattagaaggacacattcctaagaatttaaaaccaggttgaaaactaagcatggggaagagctgcaaggtggtcgtgtgtggccaggcgtctgtgggcaaaacttcaatcctggagcagcttctgtatgggaaccatgtagtgggttcggagatgatcgagacgcaggaggacatctacgtgggctccat

SEQ ID NO: 13927 - DNA, 2948 bp, Homo sapiens
  source 1..2948: mol_type = unassigned DNA
cgccgcgccgcttcccccacctcgcaccagacctctgaaattgccctcggagactcggcctctcctataaggacgatcgtcctctcagctggagaacaaggccatgcctcagctcctacgccaggcggaagcgggagaggaaggccgacccccaagagcgccccttcagggggtccatccggccttgatctcagatgggggggtgtttgcggagggcggggcatcgcctcaacagctgggggctgcatcatggcaggaacgagtttccctgagccacggagctgcaggtcgcctcctctactaccctgctacccggttacctcttcgcctcttggtcgtcgagcagctccggctcggtcgccgccattaccacatcgcactccgcggcagccgccatcttaccgccgggaccagagagctgggtgggaggccggcggtgaagagcacttccggttggagcatagagcagctccgcggcgccgcgcccagaagggctccctcgggctcgtctaccagagagaggctccgcttggggccagagcggcctcccgcccccggatgtccacggtggtctccgcgccggggcgggagcccaggggctgtgccggttgaaaactaagcatggggaagagctgcaaggtggtcgtgtgtggccaggcgtctgtgggcaaaacttcaatcctggagcagcttctgtatgggaaccatgtagtgggttcggagatgatcgagacgcaggaggacatctacgtgggctccattgagacagaccggggggtgcgagagcaggtgcgtttctatgacacccgggggctccgagatggggccgaactgccccgacactgcttctcttgcactgatggctacgtcctggtctatagcacagatagcagagagtcttttcagcgtgtggagctgctcaagaaggagattgacaaatccaaggacaagaaggaggtcaccatcgtggtccttggcaacaagtgtgacttacaggagcagcggcgtgtagacccagatgtggctcagcactgggccaagtcagagaaggtgaagctgtgggaggtgtcagtggcggaccggcgctccctcctggagccctttgtctacttggccagcaagatgacgcaaccccagagcaagtctgccttccccctcagccggaagaacaagggcagcggctccttggatggctgaagagctgccgttcctctttcacgatcccagccccatttcagtgtctggggctctggtagatgtgttgagggcaaagtagaggacaagctgtctttcccagtcagccagggagctccccgccaggccacgccccagccactttgctccctctcacctctgggaagtgcaaatactcttggttgacatccccttcctcagccctcccagcctactccccatcccagcttttagaggatctgctccactgtctcctggggcagttgtgggtcactgtcccttccagctgccccagacaggaagcagagtcaccacgcagcagtgtcccttcttgggtctgagttcctattataggtaggggccccaccctctgggcttcccatcagcgacacacacacacttatggcaccagcctggactccagaaaaagggtgtccaggtattgtgtgtatgcatttagttgtgcacacacaaatatgctcctatactggcattaggcgtctcctcatccctcaccctgacctttctcctgtccttttcttggctggaagaagttggcctcctgggagtgtagttttctgttttaaatcccccacccctggctgggctcagtggctcacccctgtaatcccagcactttgggaggccaaggcgggtcgattacttgaggtcaggagttcacgaccagcctggccaacattgtgaaaccccatctctgccaaaaatacaaaagttagccgggcgtagtggcacatgcctgtaatcccagctacccggggaggctgaggcaggagaattgcttgaactcagaaggcggaggctgcagtgagccgagatcgtgccactgcactccagcctggtcaacagagcaagactccatctcgaagaaaaaaaaaaaaaattccccacccctaccaattgttttacttcctcttcctgctcagggagcagatgggcctcactggttgagatggaatagaataactgggctatgagtcaccagcccactttgtgacccagcaagacctttcccctctctgggcatcagtttctcatctgtaagatgaccagagttgcttagatgatctcctagatcctttccagttctcttgatttcgtaaagccaatggcttctccctctttaaggtgctatgccaaccagccctggaggctgggatctgccgctccctccagccaccagggggcaggagtgcactacctgctgtcagtcaccagagtggccgctcagtgcccagcccgccagcctcgctcttggaggctgctctttatcctgcctgtggttttcagctcagagctggacttctatttataagttacctgtatttatatttatatgcccgctctcatggtgaaggctggacaaggtgctcctctggcccctccttcttacctcagatgcctgaacagaacaaggcaaacccgtagcagcctctcaggagctgacaggtcctctttcggggctcaggagggtgggcacacacccagcggcctgcagagtaagcttattacccacaactgtgcccgctttgtgcttctaaggtgcacacctagcctaggtgagacactgcagccaggcaaccaccgacacacgccccttctcaaagccagaggtgagtggggcaggtgcccggggctgggtgagtggaattaggacacacacaggcttgggcttcaagttcatttattgatgcattggttggacacaataaaaccacaattgttatcaaaaagtt

SEQ ID NO: 13928 - DNA, 1909 bp, Homo sapiens
  source 1..1909: mol_type = unassigned DNA
gacggaagctggggagcgggcaggcggcgggggcggggcctggaggagcctacaccgactctggaggaagactggagcctttgcggcggcgctgcccctcccctggtccccgcgagctcggagggcccggctggtgctgcgggggccccgggaggttgaaaactaagcatggggaagagctgcaaggtggtcgtgtgtggccaggcgtctgtgggcaaaacttcaatcctggagcagcttctgtatgggaaccatgtagtgggttcggagatgatcgagacgcaggaggacatctacgtgggctccattgagacagaccggggggtgcgagagcaggtgcgtttctatgacacccgggggctccgagatggggccgaactgccccgacactgcttctcttgcactgatggctacgtcctggtctatagcacagatagcagagagtcttttcagcgtgtggagctgctcaagaaggagattgacaaatccaaggacaagaaggaggtcaccatcgtggtccttggcaacaagtgtgacttacaggagcagcggcgtgtagacccagatgtggctcagcactgggccaagtcagagaaggtgaagctgtgggaggtgtcagtggcggaccggcgctccctcctggagccctttgtctacttggccagcaagatgacgcaaccccagagcaagtctgccttccccctcagccggaagaacaagggcagcggctccttggatggctgaagagctgccgttcctctttcacgatcccagccccatttcagtgtctggggctctggtagatgtgttgagggcaaagtagaggacaagctgtctttcccagtcagccagggagctccccgccaggccacgccccagccactttgctccctctcacctctgggaagtgcaaatactcttggttgacatccccttcctcagccctcccagcctactccccatcccagcttttagaggatctgctccactgtctcctggggcagttgtgggtcactgtcccttccagctgccccagacaggaagcagagtcaccacgcagcagtgtcccttcttgggtctgagttcctattataggtaggggccccaccctctgggcttcccatcagcgacacacacacacttatggcaccagcctggactccagaaaaagggtgtccaggtattgtgtgtatgcatttagttgtgcacacacaaatatgctcctatactggcattaggcgtctcctcatccctcaccctgacctttctcctgtccttttcttggctggaagaagttggcctcctgggagtgtagttttctgttttaaatcccccacccctggctgggctcagtggctcacccctgtaatcccagcactttgggaggccaaggcgggtcgattacttgaggtcaggagttcacgaccagcctggccaacattgtgaaaccccatctctgccaaaaatacaaaagttagccgggcgtagtggcacatgcctgtaatcccagctacccggggaggctgaggcaggagaattgcttgaactcagaaggcggaggctgcagtgagccgagatcgtgccactgcactccagcctggtcaacagagcaagactccatctcgaagaaaaaaaaaaaaaattccccacccctaccaattgttttacttcctcttcctgctcagggagcagatgggcctcactggttgagatggaatagaataactgggctatgagtcaccagcccactttgtgacccagcaagacctttcccctctctgggcatcagtttctcatctgtaagatgaccagagttgcttagatgatctcctagatcctttccagttctcttgatttcgtaaagccaatggcttctccctctttaaggtgctatgccaaccagccctgg

SEQ ID NO: 13929 - DNA, 563 bp, Homo sapiens
  source 1..563: mol_type = unassigned DNA
aggcggcgggggcggggcctggaggagcctacaccgactctggaggaagactggagcctttgcggcggcgctgcccctcccctggtccccgcgagctcggagggcccggctggtgctgcgggggccccgggaggttcggagatgatcgagacgcaggaggacatctacgtgggctccattgagacagaccggggggtgcgagagcaggtgcgtttctatgacacccgggggctccgagatggggccgaactgccccgacactgcttctcttgcactgatggctacgtcctggtctatagcacagatagcagagagtcttttcagcgtgtggagctgctcaagaaggagattgacaaatccaaggacaagaaggaggtcaccatcgtggtccttggcaacaagtgtgacttacaggagcagcggcgtgtagacccagatgtggctcagcactgggccaagtcagagaaggtgaagctgtgggaggtgtcagtggcggaccggcgctccctcctggagccctttgtctacttggccagcaagatgacgcaaccccagagcaagtc

SEQ ID NO: 13930 - DNA, 997 bp, Homo sapiens
  source 1..997: mol_type = unassigned DNA
cgggggcggggcctggaggagcctacaccgactctggaggaagactggagcctttgcggcggcgctgcccctcccctggtccccgcgagctcggagggcccggctggtgctgcgggggccccgggaggttgaaaactaagcatggggaagagctgcaaggtggtcgtgtgtggccaggcgtctgtgggcaaaacttcaatcctggagcagcttctgtatgggaaccatgtagtgggttcggagatgatcgagacgcaggaggacatctacgtgggctccattgagacagaccggggggtgcgagagcagcacagatagcagagagtcttttcagcgtgtggagctgctcaagaaggagattgacaaatccaaggacaagaaggaggtcaccatcgtggtccttggcaacaagtgtgacttacaggagcagcggcgtgtagacccagatgtggctcagcactgggccaagtcagagaaggtgaagctgtgggaggtgtcagtggcggaccggcgctccctcctggagccctttgtctacttggccagcaagatgacgcaaccccagagcaagtctgccttccccctcagccggaagaacaagggcagcggctccttggatggctgaagagctgccgttcctctttcacgatcccagccccatttcagtgtctggggctctggtagatgtgttgagggcaaagtagaggacaagctgtctttcccagtcagccagggagctccccgccaggccacgccccagccactttgctccctctcacctctgggaagtgcaaatactcttggttgacatccccttcctcagccctcccagcctactccccatcccagcttttagaggatctgctccactgtctcctggggcagttgtgggtcactgtcccttccagctgccccagacaggaagcagagtcaccacgcagcagtgtcccttcttgggtctgagttcctattataggtaggggccccaccctctggg

SEQ ID NO: 13931 - DNA, 992 bp, Homo sapiens
  source 1..992: mol_type = unassigned DNA
cgggggcggggcctggaggagcctacaccgactctggaggaagactggagcctttgcggcggcgctgcccctcccctggtccccgcgagctcggagggcccggctggtgctgcgggggccccgggaggttgaaaactaagcatggggaagagctgcaaggtggtcgtgtgtggccaggcgtctgtgggcaaaacttcaatcctggagcagcttctgtatgggaaccatgtagtgggttcggagatgatcgagacgcaggaggacatctacgtgggctccattgagacagaccggggggtgcgagagcagatagcagagagtcttttcagcgtgtggagctgctcaagaaggagattgacaaatccaaggacaagaaggaggtcaccatcgtggtccttggcaacaagtgtgacttacaggagcagcggcgtgtagacccagatgtggctcagcactgggccaagtcagagaaggtgaagctgtgggaggtgtcagtggcggaccggcgctccctcctggagccctttgtctacttggccagcaagatgacgcaaccccagagcaagtctgccttccccctcagccggaagaacaagggcagcggctccttggatggctgaagagctgccgttcctctttcacgatcccagccccatttcagtgtctggggctctggtagatgtgttgagggcaaagtagaggacaagctgtctttcccagtcagccagggagctccccgccaggccacgccccagccactttgctccctctcacctctgggaagtgcaaatactcttggttgacatccccttcctcagccctcccagcctactccccatcccagcttttagaggatctgctccactgtctcctggggcagttgtgggtcactgtcccttccagctgccccagacaggaagcagagtcaccacgcagcagtgtcccttcttgggtctgagttcctattataggtaggggccccaccctctggg

SEQ ID NO: 13932 - DNA, 1644 bp, Homo sapiens
  source 1..1644: mol_type = unassigned DNA
agcctacaccgactctggaggaagactggagcctttgcggcggcgctgcccctcccctggtccccgcgagctcggagggcccggctggtgctgcgggggccccgggaggtacggacctgggaggcgaggctcgtccggcgctaggatcggcctccgcctccgggccgctttaggttgaaaactaagcatggggaagagctgcaaggtggtcgtgtgtggccaggcgtctgtgggcaaaacttcaatcctggagcagcttctgtatgggaaccatgtagtgggttcggagatgatcgagacgcaggaggacatctacgtgggctccattgagacagaccggggggtgcgagagcaggtgcgtttctatgacacccgggggctccgagatggggccgaactgccccgacactgcttctcttgcactgatggctacgtcctggtctatagcacagatagcagagagtcttttcagcgtgtggagctgctcaagaaggagattgacaaatccaaggacaagaaggaggtcaccatcgtggtccttggcaacaagtgtgacttacaggagcagcggcgtgtagacccagatgtggctcagcactgggccaagtcagagaaggtgaagctgtgggaggtgtcagtggcggaccggcgctccctcctggagccctttgtctacttggccagcaagatgacgcaaccccagagcaagtctgccttccccctcagccggaagaacaagggcagcggctccttggatggctgaagagctgccgttcctctttcacgatcccagccccatttcagtgtctggggctctggtagatgtgttgagggcaaagtagaggacaagctgtctttcccagtcagccagggagctccccgccaggccacgccccagccactttgctccctctcacctctgggaagtgcaaatactcttggttgacatccccttcctcagccctcccagcctactccccatcccagcttttagaggatctgctccactgtctcctggggcagttgtgggtcactgtcccttccagctgccccagacaggaagcagagtcaccacgcagcagtgtcccttcttgggtctgagttcctattataggtaggggccccaccctctgggcttcccatcagcgacacacacacacttatggcaccagcctggactccagaaaaagggtgtccaggtattgtgtgtatgcatttagttgtgcacacacaaatatgctcctatactggcattaggcgtctcctcatccctcaccctgacctttctcctgtccttttcttggctggaagaagttggcctcctgggagtgtagttttctgttttaaatcccccacccctggctgggctcagtggctcacccctgtaatcccagcactttgggaggccaaggcgggtcgattacttgaggtcaggagttcacgaccagcctggccaacattgtgaaaccccatctctgccaaaaatacaaaagttagccgggcgtagtggcacatgcctgtaatcccagctacccggggaggctgaggcaggagaattgcttgaactcagaaggcggaggctgcagtgagccgagatcgtgccactgcactccagcctggtcaacagagcaagactccatctcg

SEQ ID NO: 13933 - DNA, 1598 bp, Homo sapiens
  source 1..1598: mol_type = unassigned DNA
agcctacaccgactctggaggaagactggagcctttgcggcggcgctgcccctcccctggtccccgcgagctcggagggcccggctggtgctgcgggggccccgggagcgtgcttctgttcttcaaggttgaaaactaagcatggggaagagctgcaaggtggtcgtgtgtggccaggcgtctgtgggcaaaacttcaatcctggagcagcttctgtatgggaaccatgtagtgggttcggagatgatcgagacgcaggaggacatctacgtgggctccattgagacagaccggggggtgcgagagcaggtgcgtttctatgacacccgggggctccgagatggggccgaactgccccgacactgcttctcttgcactgatggctacgtcctggtctatagcacagatagcagagagtcttttcagcgtgtggagctgctcaagaaggagattgacaaatccaaggacaagaaggaggtcaccatcgtggtccttggcaacaagtgtgacttacaggagcagcggcgtgtagacccagatgtggctcagcactgggccaagtcagagaaggtgaagctgtgggaggtgtcagtggcggaccggcgctccctcctggagccctttgtctacttggccagcaagatgacgcaaccccagagcaagtctgccttccccctcagccggaagaacaagggcagcggctccttggatggctgaagagctgccgttcctctttcacgatcccagccccatttcagtgtctggggctctggtagatgtgttgagggcaaagtagaggacaagctgtctttcccagtcagccagggagctccccgccaggccacgccccagccactttgctccctctcacctctgggaagtgcaaatactcttggttgacatccccttcctcagccctcccagcctactccccatcccagcttttagaggatctgctccactgtctcctggggcagttgtgggtcactgtcccttccagctgccccagacaggaagcagagtcaccacgcagcagtgtcccttcttgggtctgagttcctattataggtaggggccccaccctctgggcttcccatcagcgacacacacacacttatggcaccagcctggactccagaaaaagggtgtccaggtattgtgtgtatgcatttagttgtgcacacacaaatatgctcctatactggcattaggcgtctcctcatccctcaccctgacctttctcctgtccttttcttggctggaagaagttggcctcctgggagtgtagttttctgttttaaatcccccacccctggctgggctcagtggctcacccctgtaatcccagcactttgggaggccaaggcgggtcgattacttgaggtcaggagttcacgaccagcctggccaacattgtgaaaccccatctctgccaaaaatacaaaagttagccgggcgtagtggcacatgcctgtaatcccagctacccggggaggctgaggcaggagaattgcttgaactcagaaggcggaggctgcagtgagccgagatcgtgccactgcactccagcctggtcaacagagcaagactccatctcg

SEQ ID NO: 13934 - DNA, 585 bp, Homo sapiens
  source 1..585: mol_type = unassigned DNA
tacaccgactctggaggaagactggagcctttgcggcggcgctgcccctcccctggtccccgcgagctcggagggcccggctggtgctgcgggggccccgggaggttgaaaactaagcatggggaagagctgcaaggtggtcgtgtgtggccaggcgtctgtgggcaaaacttcaatcctggagcagcttctgtatgggaaccatgtagtgggtcaccatcgtggtccttggcaacaagtgtgacttacaggagcagcggcgtgtagacccagatgtggctcagcactgggccaagtcagagaaggtgaagctgtgggaggtgtcagtggcggaccggcgctccctcctggagccctttgtctacttggccagcaagatgacgcaaccccagagcaagtctgccttccccctcagccggaagaacaagggcagcggctccttggatggctgaagagctgccgttcctctttcacgatcccagccccatttcagtgtctggggctctggtagatgtgttgagggcaaagtagaggacaagctgtctttcccagtcagccagggagctccccgccaggccacgcccc

SEQ ID NO: 13935 - DNA, 535 bp, Homo sapiens
  source 1..535: mol_type = unassigned DNA
acaccgactctggaggaagactggagcctttgcggcggcgctgcccctcccctggtccccgcgagctcggagggcccggctggtgctgcgggggccccgggaggttgaaaactaagcatggggaagagctgcaaggtggtcgtgtgtggccaggcgtctgtgggcaaaacttcaatcctggagcagcttctgtatgggaaccatgtagtgggtgagtgttgttggagggggaggaacagtggaagaagttgaaaaataaggaataggacttgatcacaacacacacaggctaaaagctgctcctggtggttttcccccctggaagaataaaacttacattgtaacagatcaactctacaacactgaacaaatacggagggagaaagccctatgtccaagataggaaagagaagctgtcatgtcacacttgtgcttagcatggaattagcataaaattaatgtccattggccgggtgcggtggatcacgcctgtaatccgagcactttgggaggctgaggcgggtggatcacctca

SEQ ID NO: 13936 - DNA, 1041 bp, Homo sapiens
  source 1..1041: mol_type = unassigned DNA
accgactctggaggaagactggagcctttgcggcggcgctgcccctcccctggtccccgcgagctcggagggcccggctggtgctgcgggggccccgggaggttgaaaactaagcatggggaagagctgcaaggtggtcgtgtgtggccaggcgtctgtgggcaaaacttcaatcctggagcagcttctgtatgggaaccatgtagtggacagttttctcattttataccaggttcggagatgatcgagacgcaggaggacatctacgtgggctccattgagacagaccggggggtgcgagagcaggtgcgtttctatgacacccgggggctccgagatggggccgaactgccccgacactgcttctcttgcactgatggctacgtcctggtctatagcacagatagcagagagtcttttcagcgtgtggagctgctcaagaaggagattgacaaatccaaggacaagaaggaggtcaccatcgtggtccttggcaacaagtgtgacttacaggagcagcggcgtgtagacccagatgtggctcagcactgggccaagtcagagaaggtgaagctgtgggaggtgtcagtggcggaccggcgctccctcctggagccctttgtctacttggccagcaagatgacgcaaccccagagcaagtctgccttccccctcagccggaagaacaagggcagcggctccttggatggctgaagagctgccgttcctctttcacgatcccagccccatttcagtgtctggggctctggtagatgtgttgagggcaaagtagaggacaagctgtctttcccagtcagccagggagctccccgccaggccacgccccagccactttgctccctctcacctctgggaagtgcaaatactcttggttgacatccccttcctcagccctcccagcctactccccatcccagcttttagaggatctgctccactgtctcctggggcagttgtgggtcactgtcccttccagctgccccagacaggaagcagagtcaccacgcagcagtgtccctt

SEQ ID NO: 13937 - DNA, 1461 bp, Homo sapiens
  source 1..1461: mol_type = unassigned DNA
cgactctggaggaagactggagcctttgcggcggcgctgcccctcccctggtccccgcgagctcggagggcccggctggtgctgcgggggccccgggaggttgaaaactaagcatggggaagagctgcaaggtggtcgtgtgtggccaggcgtctgtgggcaaaacttcaatcctggagcagcttctgtatgggaaccatgtagtgggttcggagatgatcgagacgcaggaggacatctacgtgggctccattgagacagaccggggggtgcgagagcaggtcaccatcgtggtccttggcaacaagtgtgacttacaggagcagcggcgtgtagacccagatgtggctcagcactgggccaagtcagagaaggtgaagctgtgggaggtgtcagtggcggaccggcgctccctcctggagccctttgtctacttggccagcaagatgacgcaaccccagagcaagtctgccttccccctcagccggaagaacaagggcagcggctccttggatggctgaagagctgccgttcctctttcacgatcccagccccatttcagtgtctggggctctggtagatgtgttgagggcaaagtagaggacaagctgtctttcccagtcagccagggagctccccgccaggccacgccccagccactttgctccctctcacctctgggaagtgcaaatactcttggttgacatccccttcctcagccctcccagcctactccccatcccagcttttagaggatctgctccactgtctcctggggcagttgtgggtcactgtcccttccagctgccccagacaggaagcagagtcaccacgcagcagtgtcccttcttgggtctgagttcctattataggtaggggccccaccctctgggcttcccatcagcgacacacacacacttatggcaccagcctggactccagaaaaagggtgtccaggtattgtgtgtatgcatttagttgtgcacacacaaatatgctcctatactggcattaggcgtctcctcatccctcaccctgacctttctcctgtccttttcttggctggaagaagttggcctcctgggagtgtagttttctgttttaaatcccccacccctggctgggctcagtggctcacccctgtaatcccagcactttgggaggccaaggcgggtcgattacttgaggtcaggagttcacgaccagcctggccaacattgtgaaaccccatctctgccaaaaatacaaaagttagccgggcgtagtggcacatgcctgtaatcccagctacccggggaggctgaggcaggagaattgcttgaactcagaaggcggaggctgcagtgagccgagatcgtgccactgcactccagcctggtcaacagagcaagactccatctcgaagaaaaaaaaaaaaaattccccacccctaccaattgttttacttcctcttcctgctca

SEQ ID NO: 13938 - DNA, 833 bp, Homo sapiens
  source 1..833: mol_type = unassigned DNA
tggagcctttgcggcggcgctgcccctcccctggtccccgcgagctcggagggcccggctggtgctgcgggggccccgggaggttgaaaactaagcatggggaagagctgcaaggtggtcgtgtgtggccaggcgtctgtgggcaaaacttcaatcctggagcagcttctgtatgggaaccatgtagtgggttcggagatgatcgagacgcaggaggacatctacgtgggctccattgagacagaccggggggtgcgagagcaggtgcgtttctatgacacccgggggctccgagatggggccgaactgccccgacactgcttctcttgcactgatggctacgtcctggtctatagcacagatagcagagagtcttttcagcgtgtggagctgctcaagaaggagattgacaaatccaaggacaagaaggagggtctcactctgccacccaggctggagtgcagtggcatgatcacagctcactgcagcctcaacctcccaaggcttaggtggtcctcctgcctcagccccctgctaagactacaggtcaccatcgtggtccttggcaacaagtgtgacttacaggagcagcggcgtgtagacccagatgtggctcagcactgggccaagtcagagaaggtgaagctgtgggaggtgtcagtggcggaccggcgctccctcctggagccctttgtctacttggccagcaagatgacgcaaccccagagcaagtctgccttccccctcagccggaagaacaagggcagcggctccttggatggctgaagagctgccgttcctctttcacgatcccagccccatttcagtgtctg

SEQ ID NO: 13939 - DNA, 4213 bp, Homo sapiens
  source 1..4213: mol_type = unassigned DNA
gaggtttctgttagggaccgtctttgggagtgatctatctctgctctctgggggggatctttgtctggagcttttggggggcttgtgtttggaagtttgccttcggggagatatctgtctgggacctcttagggtttctgtatctgagctttctcttttgtgtctgtcagtccaagggcagcaaaaagtatgtcctttctgaagcctttttttccgtaggtttcttcattcttttctctcttgtcttatgttcattttagccatagacttgactggagtttagagggaattgattgttgtccagatgagtcgtacaggaaagcagattgtctttttttgagacggagtcttgctctgccgcccaggctggagtgcagtggcatattcttggctcactgcaatctccgcctcctggattcaagcgattctcctgcctcagcctctcaagtagctgggattacaggcacccgccaccacgcctgactaattttttgtatgtttagtagagatgaggtttcactatgttggccagtctggtctcgaactcctgactttgtgatctgcccacctcggcctcccgaagtgctgagattacaggcgtgagccaccgtgccctgccccagattatcctttttatttgctcagtccccccagggagcagatggcttcagacagccacacaaaacactgttcctgcttaattctccatggggtcatggttaaagagaggaagctgggctgagctccctttactaattggtcctctacatcttgcgcacagaagggaacctggcccagtggccagtgactctcctctccctttatggcagcatttccaagcacctgccctgtgacagatactggctaggtactggggataacaaagacgaataaaataacagcttaccatccagtagtagacatggagacatccgtttcctctgactagcattgggatggtgctgaaaccctggaactatacattcagtttagaactatacattcagtttagaactctcagttatggacgttctgccttctgtttttttggtttttgtttttgtccaccagaaaacatctgctagtaactgccttctgtgttgatgctttctttcctcaccttacccagcgtgcttctgttcttcaaggttgaaaactaagcatggggaagagctgcaaggtggtcgtgtgtggccaggcgtctgtgggcaaaacttcaatcctggagcagcttctgtatgggaaccatgtagtgggtgagtgttgttggagggggaggaacagtggaagaagttgaaaaataaggaataggacttgatcacaacacacacaggctaaaagctgctcctggtggttttcccccctggaagaataaaacttacattgtaacagatcaactctacaacactgaacaaatacggagggagaaagccctatgtccaagataggaaagagaagctgtcatgtcacacttgtgcttagcatggaattagcataaaattaatgtccattggccgggtgcggtggatcacgcctgtaatccgagcactttgggaggctgaggcgggtggatcacctcaggtcgggagttcgagaccagcctaacgaacttggagaaaccctgtctctactaaaaatacaaaattagccgggtgtggtggcacatgcctgtaatcccagctattcgggaggccgaggcaggagaatcgcttgaactcgggaggtggaggttgcggtgagccgagattgcgccattgcactccagcctgggcaacgagagcaaaactccgtctcaaaaaaagaaagaaattaatgttcgttcccctaaacccaaatcatttcagtcctgccaggctgtcaattctctggcctcctcagccccctacattcctttctccccatttggtcagccttaagatgctctcatcactcacatttcccatctctctctccacttcagacagttttctcattttataccaggttcggagatgatcgagacgcaggaggacatctacgtgggctccattgagacagaccggggggtgcgagagcaggtgcgtttctatgacacccgggggctccgagatggggccgaactgccccgacactgcttctcttgcactgatggctacgtcctggtctatagcacagatagcagagagtcttttcagcgtgtggagctgctcaagaaggagattgacaaatccaaggacaagaaggaggtcaccatcgtggtccttggcaacaagtgtgacttacaggagcagcggcgtgtagacccagatgtggctcagcactgggccaagtcagagaaggtgaagctgtgggaggtgtcagtggcggaccggcgctccctcctggagccctttgtctacttggccagcaagatgacgcaaccccagagcaagtctgccttccccctcagccggaagaacaagggcagcggctccttggatggctgaagagctgccgttcctctttcacgatcccagccccatttcagtgtctggggctctggtagatgtgttgagggcaaagtagaggacaagctgtctttcccagtcagccagggagctccccgccaggccacgccccagccactttgctccctctcacctctgggaagtgcaaatactcttggttgacatccccttcctcagccctcccagcctactccccatcccagcttttagaggatctgctccactgtctcctggggcagttgtgggtcactgtcccttccagctgccccagacaggaagcagagtcaccacgcagcagtgtcccttcttgggtctgagttcctattataggtaggggccccaccctctgggcttcccatcagcgacacacacacacttatggcaccagcctggactccagaaaaagggtgtccaggtattgtgtgtatgcatttagttgtgcacacacaaatatgctcctatactggcattaggcgtctcctcatccctcaccctgacctttctcctgtccttttcttggctggaagaagttggcctcctgggagtgtagttttctgttttaaatcccccacccctggctgggctcagtggctcacccctgtaatcccagcactttgggaggccaaggcgggtcgattacttgaggtcaggagttcacgaccagcctggccaacattgtgaaaccccatctctgccaaaaatacaaaagttagccgggcgtagtggcacatgcctgtaatcccagctacccggggaggctgaggcaggagaattgcttgaactcagaaggcggaggctgcagtgagccgagatcgtgccactgcactccagcctggtcaacagagcaagactccatctcgaagaaaaaaaaaaaaaattccccacccctaccaattgttttacttcctcttcctgctcagggagcagatgggcctcactggttgagatggaatagaataactgggctatgagtcaccagcccactttgtgacccagcaagacctttcccctctctgggcatcagtttctcatctgtaagatgaccagagttgcttagatgatctcctagatcctttccagttctcttgatttcgtaaagccaatggcttctccctctttaaggtgctatgccaaccagccctggaggctgggatctgccgctccctccagccaccagggggcaggagtgcactacctgctgtcagtcaccagagtggccgctcagtgcccagcccgccagcctcgctcttggaggctgctctttatcctgcctgtggttttcagctcagagctggacttctatttataagttacctgtatttatatttatatgcccgctctcatggtgaaggctggacaaggtgctcctctggcccctccttcttacctcagatgcctgaacagaacaaggcaaacccgtagcagcctctcaggagctgacaggtcctctttcggggctcaggagggtgggcacacacccagcggcctgcagagtaagcttattacccacaactgtgcccgctttgtgcttctaaggtgcacacctagcctaggtgagacactgcagccaggcaaccaccgacacacgccccttctcaaagccagaggtgagtggggcaggtgcccggggctgggtgagtggaattaggacacacacaggcttgggcttcaagttcatttattgatgcattggttggacacaataaaaccacaattgttatcaaaaa

SEQ ID NO: 13940 - DNA, 3741 bp, Homo sapiens
  source 1..3741: mol_type = unassigned DNA
cagaataatgacatggttccttccatcctccaaaggtgaccaataatagtttgtaagtatcattatgaactaatgaattttcaacatatttgatatatttcaatccattgccatcattgttcttatcgatatttgagttggctcactttgccagtaagagtctattcaaattggcttctgagtccatttgacacaacacctttgatctttgacagtttccttggttttaggtgctagatgatttctcaggctcaccttagacatttcctgccacagacttagaatcagccatttctctaaggaccctgattccatttcatgagaaatgatagagaccacaatcaaaacaagtcatgaatttatactgatattttcaattcaaattaaagatgaggtttttgctaaatttttttgagtttatatttgtatgtcttatgctgaaaaatcttgtttcctaattagtaacataattattcatttgatgggtaaatattttagggccgattctttggttttatagccaagataccctgttgataaagtcttgtgggagcaattataagactggcttattttgaagctttttaaaaaagacatccttacctgttttaactgtagattatattaacttaaataggtacagcccacgcttgatggaaaaaattctccaaatggctgaaggtattgatattggggagatgccttcatatgatctggtgctgtccaaaccttccaaaggtcaaaaacgccacctctcaacatgtgatggtcaaaatcctcctaaaaagcaagccggttccaaattccatgcgagacctcgttttgagcctgtacattttgtagctagtagttcaaaagatgaaagacaggaagatccttatggccctcaaacaaaagaggtaaatgaacaaacacattttgccagcatgccaagagacatctaccaagattatactcaagactctttcagtatacaagatgggaattctcagtattgtgattcatcaggattcattctcacaaaagaccagcctgtaacagccaacatgtattttgacagtgggaaccctgccccaagcaccacatcacagcaggcaaactctcagtcaactcctgagccttcaccatcacagacatttcccgagtctgtggtagccgagaagcagtattttattgaaaaattaacggcgacaatctggaagaacctttctaatccagaaatgacttctggatctgataaaattaattatacatatatgttaactcgttgtattcaggcgtgtaagacaaatcctgagtatatatatgctcctttaaaggaaattcctcctgccgacatccccaaaaataaaaaacttctaactgatggctatgcttgtgaagttagatgccaaaatatctacttaactacaggttatgctggcagcaagaatgggtccagggatcgagctacagagctagctgtaaaactcttgcagaaacgtattgaagttagagttgtccggcggaaattcaagcatacatttggagaggacctcgtggtgtgtcagattggcatgtcctcctatgaatttcctccagctctgaagccaccagaagacctggtggtgctgggtaaagatgcttccgggcagccaatttttaatgcttctgccaaacactggaccaattttgtcattacagaaaatgcaaatgatgcaattggtatccttaacaattctgcctcattcaacaagatgtcaattgaatacaaatatgagatgatgccaaatcgcacatggcgttgtcgagtgtttttacaagatcactgcttagctgaaggttatggaaccaagaaaacaagtaaacatgcagctgccgacgaggctttgaaaattcttcaaaaaacacagcccacttatccatctgtcaaaagttcacaatgccatacaggctcttcacccagaggatctggaaagaagaaagatataaaggatcttgtagtttatgagaattcttcaaatcccgtgtgcacgctgaacgacacagctcagtttaaccgaatgacagttgagtatgtctatgaaaggatgacaggcctccgctggaaatgcaaagtgattctagagagtgaagtaattgcagaagcagttggggtgaagaaaactgtcaaatatgaagctgctggggaagctgtgaaaaccctcaaaaagacccagccaactgtcattaacaacttgaagaaaggagctgttgaagatgtgatttcaagaaatgaaattcagggccgctcagcagaggaggcttacaaacagcaaatcaaagaagataatattggaaatcagctgctgagaaagatgggttggactggtggtggtttaggtaaatctggtgagggcatacgggagcctatctcagtgaaagagcagcataagcgggaagggcttggtctggatgtagagagggtgaataaaattgccaagagagatattgaacagatcatcagaaactacgcccgctccgagagccacacagatttgactttctctagagagctgactaatgatgaacggaagcaaatacatcagattgcccagaagtatggtcttaagagtaagtctcatggggtgggccatgataggtacctagtggtaggtagaaaaagacggaaggaagacctactagatcagctcaaacaggaaggccaagtgggccattacgagcttgttatgcctcaagcaaattgagatcttactaatttattttgtaaatgcctaatgaggcagatttttgaattaaagaaatgctacatgttccggttgcagagtatattcataagatgtctcaccttgttcatttcacatagtggtttattagatattggaacctaaagaattctgtccacttgtattagcttaatccagcagatgatattgtgcagttactgtttgtgtctttgatattgctgtgtccctcagattttagtagtttgacaagcaagaacacatatccaaatggaattttaccctgagaaattatcattttaaagggcatagcacagcaatctgcaacaatatgtaaagttgatattgactacaataaaaatccagtcttaattccagatttactgaaaatgtcagatcattttgtattaatctattttcatctttgtgtgaagccagttatagaatgtttgacaataaattgtgctgtacacgtaaatgtccttaccaactaaatgatgtaaaactttcttaaagtaattttagtgttcatttatttataacttctaccatgtgatttccagactattggaagtgatttactgtatcttgtgatatatgggttttaacaaattctagtcttcacgctgagagagcactacttgagagagcagttgaaagtttcaaaaactttggttcaatctgaagaaaggaagcttgaactgtttgttcttggtgccttgcagagagactcacagcaactctccattatagctttcacacggtttggatgtgcagcacatccaaggcaaccacagctgtggtagagcttggtaaaagactgaagatacattggtgctttgatgaaaaggtcagttggctggtccctctctcaaaaagcttattaagcctgaaaagccaactttgtaacatatttaaaactgctattttcgcttatttctggaatgtaaaaaaaaaaaatgtataaaaagaattagtgtatgcttcctgaataaaaaggagccaaagttgatcagaa

SEQ ID NO: 13941 - DNA, 3269 bp, Homo sapiens
  source 1..3269: mol_type = unassigned DNA
cgagccagtgctggagcagtggcgctatagccacgaaagtgactggcagtgggctctgcggcgcagcttcatctgtcggcacctgcacagctatcccggggctgccctcgaccagctcctcgcgctctccgccgcctggaccaaccacgtcttcctgggctgcaggtacagcccacgcttgatggaaaaaattctccaaatggctgaaggtattgatattggggagatgccttcatatgatctggtgctgtccaaaccttccaaaggtcaaaaacgccacctctcaacatgtgatggtcaaaatcctcctaaaaagcaagccggttccaaattccatgcgagacctcgttttgagcctgtacattttgtagctagtagttcaaaagatgaaagacaggaagatccttatggccctcaaacaaaagaggtaaatgaacaaacacattttgccagcatgccaagagacatctaccaagattatactcaagactctttcagtatacaagatgggaattctcagtattgtgattcatcaggattcattctcacaaaagaccagcctgtaacagccaacatgtattttgacagtgggaaccctgccccaagcaccacatcacagcaggcaaactctcagtcaactcctgagccttcaccatcacagacatttcccgagtctgtggtagccgagaagcagtattttattgaaaaattaacggcgacaatctggaagaacctttctaatccagaaatgacttctggatctgataaaattaattatacatatatgttaactcgttgtattcaggcgtgtaagacaaatcctgagtatatatatgctcctttaaaggaaattcctcctgccgacatccccaaaaataaaaaacttctaactgatggctatgcttgtgaagttagatgccaaaatatctacttaactacaggttatgctggcagcaagaatgggtccagggatcgagctacagagctagctgtaaaactcttgcagaaacgtattgaagttagagttgtccggcggaaattcaagcatacatttggagaggacctcgtggtgtgtcagattggcatgtcctcctatgaatttcctccagctctgaagccaccagaagacctggtggtgctgggtaaagatgcttccgggcagccaatttttaatgcttctgccaaacactggaccaattttgtcattacagaaaatgcaaatgatgcaattggtatccttaacaattctgcctcattcaacaagatgtcaattgaatacaaatatgagatgatgccaaatcgcacatggcgttgtcgagtgtttttacaagatcactgcttagctgaaggttatggaaccaagaaaacaagtaaacatgcagctgccgacgaggctttgaaaattcttcaaaaaacacagcccacttatccatctgtcaaaagttcacaatgccatacaggctcttcacccagaggatctggaaagaagaaagatataaaggatcttgtagtttatgagaattcttcaaatcccgtgtgcacgctgaacgacacagctcagtttaaccgaatgacagttgagtatgtctatgaaaggatgacaggcctccgctggaaatgcaaagtgattctagagagtgaagtaattgcagaagcagttggggtgaagaaaactgtcaaatatgaagctgctggggaagctgtgaaaaccctcaaaaagacccagccaactgtcattaacaacttgaagaaaggagctgttgaagatgtgatttcaagaaatgaaattcagggccgctcagcagaggaggcttacaaacagcaaatcaaagaagataatattggaaatcagctgctgagaaagatgggttggactggtggtggtttaggtaaatctggtgagggcatacgggagcctatctcagtgaaagagcagcataagcgggaagggcttggtctggatgtagagagggtgaataaaattgccaagagagatattgaacagatcatcagaaactacgcccgctccgagagccacacagatttgactttctctagagagctgactaatgatgaacggaagcaaatacatcagattgcccagaagtatggtcttaagagtaagtctcatggggtgggccatgataggtacctagtggtaggtagaaaaagacggaaggaagacctactagatcagctcaaacaggaaggccaagtgggccattacgagcttgttatgcctcaagcaaattgagatcttactaatttattttgtaaatgcctaatgaggcagatttttgaattaaagaaatgctacatgttccggttgcagagtatattcataagatgtctcaccttgttcatttcacatagtggtttattagatattggaacctaaagaattctgtccacttgtattagcttaatccagcagatgatattgtgcagttactgtttgtgtctttgatattgctgtgtccctcagattttagtagtttgacaagcaagaacacatatccaaatggaattttaccctgagaaattatcattttaaagggcatagcacagcaatctgcaacaatatgtaaagttgatattgactacaataaaaatccagtcttaattccagatttactgaaaatgtcagatcattttgtattaatctattttcatctttgtgtgaagccagttatagaatgtttgacaataaattgtgctgtacacgtaaatgtccttaccaactaaatgatgtaaaactttcttaaagtaattttagtgttcatttatttataacttctaccatgtgatttccagactattggaagtgatttactgtatcttgtgatatatgggttttaacaaattctagtcttcacgctgagagagcactacttgagagagcagttgaaagtttcaaaaactttggttcaatctgaagaaaggaagcttgaactgtttgttcttggtgccttgcagagagactcacagcaactctccattatagctttcacacggtttggatgtgcagcacatccaaggcaaccacagctgtggtagagcttggtaaaagactgaagatacattggtgctttgatgaaaaggtcagttggctggtccctctctcaaaaagcttattaagcctgaaaagccaactttgtaacatatttaaaactgctattttcgcttatttctggaatgtaaaaaaaaaaaatgtataaaaagaattagtgtatgcttcctgaataaaaaggagccaaagttgatcagaa

SEQ ID NO: 13942 - DNA, 390 bp, Homo sapiens
  source 1..390: mol_type = unassigned DNA
gtcaaaatcctcctaaaaagcaagccggttccaaattccatgcgagacctcgttttgagcctgtacattttgtagctagtagttcaaaagatgaaagacaggaagatccttatggccctcaaacaaaagaggtaaatgaacaaacacattttgccagcatgccaagagacatctaccaagattatactcaagactctttcagtatacaagatgggaattctcagtattgtcagttggctggtccctctctcaaaaagcttattaagcctgaaaagccaactttgtaacatatttaaaactgctattttcgcttatttctggaatgtaaaaaaaaaaaatgtataaaaagaattagtgtatgcttcctgaataaaaaggagccaaagttga

SEQ ID NO: 13943 - DNA, 3351 bp, Homo sapiens
  source 1..3351: mol_type = unassigned DNA
ggagcagtggcgctatagccacgaaagtgactggcagtgggctctgcggcgcagcttcatctgtcggcacctgcacagctatcccggggctgccctcgaccagctcctcgcgctctccgccgcctggaccaaccacgtcttcctgggctgcagcttccatatagaagaaagggaagggccaatgaagactcttggaagctagggaccaagtgcagtctttagatgggctttatgttacctctcatcttcaggtacagcccacgcttgatggaaaaaattctccaaatggctgaaggtattgatattggggagatgccttcatatgatctggtgctgtccaaaccttccaaaggtcaaaaacgccacctctcaacatgtgatggtcaaaatcctcctaaaaagcaagccggttccaaattccatgcgagacctcgttttgagcctgtacattttgtagctagtagttcaaaagatgaaagacaggaagatccttatggccctcaaacaaaagaggtaaatgaacaaacacattttgccagcatgccaagagacatctaccaagattatactcaagactctttcagtatacaagatgggaattctcagtattgtgattcatcaggattcattctcacaaaagaccagcctgtaacagccaacatgtattttgacagtgggaaccctgccccaagcaccacatcacagcaggcaaactctcagtcaactcctgagccttcaccatcacagacatttcccgagtctgtggtagccgagaagcagtattttattgaaaaattaacggcgacaatctggaagaacctttctaatccagaaatgacttctggatctgataaaattaattatacatatatgttaactcgttgtattcaggcgtgtaagacaaatcctgagtatatatatgctcctttaaaggaaattcctcctgccgacatccccaaaaataaaaaacttctaactgatggctatgcttgtgaagttagatgccaaaatatctacttaactacaggttatgctggcagcaagaatgggtccagggatcgagctacagagctagctgtaaaactcttgcagaaacgtattgaagttagagttgtccggcggaaattcaagcatacatttggagaggacctcgtggtgtgtcagattggcatgtcctcctatgaatttcctccagctctgaagccaccagaagacctggtggtgctgggtaaagatgcttccgggcagccaatttttaatgcttctgccaaacactggaccaattttgtcattacagaaaatgcaaatgatgcaattggtatccttaacaattctgcctcattcaacaagatgtcaattgaatacaaatatgagatgatgccaaatcgcacatggcgttgtcgagtgtttttacaagatcactgcttagctgaaggttatggaaccaagaaaacaagtaaacatgcagctgccgacgaggctttgaaaattcttcaaaaaacacagcccacttatccatctgtcaaaagttcacaatgccatacaggctcttcacccagaggatctggaaagaagaaagatataaaggatcttgtagtttatgagaattcttcaaatcccgtgtgcacgctgaacgacacagctcagtttaaccgaatgacagttgagtatgtctatgaaaggatgacaggcctccgctggaaatgcaaagtgattctagagagtgaagtaattgcagaagcagttggggtgaagaaaactgtcaaatatgaagctgctggggaagctgtgaaaaccctcaaaaagacccagccaactgtcattaacaacttgaagaaaggagctgttgaagatgtgatttcaagaaatgaaattcagggccgctcagcagaggaggcttacaaacagcaaatcaaagaagataatattggaaatcagctgctgagaaagatgggttggactggtggtggtttaggtaaatctggtgagggcatacgggagcctatctcagtgaaagagcagcataagcgggaagggcttggtctggatgtagagagggtgaataaaattgccaagagagatattgaacagatcatcagaaactacgcccgctccgagagccacacagatttgactttctctagagagctgactaatgatgaacggaagcaaatacatcagattgcccagaagtatggtcttaagagtaagtctcatggggtgggccatgataggtacctagtggtaggtagaaaaagacggaaggaagacctactagatcagctcaaacaggaaggccaagtgggccattacgagcttgttatgcctcaagcaaattgagatcttactaatttattttgtaaatgcctaatgaggcagatttttgaattaaagaaatgctacatgttccggttgcagagtatattcataagatgtctcaccttgttcatttcacatagtggtttattagatattggaacctaaagaattctgtccacttgtattagcttaatccagcagatgatattgtgcagttactgtttgtgtctttgatattgctgtgtccctcagattttagtagtttgacaagcaagaacacatatccaaatggaattttaccctgagaaattatcattttaaagggcatagcacagcaatctgcaacaatatgtaaagttgatattgactacaataaaaatccagtcttaattccagatttactgaaaatgtcagatcattttgtattaatctattttcatctttgtgtgaagccagttatagaatgtttgacaataaattgtgctgtacacgtaaatgtccttaccaactaaatgatgtaaaactttcttaaagtaattttagtgttcatttatttataacttctaccatgtgatttccagactattggaagtgatttactgtatcttgtgatatatgggttttaacaaattctagtcttcacgctgagagagcactacttgagagagcagttgaaagtttcaaaaactttggttcaatctgaagaaaggaagcttgaactgtttgttcttggtgccttgcagagagactcacagcaactctccattatagctttcacacggtttggatgtgcagcacatccaaggcaaccacagctgtggtagagcttggtaaaagactgaagatacattggtgctttgatgaaaaggtcagttggctggtccctctctcaaaaagcttattaagcctgaaaagccaactttgtaacatatttaaaactgctattttcgcttatttctggaatgtaaaaaaaaaaaatgtataaaaagaattagtgtatgcttcctgaataaaaaggagccaaagttgatc

SEQ ID NO: 13944 - DNA, 2092 bp, Homo sapiens
  source 1..2092: mol_type = unassigned DNA
gcggccgccggagcccgagctgacgccgccttggcacccctcctggagttagaaactaaggccggggcccgcggcgctcggcgcgcaggccgcccggcttcctgcgtccatttccgcgtgctttcaaagaagacagagagaggcactgggttgggcttcatttttttcctccccatccccagtttctttctctttttaaaaataataattatcccaataattaaagccaattcccccctcccctcccccagtccctccccccaactcccccctcccccgcccgccggggcaggggagcgccacgaattgaccaagtgaagctacaactttgcgacataaattttggggtctcgaaccatgtcgctgaccaacacaaagacggggttttcggtcaaggacatcttagacctgccggacaccaacgatgaggagggctctgtggccgaaggtccggaggaagagaacgaggggcccgagccagccaagagggccgggccgctggggcagggcgccctggacgcggtgcagagcctgcccctgaagaaccccttctacgacagcagcgacaacccgtacacgcgctggctggccagcaccgagggccttcagtactccctgcacggtctggctgccggggcgccccctcaggactcaagctccaagtccccggagccctcggccgacgagtcaccggacaatgacaaggagaccccgggcggcgggggggacgccggcaagaagcgaaagcggcgagtgcttttctccaaggcgcagacctacgagctggagcggcgctttcggcagcagcggtacctgtcggcgcccgagcgcgaacacctggccagcctcatccgcctcacgcccacgcaggtcaagatctggttccagaaccaccgctacaagatgaagcgcgcccgggccgagaaaggtatggaggtgacgcccctgccctcgccgcgccgggtggccgtgcccgtcttggtcagggacggcaaaccatgtcacgcgctcaaagcccaggacctggcagccgccaccttccaggcgggcattcccttttctgcctacagcgcgcagtcgctgcagcacatgcagtacaacgcccagtacagctcggccagcaccccccagtacccgacagcacaccccctggtccaggcccagcagtggacttggtgagcgccgccccaacgagactcgcggccccaggcccaggccccaccccggcggcggtggcggcgaggaggcctcggtccttatggtggttattattattattataattattattatggagtcgagttgactctcggctccactagggaggcgccgggaggttgcctgcgtctccttggagtggcagattccacccacccagctctgcccatgcctctccttctgaaccttgggagagggctgaactctacgccgtgtttacagaatgtttgcgcagcttcgcttctttgcctctccccggggggaccaaaccgtcccagcgttaatgtcgtcacttgaaaacgagaaaaagaccgaccccccacccctgctttcgtgcattttgtaaaatatgtttgtgtgagtagcgatattgtcagccgtcttctaaagcaagtggagaacactttaaaaatacagagaatttcttcctttttttaaaaaaaaataagaaaatgctaaatatttatggccatgtaaacgttctgacaactggtggcagatttcgcttttcgttgtaaatatcggtggtgattgttgccaaaatgaccttcaggaccggcctgtttcccgtctgggtccaactcctttctttgtggcttgtttgggtttgttttttgttttgtttttgtttttgcgttttcccctgctttcttcctttctctttttattttattgtgcaaacatttctcaaatatggaaaagaaaaccctgtaggcagggagccctctgccctgtcctccgggccttcagccccgaacttggagctcagctattcggcgcggttccccaacagcgccgggcgcagaaagctttcgattttttaaataagaattttaataaaaatcctgtgtttaaaaaagaaaaaaagaaaaaa

SEQ ID NO: 13945 - DNA, 1862 bp, Homo sapiens
  source 1..1862: mol_type = unassigned DNA
gggcacagcagccaggctgccggagagctgatctcggggattcgggtgcggagcccttggcctggaggcgatatgggtggtccgtggcccggttcagtcgcttgcagcagcccggggaacaggcctgtctggccctgagggagtcccctttctgaagctgtggtgcttggacgacctgctctctacattgctgggcacctgtaggtgtccctcgagagctcagttttgaggttcaagtcagtgtggccatgaaggggctgcctattgggctgatgctgtgaccctggagtctgcctctcctgccagtccccctgcccggaacatgtggctgcggcttggcccgccctcgctgtccctgagccccaagcccacggttggcaggagcctgtgcctcaccctgtggttcctcagtttggcgctgagggccagtacccaggccccagcacccacagtcaacactcactttgggaagctaaggggtgcccgagtaccactgcccagtgagatcctggggcctgtggaccaatacctgggggtgccctacgcagctcccccgatcggcgagaaacgtttcctgccccctgaaccacccccatcctggtcgggcatccggaacgccacacactttcccccagtgtgcccccagaacatccacacagctgtgcccgaagtcatgctgccggtctggttcactgccaacttggatatcgtcgctacttacatccaggagcccaacgaagactgtctctacctgaacgtctatgtgccgacggaggatgacatccgggacagtggtgctaaacccgtcatggtctacatccacggaggctcttacatggaagggacaggcaacatgattgatggcagcatcctcgccagttatggcaatgtcatcgtcatcaccctcaactatcgggttggagtgctaggtttcctgagtactggagatcaggctgccaagggcaactatgggctccttgaccagatccaggccctccgctgggtgagcgagaatattgccttcttcgggggagacccccgccggatcactgtctttggctcgggcattggtgcatcctgcgtcagcctcctcacgttgtcacatcactcagagggacttttccagagagccatcatccaaagtggctctgctctgtccagctgggctgtgaactaccaaccagtgaagtacaccagcctgctggcagacaaagtgggctgtaatgtgctggacaccgtggatatggtggactgtcttcggcaaaagagtgccaaggagctggtagagcaggacatccagccagcccgctaccacgtggcctttggccctgtgattgatggtgatgtcattcctgatgaccctgagatcctcatggagcagggcgagttcctcaactatgacatcatgctaggtgtcaaccagggcgagggtctcaagtttgtggaaggggtggtggaccctgaggatggtgtctctggcactgactttgactattccgtctccaattttgtggacaatctgtatggctatcctgagggtaaggacaccctgcgagagaccatcaagttcatgtatacagactgggcagaccgtgacaaccctgagacccgccgtaaaacactggtggcactcttcactgaccaccagtgggtggagccctcagtggtgacagccgatctgcatgcccgctacggctcgcctacctacttctacgccttctatcatcactgccagagcctcatgaagcctgcttggtcagatgcagctcatggggatgaagtaccctatgtttttggggttcctatggtaggccccactgaccttttcccctgcaacttctccaagaatgatgttatgctca

SEQ ID NO: 13946 - DNA, 3913 bp, Homo sapiens
  source 1..3913: mol_type = unassigned DNA
gggcacagcagccaggctgccggagagctgatctcggggattcgggtgcggagcccttggcctggaggcgatatgggtggtccgtggcccggttcagtcgcttgcagcagcccggggaacaggcctgtctggccctgagggagtcccctttctgaagctgtggtgcttggacgacctgctctctacattgctgggcacctgtaggtgtccctcgagagctcagttttgaggttcaagtcagtgtggccatgaaggggctgcctattgggctgatgctgtgaccctggagtctgcctctcctgccagtccccctgcccggaacatgtggctgcggcttggcccgccctcgctgtccctgagccccaagcccacggttggcaggagcctgtgcctcaccctgtggttcctcagtttggcgctgagggccagtacccaggccccagcacccacagtcaacactcactttgggaagctaaggggtgcccgagtaccactgcccagtgagatcctggggcctgtggaccaatacctgggggtgccctacgcagctcccccgatcggcgagaaacgtttcctgccccctgaaccacccccatcctggtcgggcatccggaacgccacacactttcccccagtgtgcccccagaacatccacacagctgtgcccgaagtcatgctgccggtctggttcactgccaacttggatatcgtcgctacttacatccaggagcccaacgaagactgtctctacctgaacgtctatgtgccgacggaggatggatccggcgctaagaaacagggcgaggacttagcggataatgacggggatgaagatgaagacatccgggacagtggtgctaaacccgtcatggtctacatccacggaggctcttacatggaagggacaggcaacatgattgatggcagcatcctcgccagttatggcaatgtcatcgtcatcaccctcaactatcgggttggagtgctaggtttcctgagtactggagatcaggctgccaagggcaactatgggctccttgaccagatccaggccctccgctgggtgagcgagaatattgccttcttcgggggagacccccgccggatcactgtctttggctcgggcattggtgcatcctgcgtcagcctcctcacgttgtcacatcactcagagggacttttccagagagccatcatccaaagtggctctgctctgtccagctgggctgtgaactaccaaccagtgaagtacaccagcctgctggcagacaaagtgggctgtaatgtgctggacaccgtggatatggtggactgtcttcggcaaaagagtgccaaggagctggtagagcaggacatccagccagcccgctaccacgtggcctttggccctgtgattgatggtgatgtcattcctgatgaccctgagatcctcatggagcagggcgagttcctcaactatgacatcatgctaggtgtcaaccagggcgagggtctcaagtttgtggaaggggtggtggaccctgaggatggtgtctctggcactgactttgactattccgtctccaattttgtggacaatctgtatggctatcctgagggtaaggacaccctgcgagagaccatcaagttcatgtatacagactgggcagaccgtgacaaccctgagacccgccgtaaaacactggtggcactcttcactgaccaccagtgggtggagccctcagtggtgacagccgatctgcatgcccgctacggctcgcctacctacttctacgccttctatcatcactgccagagcctcatgaagcctgcttggtcagatgcagctcatggggatgaagtaccctatgtttttggggttcctatggtaggccccactgaccttttcccctgcaacttctccaagaatgatgttatgctcagtgctgtcgtcatgacctattggaccaactttgccaagactggggatcccaacaagccggtcccccaggacaccaagttcattcacaccaaggccaaccgctttgaggaagtggcctggtccaaatacaatccccgagaccagctctaccttcacatcgggctgaaaccaagggtccgagatcattaccgggccactaaggtggccttttggaaacatctggtgccccacctatacaacctgcatgacatgttccactatacgtccaccaccaccaaagtgccgcctccggataccacccacagctcccacatcacccgcaggcccaatggcaagacctggagcaccaagcggccagccatctcacctgcctacagcaacgagaatgcccaggggtcctggaacggggaccaggatgcagggccactcctggtggagaaccctcgtgactactccactgaattaagtgtcaccatcgccgtgggggcctccctcctgttccttaacgttctggccttcgctgccctctactaccgtaaggacaaacggcgccaggagcccctgcggcagcctagccctcagcggggagccggggccccggagttgggagctgctccagaggaggagctggcagcattacaactgggccccacccaccacgagtgtgaggccggtcccccccatgacacgctgcgcctcactgcattgcccgactacaccctgaccctgcggcgctccccggatgacatcccactcatgacccccaacaccatcactatgatccccaactccctggtagggctgcagacattgcacccctataacacctttgccgcagggttcaacagtaccgggctgccccactcacactccactacccgggtatagctccaactcagagcacagccaatctccaggctccctccctcccagatccaggaacacatgcacacacacacacacacacacgcagacacacacacacacacacatatatgtatacgcacgcacccacaccctacagcagatccacctgcacaaacatagacagatgtggacatgcacccgcatgtacaaaaacacaaatacggaagtaaacctgaacaaaccctttaaatggggacgcagatgagtcctcggtaaaccgaggacccatgaaacagcagctgaagccagctccctgaatctgaccacagacactcctggggggcctgaaagcaacagctggacacccccttggtgctcgccttcggcctctcttggaactgcaccaccgaccaactccagacttgggagctttaaagagcaggatagctcttcctccccaggacttggtcttttttctgggtcttgttttgttgatttttcttttttaattttggaacaaatgcttttccaacccatgagtgctaagagcctctggaagggagggcttcaggcccgaaggtctctctggctctaggacccccagtgctcacacaatcagaccaaggaacaagacccccaggaaggaaacagatttaagcaagaccatggggtggaaggagaaaggggctagcactggatggagctggagggtcgtaggggagagatctccaactctctctgtgtccgtgtggagggctgcagagcctgcagggtgacctgcttccccaaaggccaacagcattggcctggccagaccaggtgaccttagatttggtgaacaacgtactatggaagccacatcactattgggcccccaggtctgatctgggttttgcctctgcccttggggaaatgctatcagaaattcgccccattttctttacagtcttttgtgtctgtcatttctctttcaaaaaggcggtgttttttgttgttgttggtttttttttttttttaaagaaaagttcttaaaacactaacggaaacccatggagtttgtcctttgtaaaaattttaaacacagtgtcttgatataaaaataaaaaatccagttagcactcccaa

SEQ ID NO: 13947 - DNA, 3046 bp, Homo sapiens
  source 1..3046: mol_type = unassigned DNA
ccggagagctgatctcggggattcgggtgcggagcccttggcctggaggcgatatgggtggtccgtggcccggttcagtcgcttgcagcagcccggggaacaggcctgtctggccctgagggagtcccctttctgaagctgtggtgcttggacgacctgctctctacattgctgggcacctgtaggtgtccctcgagagctcagttttgaggttcaagtcagtgtggccatgaaggggctgcctattgggctgatgctgtgaccctggagtctgcctctcctgccagtccccctgcccggaacatgtggctgcggcttggcccgccctcgctgtccctgagccccaagcccacggttggcaggagcctgtgcctcaccctgtggttcctcagtttggcgctgagggccagtacccaggccccagcacccacagtcaacactcactttgggaagctaaggggtgcccgagtaccactgcccagtgagatcctggggcctgtggaccaatacctgggggtgccctacgcagctcccccgatcggcgagaaacgtttcctgccccctgaaccacccccatcctggtcgggcatccggaacgccacacactttcccccagtgtgcccccagaacatccacacagctgtgcccgaagtcatgctgccggtctggttcactgccaacttggatatcgtcgctacttacatccaggagcccaacgaagactgtctctacctgaacgtctatgtgccgacggaggatgtaaagcggatttccaaggaatgcgcccgaaagcccaacaagaaaatttgtaggaaaggaggatccggcgctaagaaacagggcgaggacttagcggataatgacggggatgaagatgaagacatccgggacagtggtgctaaacccgtcatggtctacatccacggaggctcttacatggaagggacaggcaacatgattgatggcagcatcctcgccagttatggcaatgtcatcgtcatcaccctcaactatcgggttggagtgctaggtttcctgagtactggagatcaggctgccaagggcaactatgggctccttgaccagatccaggccctccgctgggtgagcgagaatattgccttcttcgggggagacccccgccggatcactgtctttggctcgggcattggtgcatcctgcgtcagcctcctcacgttgtcacatcactcagagggacttttccagagagccatcatccaaagtggctctgctctgtccagctgggctgtgaactaccaaccagtgaagtacaccagcctgctggcagacaaagtgggctgtaatgtgctggacaccgtggatatggtggactgtcttcggcaaaagagtgccaaggagctggtagagcaggacatccagccagcccgctaccacgtggcctttggccctgtgattgatggtgatgtcattcctgatgaccctgagatcctcatggagcagggcgagttcctcaactatgacatcatgctaggtgtcaaccagggcgagggtctcaagtttgtggaaggggtggtggaccctgaggatggtgtctctggcactgactttgactattccgtctccaattttgtggacaatctgtatggctatcctgagggtaaggacaccctgcgagagaccatcaagttcatgtatacagactgggcagaccgtgacaaccctgagacccgccgtaaaacactggtggcactcttcactgaccaccagtgggtggagccctcagtggtgacagccgatctgcatgcccgctacggctcgcctacctacttctacgccttctatcatcactgccagagcctcatgaagcctgcttggtcagatgcagctcatggggatgaagtaccctatgtttttggggttcctatggtaggccccactgaccttttcccctgcaacttctccaagaatgatgttatgctcagtgctgtcgtcatgacctattggaccaactttgccaagactggggatcccaacaagccggtcccccaggacaccaagttcattcacaccaaggccaaccgctttgaggaagtggcctggtccaaatacaatccccgagaccagctctaccttcacatcgggctgaaaccaagggtccgagatcattaccgggccactaaggtggccttttggaaacatctggtgccccacctatacaacctgcatgacatgttccactatacgtccaccaccaccaaagtgccgcctccggataccacccacagctcccacatcacccgcaggcccaatggcaagacctggagcaccaagcggccagccatctcacctgcctacagcaacgagaatgcccaggggtcctggaacggggaccaggatgcagggccactcctggtggagaaccctcgtgactactccactgaattaagtgtcaccatcgccgtgggggcctccctcctgttccttaacgttctggccttcgctgccctctactaccgtaaggacaaacggcgccaggagcccctgcggcagcctagccctcagcggggagccggggccccggagttgggagctgctccagaggaggagctggcagcattacaactgggccccacccaccacgagtgtgaggccggtcccccccatgacacgctgcgcctcactgcattgcccgactacaccctgaccctgcggcgctccccggatgacatcccactcatgacccccaacaccatcactatgatccccaactccctggtagggctgcagacattgcacccctataacacctttgccgcagggttcaacagtaccgggctgccccactcacactccactacccgggtatagctccaactcagagcacagccaatctccaggctccctccctcccagatccaggaacacatgcacacacacacacacacacacgcagacacacacacacacacacatatatgtatacgcacgcacccacaccctacagcagatccacctgcacaaacatagacagatgtggacatgcacccgcatgtacaaaaacaca

SEQ ID NO: 13948 - DNA, 3153 bp, Homo sapiens
  source 1..3153: mol_type = unassigned DNA
ctccccgtgtctggtccccaggatccggcgctaagaaacagggcgaggacttagcggataatgacggggatgaagatgaagacatccgggacagtggtgctaaacccgtcatggtctacatccacggaggctcttacatggaagggacaggcaacatgattgatggcagcatcctcgccagttatggcaatgtcatcgtcatcaccctcaactatcgggttggagtgctaggtttcctgagtactggagatcaggctgccaagggcaactatgggctccttgaccagatccaggccctccgctgggtgagcgagaatattgccttcttcgggggagacccccgccggatcactgtctttggctcgggcattggtgcatcctgcgtcagcctcctcacgttgtcacatcactcagagggacttttccagagagccatcatccaaagtggctctgctctgtccagctgggctgtgaactaccaaccagtgaagtacaccagcctgctggcagacaaagtgggctgtaatgtgctggacaccgtggatatggtggactgtcttcggcaaaagagtgccaaggagctggtagagcaggacatccagccagcccgctaccacgtggcctttggccctgtgattgatggtgatgtcattcctgatgaccctgagatcctcatggagcagggcgagttcctcaactatgacatcatgctaggtgtcaaccagggcgagggtctcaagtttgtggaaggggtggtggaccctgaggatggtgtctctggcactgactttgactattccgtctccaattttgtggacaatctgtatggctatcctgagggtaaggacaccctgcgagagaccatcaagttcatgtatacagactgggcagaccgtgacaaccctgagacccgccgtaaaacactggtggcactcttcactgaccaccagtgggtggagccctcagtggtgacagccgatctgcatgcccgctacggctcgcctacctacttctacgccttctatcatcactgccagagcctcatgaagcctgcttggtcagatgcagctcatggggatgaagtaccctatgtttttggggttcctatggtaggccccactgaccttttcccctgcaacttctccaagaatgatgttatgctcagtgctgtcgtcatgacctattggaccaactttgccaagactggggatcccaacaagccggtcccccaggacaccaagttcattcacaccaaggccaaccgctttgaggaagtggcctggtccaaatacaatccccgagaccagctctaccttcacatcgggctgaaaccaagggtccgagatcattaccgggccactaaggtggccttttggaaacatctggtgccccacctatacaacctgcatgacatgttccactatacgtccaccaccaccaaagtgccgcctccggataccacccacagctcccacatcacccgcaggcccaatggcaagacctggagcaccaagcggccagccatctcacctgcctacagcaacgagaatgcccaggggtcctggaacggggaccaggatgcagggccactcctggtggagaaccctcgtgactactccactgaattaagtgtcaccatcgccgtgggggcctccctcctgttccttaacgttctggccttcgctgccctctactaccgtaaggacaaacggcgccaggagcccctgcggcagcctagccctcagcggggagccggggccccggagttgggagctgctccagaggaggagctggcagcattacaactgggccccacccaccacgagtgtgaggccggtcccccccatgacacgctgcgcctcactgcattgcccgactacaccctgaccctgcggcgctccccggatgacatcccactcatgacccccaacaccatcactatgatccccaactccctggtagggctgcagacattgcacccctataacacctttgccgcagggttcaacagtaccgggctgccccactcacactccactacccgggtatagctccaactcagagcacagccaatctccaggctccctccctcccagatccaggaacacatgcacacacacacacacacacacgcagacacacacacacacacacatatatgtatacgcacgcacccacaccctacagcagatccacctgcacaaacatagacagatgtggacatgcacccgcatgtacaaaaacacaaatacggaagtaaacctgaacaaaccctttaaatggggacgcagatgagtcctcggtaaaccgaggacccatgaaacagcagctgaagccagctccctgaatctgaccacagacactcctggggggcctgaaagcaacagctggacacccccttggtgctcgccttcggcctctcttggaactgcaccaccgaccaactccagacttgggagctttaaagagcaggatagctcttcctccccaggacttggtcttttttctgggtcttgttttgttgatttttcttttttaattttggaacaaatgcttttccaacccatgagtgctaagagcctctggaagggagggcttcaggcccgaaggtctctctggctctaggacccccagtgctcacacaatcagaccaaggaacaagacccccaggaaggaaacagatttaagcaagaccatggggtggaaggagaaaggggctagcactggatggagctggagggtcgtaggggagagatctccaactctctctgtgtccgtgtggagggctgcagagcctgcagggtgacctgcttccccaaaggccaacagcattggcctggccagaccaggtgaccttagatttggtgaacaacgtactatggaagccacatcactattgggcccccaggtctgatctgggttttgcctctgcccttggggaaatgctatcagaaattcgccccattttctttacagtcttttgtgtctgtcatttctctttcaaaaaggcggtgttttttgttgttgttggtttttttttttttttaaagaaaagttcttaaaacactaacggaaacccatggagtttgtcctttgtaaaaattttaaacacagtgtcttgatataaaaataaaaaatccagttagcactccc

SEQ ID NO: 13949 - DNA, 3863 bp, Homo sapiens
  source 1..3863: mol_type = unassigned DNA
ccctcggtgcgcgggcacagcagccaggctgccggagagctgatctcggggattcgggtgcggagcccttggcctggaggcgatatgggtggtccgtggcccggttcagtcgcttgcagcagcccggggaacaggcctgtctggccctgagggagtcccctttctgaagctgtggtgcttggacgacctgctctctacattgctgggcacctgtaggtgtccctcgagagctcagttttgaggttcaagtcagtgtggccatgaaggggctgcctattgggctgatgctgtgaccctggagtctgcctctcctgccagtccccctgcccggaacatgtggctgcggcttggcccgccctcgctgtccctgagccccaagcccacggttggcaggagcctgtgcctcaccctgtggttcctcagtttggcgctgagggccagtacccaggccccagcacccacagtcaacactcactttgggaagctaaggggtgcccgagtaccactgcccagtgagatcctggggcctgtggaccaatacctgggggtgccctacgcagctcccccgatcggcgagaaacgtttcctgccccctgaaccacccccatcctggtcgggcatccggaacgccacacactttcccccagtgtgcccccagaacatccacacagctgtgcccgaagtcatgctgccggtctggttcactgccaacttggatatcgtcgctacttacatccaggagcccaacgaagactgtctctacctgaacgtctatgtgccgacggaggatgacatccgggacagtggtgctaaacccgtcatggtctacatccacggaggctcttacatggaagggacaggcaacatgattgatggcagcatcctcgccagttatggcaatgtcatcgtcatcaccctcaactatcgggttggagtgctaggtttcctgagtactggagatcaggctgccaagggcaactatgggctccttgaccagatccaggccctccgctgggtgagcgagaatattgccttcttcgggggagacccccgccggatcactgtctttggctcgggcattggtgcatcctgcgtcagcctcctcacgttgtcacatcactcagagggacttttccagagagccatcatccaaagtggctctgctctgtccagctgggctgtgaactaccaaccagtgaagtacaccagcctgctggcagacaaagtgggctgtaatgtgctggacaccgtggatatggtggactgtcttcggcaaaagagtgccaaggagctggtagagcaggacatccagccagcccgctaccacgtggcctttggccctgtgattgatggtgatgtcattcctgatgaccctgagatcctcatggagcagggcgagttcctcaactatgacatcatgctaggtgtcaaccagggcgagggtctcaagtttgtggaaggggtggtggaccctgaggatggtgtctctggcactgactttgactattccgtctccaattttgtggacaatctgtatggctatcctgagggtaaggacaccctgcgagagaccatcaagttcatgtatacagactgggcagaccgtgacaaccctgagacccgccgtaaaacactggtggcactcttcactgaccaccagtgggtggagccctcagtggtgacagccgatctgcatgcccgctacggctcgcctacctacttctacgccttctatcatcactgccagagcctcatgaagcctgcttggtcagatgcagctcatggggatgaagtaccctatgtttttggggttcctatggtaggccccactgaccttttcccctgcaacttctccaagaatgatgttatgctcagtgctgtcgtcatgacctattggaccaactttgccaagactggggatcccaacaagccggtcccccaggacaccaagttcattcacaccaaggccaaccgctttgaggaagtggcctggtccaaatacaatccccgagaccagctctaccttcacatcgggctgaaaccaagggtccgagatcattaccgggccactaaggtggccttttggaaacatctggtgccccacctatacaacctgcatgacatgttccactatacgtccaccaccaccaaagtgccgcctccggataccacccacagctcccacatcacccgcaggcccaatggcaagacctggagcaccaagcggccagccatctcacctgcctacagcaacgagaatgcccaggggtcctggaacggggaccaggatgcagggccactcctggtggagaaccctcgtgactactccactgaattaagtgtcaccatcgccgtgggggcctccctcctgttccttaacgttctggccttcgctgccctctactaccgtaaggacaaacggcgccaggagcccctgcggcagcctagccctcagcggggagccggggccccggagttgggagctgctccagaggaggagctggcagcattacaactgggccccacccaccacgagtgtgaggccggtcccccccatgacacgctgcgcctcactgcattgcccgactacaccctgaccctgcggcgctccccggatgacatcccactcatgacccccaacaccatcactatgatccccaactccctggtagggctgcagacattgcacccctataacacctttgccgcagggttcaacagtaccgggctgccccactcacactccactacccgggtatagctccaactcagagcacagccaatctccaggctccctccctcccagatccaggaacacatgcacacacacacacacacacacgcagacacacacacacacacacatatatgtatacgcacgcacccacaccctacagcagatccacctgcacaaacatagacagatgtggacatgcacccgcatgtacaaaaacacaaatacggaagtaaacctgaacaaaccctttaaatggggacgcagatgagtcctcggtaaaccgaggacccatgaaacagcagctgaagccagctccctgaatctgaccacagacactcctggggggcctgaaagcaacagctggacacccccttggtgctcgccttcggcctctcttggaactgcaccaccgaccaactccagacttgggagctttaaagagcaggatagctcttcctccccaggacttggtcttttttctgggtcttgttttgttgatttttcttttttaattttggaacaaatgcttttccaacccatgagtgctaagagcctctggaagggagggcttcaggcccgaaggtctctctggctctaggacccccagtgctcacacaatcagaccaaggaacaagacccccaggaaggaaacagatttaagcaagaccatggggtggaaggagaaaggggctagcactggatggagctggagggtcgtaggggagagatctccaactctctctgtgtccgtgtggagggctgcagagcctgcagggtgacctgcttccccaaaggccaacagcattggcctggccagaccaggtgaccttagatttggtgaacaacgtactatggaagccacatcactattgggcccccaggtctgatctgggttttgcctctgcccttggggaaatgctatcagaaattcgccccattttctttacagtcttttgtgtctgtcatttctctttcaaaaaggcggtgttttttgttgttgttggtttttttttttttttaaagaaaagttcttaaaacactaacggaaacccatggagtttgtcctttgtaaaaattttaaacacagtgtcttgatataaaaataaaaaatccagttagcactccc

SEQ ID NO: 13950 - DNA, 3319 bp, Homo sapiens
  source 1..3319: mol_type = unassigned DNA
ggtgcgcgggcacagcagccaggctgccggagagctgatctcggggattcgggtgcggagcccttggcctggaggcgatatgggtggtccgtggcccggttcagtcgcttgcagcagcccggggaacagtgtgcccccagaacatccacacagctgtgcccgaagtcatgctgccggtctggttcactgccaacttggatatcgtcgctacttacatccaggagcccaacgaagactgtctctacctgaacgtctatgtgccgacggaggatggatccggcgctaagaaacagggcgaggacttagcggataatgacggggatgaagatgaagacatccgggacagtggtgctaaacccgtcatggtctacatccacggaggctcttacatggaagggacaggcaacatgattgatggcagcatcctcgccagttatggcaatgtcatcgtcatcaccctcaactatcgggttggagtgctaggtttcctgagtactggagatcaggctgccaagggcaactatgggctccttgaccagatccaggccctccgctgggtgagcgagaatattgccttcttcgggggagacccccgccggatcactgtctttggctcgggcattggtgcatcctgcgtcagcctcctcacgttgtcacatcactcagagggacttttccagagagccatcatccaaagtggctctgctctgtccagctgggctgtgaactaccaaccagtgaagtacaccagcctgctggcagacaaagtgggctgtaatgtgctggacaccgtggatatggtggactgtcttcggcaaaagagtgccaaggagctggtagagcaggacatccagccagcccgctaccacgtggcctttggccctgtgattgatggtgatgtcattcctgatgaccctgagatcctcatggagcagggcgagttcctcaactatgacatcatgctaggtgtcaaccagggcgagggtctcaagtttgtggaaggggtggtggaccctgaggatggtgtctctggcactgactttgactattccgtctccattttgtggacaatctgtatggctatcctgagggtaaggacaccctgcgagagaccatcaagttcatgtatacagactgggcagaccgtgacaaccctgagacccgccgtaaaacactggtggcactcttcactgaccaccagtgggtggagccctcagtggtgacagccgatctgcatgcccgctacggctcgcctacctacttctacgccttctatcatcactgccagagcctcatgaagcctgcttggtcagatgcagctcatggggatgaagtaccctatgtttttggggttcctatggtaggccccactgaccttttcccctgcaacttctccaagaatgatgttatgctcagtgctgtcgtcatgacctattggaccaactttgccaagactggggatcccaacaagccggtcccccaggacaccaagttcattcacaccaaggccaaccgctttgaggaagtggcctggtccaaatacaatccccgagaccagctctaccttcacatcgggctgaaaccaagggtccgagatcattaccgggccactaaggtggccttttggaaacatctggtgccccacctatacaacctgcatgacatgttccactatacgtccaccaccaccaaagtgccgcctccggataccacccacagctcccacatcacccgcaggcccaatggcaagacctggagcaccaagcggccagccatctcacctgcctacagcaacgagaatgcccaggggtcctggaacggggaccaggatgcagggccactcctggtggagaaccctcgtgactactccactgaattaagtgtcaccatcgccgtgggggcctccctcctgttccttaacgttctggccttcgctgccctctactaccgtaaggacaaacggcgccaggagcccctgcggcagcctagccctcagcggggagccggggccccggagttgggagctgctccagaggaggagctggcagcattacaactgggccccacccaccacgagtgtgaggccggtcccccccatgacacgctgcgcctcactgcattgcccgactacaccctgaccctgcggcgctccccggatgacatcccactcatgacccccaacaccatcactatgatccccaactccctggtagggctgcagacattgcacccctataacacctttgccgcagggttcaacagtaccgggctgccccactcacactccactacccgggtatagctccaactcagagcacagccaatctccaggctccctccctcccagatccaggaacacatgcacacacacacacacacacacgcagacacacacacacacacacatatatgtatacgcacgcacccacaccctacagcagatccacctgcacaaacatagacagatgtggacatgcacccgcatgtacaaaaacacaaatacggaagtaaacctgaacaaaccctttaaatggggacgcagatgagtcctcggtaaaccgaggacccatgaaacagcagctgaagccagctccctgaatctgaccacagacactcctggggggcctgaaagcaacagctggacacccccttggtgctcgccttcggcctctcttggaactgcaccaccgaccaactccagacttgggagctttaaagagcaggatagctcttcctccccaggacttggtcttttttctgggtcttgttttgttgatttttcttttttaattttggaacaaatgcttttccaacccatgagtgctaagagcctctggaagggagggcttcaggcccgaaggtctctctggctctaggacccccagtgctcacacaatcagaccaaggaacaagacccccaggaaggaaacagatttaagcaagaccatggggtggaaggagaaaggggctagcactggatggagctggagggtcgtaggggagagatctccaactctctctgtgtccgtgtggagggctgcagagcctgcagggtgacctgcttccccaaaggccaacagcattggcctggccagaccaggtgaccttagatttggtgaacaacgtactatggaagccacatcactattgggcccccaggtctgatctgggttttgcctctgcccttggggaaatgctatcagaaattcgccccattttctttacagtcttttgtgtctgtcatttctctttcaaaaaggcggtgttttttgttgttgttggtttttttttttttttaaagaaaagttcttaaaacact

SEQ ID NO: 13951 - DNA, 793 bp, Homo sapiens
  source 1..793: mol_type = unassigned DNA
tctgtctgttagtacagagctcttattcagccactagctcggcctttcctgcttcaattgtaatgcttgttctgcccggggacacactattgacagcagaaacaatgaatttcctccaaacccggcaatgttggtggctcttgcattcctctggatgagcgaatctagttggggggttcccgaaggggaaggcgcctgggctttcaatacatcctcctgaatcatactgcgtttcaggttccttagaaaaatttggatgtgtaaaaagaactcttaacggcgatgcaggtcttccacagctaaggttgcattggagttttcgaaagacttatctttctgcaggctcgcctctgagctttgtctccttggagccacctcacttagacagcttcggatgtggatgcagatttgaaccatgttgcgtccccagggactgctatggctccctttgttgttcacctctgtctgtgtcatgttaaactccaatgttcttctgtggataactgctcttgccatcaagttcaccctcattgacagccaagcacagtatccagttgtcaacacaaattatggtaaaatccagggcctaagaacaccattacccagtgagatcttgggtccagtggagcagtacttaggggtcccctatgcctcacccccaactggagagaggcggtttcagccaccagaatccccatcctcctggactggcatccgaaatgctactcagttttctgctgtgtgcccccagcacctggatgaaagattcttattgcatgacatgctgcccatc

SEQ ID NO: 13952 - DNA, 6617 bp, Homo sapiens
  source 1..6617: mol_type = unassigned DNA
tccaaacccggcaatgttggtggctcttgcattcctctggatgagcgaatctagttggggggttcccgaaggggaaggcgcctgggctttcaatacatcctcctgaatcatactgcgtttcaggttccttagaaaaatttggatgtgtaaaaagaactcttaacggcgatgcaggtcttccacagctaaggaaccaacataaagagaaatgcagacgatataaccagtaatgaccatggtgaagataaagatattcatgaacagaacagtaagaagcctgttatggtctatatccatgggggatcttacatggagggaaccggtaacatgattgatggcagcattttggccagctatgggaacgtcatcgttatcaccattaactaccgtctgggaatactagggtttttaagtaccggtgaccaggcagcaaaaggcaactatgggctcctggatcagattcaagcactgaggtggattgaggagaatgtcggagcctttggcggggaccccaagagagtgactatctttggctcgggggctggggcctcctgtgtcagcctgttgaccctgtcccactactcagaaggtctcttccagaaggccatcattcagagcggcactgccctgtccagctgggcagtgaactaccagccggccaagtacactcggatattggcagacaaggtcggctgcaacatgctggacaccacggacatggtagaatgtctgaagaacaagaactacaaggagctcatccagcagaccatcaccccggccacctaccacatagcctttgggccggtgatcgacggcgacgtcatcccagacgacccccagatcctgatggagcaaggcgagttcctcaactacgacatcatgctgggcgtcaaccaaggggaaggcctgaagttcgtggacggcatcgtggataacgaggacggtgtgacgcccaacgactttgacttctccgtgtccaacttcgtggacaacctttacggctaccctgaagggaaagacactttgcgggagactatcaagttcatgtacacagactgggccgataaggaaaacccggagacgcggcggaaaaccctggtggctctctttactgaccatcagtgggtggcccccgccgtggccaccgccgacctgcacgcgcagtacggctcccccacctacttctatgccttctatcatcactgccaaagcgaaatgaagcccagctgggcagattcggcccatggcgatgaagtcccctatgtcttcggcatccccatgatcggtcccacagagctcttcagttgtaatttctccaagaacgacgtcatgctcagtgccgtggtgatgacctactggacgaacttcgccaaaactggtgatccaaaccaaccagttcctcaggataccaagttcattcatacaaaacccaatcgctttgaagaagtggcctggtccaagtataatcccaaagaccagctctatctgcatattggcttgaaacccagagtgagagatcactaccgggcaacgaaagtggctttctggttggaattggttcctcatttgcacaacttgaacgagatattccagtatgtttcaacaaccacaaaggttcctccaccagacatgacatcatttccctatggcacccggcgatctcccgccaagatatggccaaccaccaaacgcccagcaatcactcctgccaacaatcccaaacactctaaggaccctcacaaaacagggcccgaggacacaactgtcctcattgaaaccaaacgagattattccaccgaattaagtgtcaccattgccgtcggggcgtcgctcctcttcctcaacatcttagcctttgcggcgctgtactacaaaaaggacaagaggcgccatgagactcacaggcaccccagtccccagagaaacaccacaaatgatatcactcacatccagaacgaagagatcatgtctctgcagatgaagcagctggaacacgatcacgagtgtgagtcgctgcaggcacacgacacgctgaggctcacctgccctccagactacaccctcacgctgcgccggtcgccggatgacatcccatttatgacgccaaacaccatcaccatgattccaaacacattgatggggatgcagcctttacacacttttaaaaccttcagtggaggacaaaacagtacaaatttaccccacggacattccaccactagagtatagcttttccctatttcccctcctatccctctgcccctactgctcagcaatgtaaaagagacaaataaggagaaagaaaatctccaaaccaggaatgtttttgtgccactgactttagataaaaatgcaaaagggcagtcatcctgtcccagcagacccttctcattggcattttccagtattgtgagatcaatttctgaccatatgaaatgtgaaaagtatatgtttctgttacaatactgctttaagatctaaaccatgccaacagatgtttcgtgtgactaggacatcaccatttcaaggaactgtgtgtttccaacatcatggtagcagcacacacttccaaagctcagccagggacacttaatattttttaattacaatggaaatttaaacatttttatgtgggctacacaatggatggctcttcttaagtgaagaaagactctataggcttttacacagcacatgaagcagtaatccagaaagaaggaaatgcagaattttattatcaaagtaagcgaattgactgtgcagaaaaattgtagggttctgtggaaggaggtattctgccagcctgaactatatttaagaaactttgtaaaaaataaaaatgtatatagctgtgagctcaaacaaaaactgcagacaaacaaaaaagagaaaagcttttatttgtgttttcagtttgaaagaacttttagcaaggttgtgctttcaaacacatattagtcctaccaccttagttcctctacagcaaaagaggcttttcttcttaattacatgtaaacaaagacatgggattttctgacgtaagattttcatttgtaggaatatgtgatgtcaaatggaagactcagaagttttgtgtggcctatttctccctgtcaggttgcacagatgcatgtagagcattcttaggagaccattgttttagaaaactttgatttgtacatgttagttttcatgaaattgcaacacagagataggtcctaaaagtggaatgtatttaaaacttgttgaattagacacacacacacagacacacacaaagaatcagcagagaaaacaaaatacaagtcctgttctgtagttcttgccctttgaatatatttgggaagagttgcttcctatttcaggaccctgccaaaaaagaagaaagcttgcctttggtggggctatgccccttggagtaaatacagctctgtgttccctagcagctgccggaggatttggctgatgaagtacctgctcagcttagctaatcagattaaaggaagacatgtatgtcttttgtttaagcacctagtcccttatgtatcagtaaacaggtttttaaaaatcttttatgtcatttataggataaaacatatgcttgtctgaaaatatcaccttttgtggatttatctgatcaccaaataataaatattaagaagaatgggggaaaaaggatagaatattaaaactgctttgcataggtttttggggaaattaggatatcttcactgacaagacactgaatggaatttattcacccattttaaattggttacttggggatcagagatttgtctctccaacagcttgtggttttcttattactcattttcaggaaagtttgtagtattacaaggcagaaggaaacacagtagcaatggttgctctatattttgtctttcaaagattactgcattaccaagaaacagtagccaaagatgtttgaagatcatgtcccttagctgcattgtgggttattctagaaatccaatgttaaatgcctctactaaagtggggattccccataaaaattgtccagctacctgactcttttgcaataacaactttgattactgaatccatacactcaaactatagtgatatatcagtgtttgggagtgacctctagaaaaaagaaaactgtttttagaaatacataaaatcacttccaaatcctgttgcttatgttgggttaaatttgaaagcaattctctatatataaatatgtgaaatattatgatctgaacttagcacacatgaagcaacatttctttgctacacagaggtgtcttggaaagatttcattcccaattcatttttcatagatctataatcaggcaatttctgcaagcaatgtatgaccccacctgagcaaccacaaataggctctccatgaaactgcaaaggaactgatgtgtggcatccatgctggttttgtctgtctataatatgaattcaagtatctgttcatatttccaattgtctcctgctagcaatatgtgccacaacatgacagtcttgtgacatcttaaggaaaagaagagttcctgttaaatgaatagctttagcttttacaggggattatgattaaaagtgatttagtacatcttacatgatatctcatttctacgtgaaaagaagttatagaatcttcatagagttccatgagaaaaatatacttgctatttatagaaaacgagaaaaaagaaaaaaatgagaaacaagtaagaaaaaatcctttcctaggcttttccttgatcttcagaggcacacagggtttaatggttccttaggttattattttgaggttttgttctttcttttgccttaagtaatgacagaagatatatatggccagacacatatgtataaacttttcagcagcattttaataataaaatatcacactattttctaatgctttgtacaaacaattatgcatctgttctttcttggtaggtggaatattttatttacttttgccattctttgaatgcctttttctttgtaaatgctacatggtagctctcacataggctacaaatggataaatacatttggtaatgggatggtttctttagctttggccagctgcacagttgaggaggctctgctggcctgattttggaaaaccaagccctgtttggtgaagctcctgagatgacactgcctgaaaatgagtatttggttgtgttatttctaccactgttcattcttgtgtctctgtgttttgatttgtgttcaacaaactgatgccttaatggtttcaaatagaaagccttaggtgagtaaaccttctagtgacagtaagaaattctactgaatgaaactccagaggcagaaaatcattgtcattccaatgggagctcaattgtcaattccttcctgtgcattcagccatcacgaacttatttcacattcacagtagctctaaggggcaggcacctgcattactcccctttcataatggaagatgttctgactttgaaacatgcccccttggacaggaaaatttgatggataacaggatagcatatcctcatatcccaatctttcaccaagaagttatacagcaaacacttgtaagtcaaggtcttgcatgataatctttgctaagtagcaagtaaagaaatatagcaaggacccagactctttggaatatgtgaactaaatccttcagatgttgttggcctcaatcatgttgtgaaggcacacaggagaatacatacacacacatatgcatatatgtatatatgtacatgtatgtgtacattatatatgagtatacatgtacctatcctatatatgtatgtatgtatagagtcacagactgcataatgttttggacaaatatagatcacatatatgatgatagtgtcttgagattaaaataccatgtttttattgtaccttttcagtgttcagatatgtttagacaaacaaatgcttatcattgtgttacagttgcctaaggtcttctctccagtcacatgctgtacaggtttgtagactggaagaactaggctataccatagagcctaggtgtgctataggctacacatcggttttgtgtaagtatactacatgatgtttgcacaatgatgaaattgcctaacgaaacttttctcagaaacctattgatacatgactgtgtatgtttacattatatatactgtatatgcacacatgcatatatgcatatatatgttatacatttacatatgtacatggatatcacatactttaaattcctgaagatgtcattttcattaaatacatatgcacacacactcataaacacacacagactcatatatacacacaaatctataacacatttgtgctcacatatacattcctctgtgtgtgtgtgtgtattacattactgctttttatctgtgaaatcacattctgcagtttcatttactgtgatcaactatgatctaaaaatatatgagtacttcaataagatattttgaaagaaaccacattcacataacatttatgacattataattgttctattttattagctattgttcatctcttactccatctactttataaattaagcttcataataagtgtgtatatttaataaaatatatagtata

SEQ ID NO: 13953 - DNA, 5167 bp, Homo sapiens
  source 1..5167: mol_type = unassigned DNA
tttttttcccttccttcatctcctggcctcggataagataaggcttgggggatgcacgaaataatccaagtgattgattagacctggcatggcttggttgggctggagaaagatcggggcgcgctggaaaccccgcgtgaagatgaaatgactttttcgaaagacttatctttctgcaggctcgcctctgagctttgtctccttggagccacctcacttagacagcttcggatgtggatgcagatttgaaccatgttgcgtccccagggactgctatggctccctttgttgttcacctctgtctgtgtcatgttaaactccaatgttcttctgtggataactgctcttgccatcaagttcaccctcattgacagccaagcacagtatccagttgtcaacacaaattatggtaaaatccagggcctaagaacaccattacccagtgagatcttgggtccagtggagcagtacttaggggtcccctatgcctcacccccaactggagagaggcggtttcagccaccagaatccccatcctcctggactggcatccgaaatgctactcagttttctgctgtgtgcccccagcacctggatgaaagattcttattgcatgacatgctgcccatctggtttaccaccagtttggatactttgatgacctatgttcaagatcaaaatgaagactgcctttacttaaacatctatgtgcccatggaagatgatattcatgaacagaacagtaagaagcctgttatggtctatatccatgggggatcttacatggagggaaccggtaacatgattgatggcagcattttggccagctatgggaacgtcatcgttatcaccattaactaccgtctgggaatactagggtttttaagtaccggtgaccaggcagcaaaaggcaactatgggctcctggatcagattcaagcactgaggtggattgaggagaatgtcggagcctttggcggggaccccaagagagtgactatctttggctcgggggctggggcctcctgtgtcagcctgttgaccctgtcccactactcagaaggtctcttccagaaggccatcattcagagcggcactgccctgtccagctgggcagtgaactaccagccggccaagtacactcggatattggcagacaaggtcggctgcaacatgctggacaccacggacatggtagaatgtctgaagaacaagaactacaaggagctcatccagcagaccatcaccccggccacctaccacatagcctttgggccggtgatcgacggcgacgtcatcccagacgacccccagatcctgatggagcaaggcgagttcctcaactacgacatcatgctgggcgtcaaccaaggggaaggcctgaagttcgtggacggcatcgtggataacgaggacggtgtgacgcccaacgactttgacttctccgtgtccaacttcgtggacaacctttacggctaccctgaagggaaagacactttgcgggagactatcaagttcatgtacacagactgggccgataaggaaaacccggagacgcggcggaaaaccctggtggctctctttactgaccatcagtgggtggcccccgccgtggccaccgccgacctgcacgcgcagtacggctcccccacctacttctatgccttctatcatcactgccaaagcgaaatgaagcccagctgggcagattcggcccatggcgatgaagtcccctatgtcttcggcatccccatgatcggtcccacagagctcttcagttgtaatttctccaagaacgacgtcatgctcagtgccgtggtgatgacctactggacgaacttcgccaaaactggtgatccaaaccaaccagttcctcaggataccaagttcattcatacaaaacccaatcgctttgaagaagtggcctggtccaagtataatcccaaagaccagctctatctgcatattggcttgaaacccagagtgagagatcactaccgggcaacgaaagtggctttctggttggaattggttcctcatttgcacaacttgaacgagatattccagtatgtttcaacaaccacaaaggttcctccaccagacatgacatcatttccctatggcacccggcgatctcccgccaagatatggccaaccaccaaacgcccagcaatcactcctgccaacaatcccaaacactctaaggaccctcacaaaacagggcccgaggacacaactgtcctcattgaaaccaaacgagattattccaccgaattaagtgtcaccattgccgtcggggcgtcgctcctcttcctcaacatcttagcctttgcggcgctgtactacaaaaaggacaagaggcgccatgagactcacaggcaccccagtccccagagaaacaccacaaatgatatcactcacatccagaacgaagagatcatgtctctgcagatgaagcagctggaacacgatcacgagtgtgagtcgctgcaggcacacgacacgctgaggctcacctgccctccagactacaccctcacgctgcgccggtcgccggatgacatcccatttatgacgccaaacaccatcaccatgattccaaacacattgatggggatgcagcctttacacacttttaaaaccttcagtggaggacaaaacagtacaaatttaccccacggacattccaccactagagtatagcttttccctatttcccctcctatccctctgcccctactgctcagcaatgtaaaagagacaaataaggagaaagaaaatctccaaaccaggaatgtttttgtgccactgactttagataaaaatgcaaaagggcagtcatcctgtcccagcagacccttctcattggcattttccagtattgtgagatcaatttctgaccatatgaaatgtgaaaagtatatgtttctgttacaatactgctttaagatctaaaccatgccaacagatgtttcgtgtgactaggacatcaccatttcaaggaactgtgtgtttccaacatcatggtagcagcacacacttccaaagctcagccagggacacttaatattttttaattacaatggaaatttaaacatttttatgtgggctacacaatggatggctcttcttaagtgaagaaagactctataggcttttacacagcacatgaagcagtaatccagaaagaaggaaatgcagaattttattatcaaagtaagcgaattgactgtgcagaaaaattgtagggttctgtggaaggaggtattctgccagcctgaactatatttaagaaactttgtaaaaaataaaaatgtatatagctgtgagctcaaacaaaaactgcagacaaacaaaaaagagaaaagcttttatttgtgttttcagtttgaaagaacttttagcaaggttgtgctttcaaacacatattagtcctaccaccttagttcctctacagcaaaagaggcttttcttcttaattacatgtaaacaaagacatgggattttctgacgtaagattttcatttgtaggaatatgtgatgtcaaatggaagactcagaagttttgtgtggcctatttctccctgtcaggttgcacagatgcatgtagagcattcttaggagaccattgttttagaaaactttgatttgtacatgttagttttcatgaaattgcaacacagagataggtcctaaaagtggaatgtatttaaaacttgttgaattagacacacacacacagacacacacaaagaatcagcagagaaaacaaaatacaagtcctgttctgtagttcttgccctttgaatatatttgggaagagttgcttcctatttcaggaccctgccaaaaaagaagaaagcttgcctttggtggggctatgccccttggagtaaatacagctctgtgttccctagcagctgccggaggatttggctgatgaagtacctgctcagcttagctaatcagattaaaggaagacatgtatgtcttttgtttaagcacctagtcccttatgtatcagtaaacaggtttttaaaaatcttttatgtcatttataggataaaacatatgcttgtctgaaaatatcaccttttgtggatttatctgatcaccaaataataaatattaagaagaatgggggaaaaaggatagaatattaaaactgctttgcataggtttttggggaaattaggatatcttcactgacaagacactgaatggaatttattcacccattttaaattggttacttggggatcagagatttgtctctccaacagcttgtggttttcttattactcattttcaggaaagtttgtagtattacaaggcagaaggaaacacagtagcaatggttgctctatattttgtctttcaaagattactgcattaccaagaaacagtagccaaagatgtttgaagatcatgtcccttagctgcattgtgggttattctagaaatccaatgttaaatgcctctactaaagtggggattccccataaaaattgtccagctacctgactcttttgcaataacaactttgattactgaatccatacactcaaactatagtgatatatcagtgtttgggagtgacctctagaaaaaagaaaactgtttttagaaatacataaaatcacttccaaatcctgttgcttatgttgggttaaatttgaaagcaattctctatatataaatatgtgaaatattatgatctgaacttagcacacatgaagcaacatttctttgctacacagaggtgtcttggaaagatttcattcccaattcatttttcatagatctataatcaggcaatttctgcaagcaatgtatgaccccacctgagcaaccacaaataggctctccatgaaactgcaaaggaactgatgtgtggcatccatgctggttttgtctgtctataatatgaattcaagtatctgttcatatttccaattgtctcctgctagcaatatgtgccacaacatgacagtcttgtgacatcttaaggaaaagaagagttcctgttaaatgaatagctttagcttttacaggggattatgattaaaagtgatttagtacatcttacatgatatctcatttctacgtgaaaagaagttatagaatcttcatagagttccatgagaaaaatatacttgctatttat

SEQ ID NO: 13954 - DNA, 5338 bp, Homo sapiens
  source 1..5338: mol_type = unassigned DNA
tttttttcccttccttcatctcctggcctcggataagataaggcttgggggatgcacgaaataatccaagtgattgattagacctggcatggcttggttgggctggagaaagatcggggcgcgctggaaaccccgcgtgaagatgaaatgactttttcgaaagacttatctttctgcaggctcgcctctgagctttgtctccttggagccacctcacttagacagcttcggatgtggatgcagatttgaaccatgttgcgtccccagggactgctatggctccctttgttgttcacctctgtctgtgtcatgttaaactccaatgttcttctgtggataactgctcttgccatcaagttcaccctcattgacagccaagcacagtatccagttgtcaacacaaattatggtaaaatccagggcctaagaacaccattacccagtgagatcttgggtccagtggagcagtacttaggggtcccctatgcctcacccccaactggagagaggcggtttcagccaccagaatccccatcctcctggactggcatccgaaatgctactcagttttctgctgtgtgcccccagcacctggatgaaagattcttattgcatgacatgctgcccatctggtttaccaccagtttggatactttgatgacctatgttcaagatcaaaatgaagactgcctttacttaaacatctatgtgcccatggaagatggaaccaacataaagagaaatgcagacgatataaccagtaatgaccatggtgaagataaagatattcatgaacagaacagtaagaagcctgttatggtctatatccatgggggatcttacatggagggaaccggtaacatgattgatggcagcattttggccagctatgggaacgtcatcgttatcaccattaactaccgtctgggaatactagcacaaaacaccctggctcatggaaactgcaagcatcgttgtcagctgcacctgcaggcaccacgggattgcaagtcagcataccctttcagaaatgaggatgaaattagagggtttttaagtaccggtgaccaggcagcaaaaggcaactatgggctcctggatcagattcaagcactgaggtggattgaggagaatgtcggagcctttggcggggaccccaagagagtgactatctttggctcgggggctggggcctcctgtgtcagcctgttgaccctgtcccactactcagaaggtctcttccagaaggccatcattcagagcggcactgccctgtccagctgggcagtgaactaccagccggccaagtacactcggatattggcagacaaggtcggctgcaacatgctggacaccacggacatggtagaatgtctgaagaacaagaactacaaggagctcatccagcagaccatcaccccggccacctaccacatagcctttgggccggtgatcgacggcgacgtcatcccagacgacccccagatcctgatggagcaaggcgagttcctcaactacgacatcatgctgggcgtcaaccaaggggaaggcctgaagttcgtggacggcatcgtggataacgaggacggtgtgacgcccaacgactttgacttctccgtgtccaacttcgtggacaacctttacggctaccctgaagggaaagacactttgcgggagactatcaagttcatgtacacagactgggccgataaggaaaacccggagacgcggcggaaaaccctggtggctctctttactgaccatcagtgggtggcccccgccgtggccaccgccgacctgcacgcgcagtacggctcccccacctacttctatgccttctatcatcactgccaaagcgaaatgaagcccagctgggcagattcggcccatggcgatgaagtcccctatgtcttcggcatccccatgatcggtcccacagagctcttcagttgtaatttctccaagaacgacgtcatgctcagtgccgtggtgatgacctactggacgaacttcgccaaaactggtgatccaaaccaaccagttcctcaggataccaagttcattcatacaaaacccaatcgctttgaagaagtggcctggtccaagtataatcccaaagaccagctctatctgcatattggcttgaaacccagagtgagagatcactaccgggcaacgaaagtggctttctggttggaattggttcctcatttgcacaacttgaacgagatattccagtatgtttcaacaaccacaaaggttcctccaccagacatgacatcatttccctatggcacccggcgatctcccgccaagatatggccaaccaccaaacgcccagcaatcactcctgccaacaatcccaaacactctaaggaccctcacaaaacagggcccgaggacacaactgtcctcattgaaaccaaacgagattattccaccgaattaagtgtcaccattgccgtcggggcgtcgctcctcttcctcaacatcttagcctttgcggcgctgtactacaaaaaggacaagaggcgccatgagactcacaggcaccccagtccccagagaaacaccacaaatgatatcactcacatccagaacgaagagatcatgtctctgcagatgaagcagctggaacacgatcacgagtgtgagtcgctgcaggcacacgacacgctgaggctcacctgccctccagactacaccctcacgctgcgccggtcgccggatgacatcccatttatgacgccaaacaccatcaccatgattccaaacacattgatggggatgcagcctttacacacttttaaaaccttcagtggaggacaaaacagtacaaatttaccccacggacattccaccactagagtatagcttttccctatttcccctcctatccctctgcccctactgctcagcaatgtaaaagagacaaataaggagaaagaaaatctccaaaccaggaatgtttttgtgccactgactttagataaaaatgcaaaagggcagtcatcctgtcccagcagacccttctcattggcattttccagtattgtgagatcaatttctgaccatatgaaatgtgaaaagtatatgtttctgttacaatactgctttaagatctaaaccatgccaacagatgtttcgtgtgactaggacatcaccatttcaaggaactgtgtgtttccaacatcatggtagcagcacacacttccaaagctcagccagggacacttaatattttttaattacaatggaaatttaaacatttttatgtgggctacacaatggatggctcttcttaagtgaagaaagactctataggcttttacacagcacatgaagcagtaatccagaaagaaggaaatgcagaattttattatcaaagtaagcgaattgactgtgcagaaaaattgtagggttctgtggaaggaggtattctgccagcctgaactatatttaagaaactttgtaaaaaataaaaatgtatatagctgtgagctcaaacaaaaactgcagacaaacaaaaaagagaaaagcttttatttgtgttttcagtttgaaagaacttttagcaaggttgtgctttcaaacacatattagtcctaccaccttagttcctctacagcaaaagaggcttttcttcttaattacatgtaaacaaagacatgggattttctgacgtaagattttcatttgtaggaatatgtgatgtcaaatggaagactcagaagttttgtgtggcctatttctccctgtcaggttgcacagatgcatgtagagcattcttaggagaccattgttttagaaaactttgatttgtacatgttagttttcatgaaattgcaacacagagataggtcctaaaagtggaatgtatttaaaacttgttgaattagacacacacacacagacacacacaaagaatcagcagagaaaacaaaatacaagtcctgttctgtagttcttgccctttgaatatatttgggaagagttgcttcctatttcaggaccctgccaaaaaagaagaaagcttgcctttggtggggctatgccccttggagtaaatacagctctgtgttccctagcagctgccggaggatttggctgatgaagtacctgctcagcttagctaatcagattaaaggaagacatgtatgtcttttgtttaagcacctagtcccttatgtatcagtaaacaggtttttaaaaatcttttatgtcatttataggataaaacatatgcttgtctgaaaatatcaccttttgtggatttatctgatcaccaaataataaatattaagaagaatgggggaaaaaggatagaatattaaaactgctttgcataggtttttggggaaattaggatatcttcactgacaagacactgaatggaatttattcacccattttaaattggttacttggggatcagagatttgtctctccaacagcttgtggttttcttattactcattttcaggaaagtttgtagtattacaaggcagaaggaaacacagtagcaatggttgctctatattttgtctttcaaagattactgcattaccaagaaacagtagccaaagatgtttgaagatcatgtcccttagctgcattgtgggttattctagaaatccaatgttaaatgcctctactaaagtggggattccccataaaaattgtccagctacctgactcttttgcaataacaactttgattactgaatccatacactcaaactatagtgatatatcagtgtttgggagtgacctctagaaaaaagaaaactgtttttagaaatacataaaatcacttccaaatcctgttgcttatgttgggttaaatttgaaagcaattctctatatataaatatgtgaaatattatgatctgaacttagcacacatgaagcaacatttctttgctacacagaggtgtcttggaaagatttcattcccaattcatttttcatagatctataatcaggcaatttctgcaagcaatgtatgaccccacctgagcaaccacaaataggctctccatgaaactgcaaaggaactgatgtgtggcatccatgctggttttgtctgtctataatatgaattcaagtatctgttcatatttccaattgtctcctgctagcaatatgtgccacaacatgacagtcttgtgacatcttaaggaaaagaagagttcctgttaaatgaatagctttagcttttacaggggattatgattaaaagtgatttagtacatcttacatgatatctcatttctacgtgaaaagaagttatagaatcttcatagagttccatgagaaaaatatacttgctatttat

SEQ ID NO: 13955 - DNA, 5460 bp, Homo sapiens
  source 1..5460: mol_type = unassigned DNA
tttttttcccttccttcatctcctggcctcggataagataaggcttgggggatgcacgaaataatccaagtgattgattagacctggcatggcttggttgggctggagaaagatcggggcgcgctggaaaccccgcgtgaagatgaaatgactttttcgaaagacttatctttctgcaggctcgcctctgagctttgtctccttggagccacctcacttagacagcttcggatgtggatgcagatttgaaccatgttgcgtccccagggactgctatggctccctttgttgttcacctctgtctgtgtcatgttaaactccaatgttcttctgtggataactgctcttgccatcaagttcaccctcattgacagccaagcacagtatccagttgtcaacacaaattatggtaaaatccagggcctaagaacaccattacccagtgagatcttgggtccagtggagcagtacttaggggtcccctatgcctcacccccaactggagagaggcggtttcagccaccagaatccccatcctcctggactggcatccgaaatgctactcagttttctgctgtgtgcccccagcacctggatgaaagattcttattgcatgacatgctgcccatctggtttaccaccagtttggatactttgatgacctatgttcaagatcaaaatgaagactgcctttacttaaacatctatgtgcccatggaagatggaaccaacataaagagaaatgcagacgatataaccagtaatgaccatggtgaagataaagatattcatgaacagaacagtaagaagcctgttatggtctatatccatgggggatcttacatggagggaaccggtaacatgattgatggcagcattttggccagctatgggaacgtcatcgttatcaccattaactaccgtctgggaatactagcacaaaacaccctggctcatggaaactgcaagcatcgttgtcagctgcacctgcaggcaccacgggattgcaagtcagcataccctttcagaaatgaggatgaaattagagatggagtgttgctctgtcacccaggctgaagtgcagtggcatgatcttggctcactgcaacctctgcttcccaggttcaagcaattcttctgcctcagcatcctgagtagctgaaattacagggtttttaagtaccggtgaccaggcagcaaaaggcaactatgggctcctggatcagattcaagcactgaggtggattgaggagaatgtcggagcctttggcggggaccccaagagagtgactatctttggctcgggggctggggcctcctgtgtcagcctgttgaccctgtcccactactcagaaggtctcttccagaaggccatcattcagagcggcactgccctgtccagctgggcagtgaactaccagccggccaagtacactcggatattggcagacaaggtcggctgcaacatgctggacaccacggacatggtagaatgtctgaagaacaagaactacaaggagctcatccagcagaccatcaccccggccacctaccacatagcctttgggccggtgatcgacggcgacgtcatcccagacgacccccagatcctgatggagcaaggcgagttcctcaactacgacatcatgctgggcgtcaaccaaggggaaggcctgaagttcgtggacggcatcgtggataacgaggacggtgtgacgcccaacgactttgacttctccgtgtccaacttcgtggacaacctttacggctaccctgaagggaaagacactttgcgggagactatcaagttcatgtacacagactgggccgataaggaaaacccggagacgcggcggaaaaccctggtggctctctttactgaccatcagtgggtggcccccgccgtggccaccgccgacctgcacgcgcagtacggctcccccacctacttctatgccttctatcatcactgccaaagcgaaatgaagcccagctgggcagattcggcccatggcgatgaagtcccctatgtcttcggcatccccatgatcggtcccacagagctcttcagttgtaatttctccaagaacgacgtcatgctcagtgccgtggtgatgacctactggacgaacttcgccaaaactggtgatccaaaccaaccagttcctcaggataccaagttcattcatacaaaacccaatcgctttgaagaagtggcctggtccaagtataatcccaaagaccagctctatctgcatattggcttgaaacccagagtgagagatcactaccgggcaacgaaagtggctttctggttggaattggttcctcatttgcacaacttgaacgagatattccagtatgtttcaacaaccacaaaggttcctccaccagacatgacatcatttccctatggcacccggcgatctcccgccaagatatggccaaccaccaaacgcccagcaatcactcctgccaacaatcccaaacactctaaggaccctcacaaaacagggcccgaggacacaactgtcctcattgaaaccaaacgagattattccaccgaattaagtgtcaccattgccgtcggggcgtcgctcctcttcctcaacatcttagcctttgcggcgctgtactacaaaaaggacaagaggcgccatgagactcacaggcaccccagtccccagagaaacaccacaaatgatatcactcacatccagaacgaagagatcatgtctctgcagatgaagcagctggaacacgatcacgagtgtgagtcgctgcaggcacacgacacgctgaggctcacctgccctccagactacaccctcacgctgcgccggtcgccggatgacatcccatttatgacgccaaacaccatcaccatgattccaaacacattgatggggatgcagcctttacacacttttaaaaccttcagtggaggacaaaacagtacaaatttaccccacggacattccaccactagagtatagcttttccctatttcccctcctatccctctgcccctactgctcagcaatgtaaaagagacaaataaggagaaagaaaatctccaaaccaggaatgtttttgtgccactgactttagataaaaatgcaaaagggcagtcatcctgtcccagcagacccttctcattggcattttccagtattgtgagatcaatttctgaccatatgaaatgtgaaaagtatatgtttctgttacaatactgctttaagatctaaaccatgccaacagatgtttcgtgtgactaggacatcaccatttcaaggaactgtgtgtttccaacatcatggtagcagcacacacttccaaagctcagccagggacacttaatattttttaattacaatggaaatttaaacatttttatgtgggctacacaatggatggctcttcttaagtgaagaaagactctataggcttttacacagcacatgaagcagtaatccagaaagaaggaaatgcagaattttattatcaaagtaagcgaattgactgtgcagaaaaattgtagggttctgtggaaggaggtattctgccagcctgaactatatttaagaaactttgtaaaaaataaaaatgtatatagctgtgagctcaaacaaaaactgcagacaaacaaaaaagagaaaagcttttatttgtgttttcagtttgaaagaacttttagcaaggttgtgctttcaaacacatattagtcctaccaccttagttcctctacagcaaaagaggcttttcttcttaattacatgtaaacaaagacatgggattttctgacgtaagattttcatttgtaggaatatgtgatgtcaaatggaagactcagaagttttgtgtggcctatttctccctgtcaggttgcacagatgcatgtagagcattcttaggagaccattgttttagaaaactttgatttgtacatgttagttttcatgaaattgcaacacagagataggtcctaaaagtggaatgtatttaaaacttgttgaattagacacacacacacagacacacacaaagaatcagcagagaaaacaaaatacaagtcctgttctgtagttcttgccctttgaatatatttgggaagagttgcttcctatttcaggaccctgccaaaaaagaagaaagcttgcctttggtggggctatgccccttggagtaaatacagctctgtgttccctagcagctgccggaggatttggctgatgaagtacctgctcagcttagctaatcagattaaaggaagacatgtatgtcttttgtttaagcacctagtcccttatgtatcagtaaacaggtttttaaaaatcttttatgtcatttataggataaaacatatgcttgtctgaaaatatcaccttttgtggatttatctgatcaccaaataataaatattaagaagaatgggggaaaaaggatagaatattaaaactgctttgcataggtttttggggaaattaggatatcttcactgacaagacactgaatggaatttattcacccattttaaattggttacttggggatcagagatttgtctctccaacagcttgtggttttcttattactcattttcaggaaagtttgtagtattacaaggcagaaggaaacacagtagcaatggttgctctatattttgtctttcaaagattactgcattaccaagaaacagtagccaaagatgtttgaagatcatgtcccttagctgcattgtgggttattctagaaatccaatgttaaatgcctctactaaagtggggattccccataaaaattgtccagctacctgactcttttgcaataacaactttgattactgaatccatacactcaaactatagtgatatatcagtgtttgggagtgacctctagaaaaaagaaaactgtttttagaaatacataaaatcacttccaaatcctgttgcttatgttgggttaaatttgaaagcaattctctatatataaatatgtgaaatattatgatctgaacttagcacacatgaagcaacatttctttgctacacagaggtgtcttggaaagatttcattcccaattcatttttcatagatctataatcaggcaatttctgcaagcaatgtatgaccccacctgagcaaccacaaataggctctccatgaaactgcaaaggaactgatgtgtggcatccatgctggttttgtctgtctataatatgaattcaagtatctgttcatatttccaattgtctcctgctagcaatatgtgccacaacatgacagtcttgtgacatcttaaggaaaagaagagttcctgttaaatgaatagctttagcttttacaggggattatgattaaaagtgatttagtacatcttacatgatatctcatttctacgtgaaaagaagttatagaatcttcatagagttccatgagaaaaatatacttgctatttat

SEQ ID NO: 13956 - DNA, 540 bp, Homo sapiens
  source 1..540: mol_type = unassigned DNA
acagtcggaggcggcagagacggtggcgggtgagctaggggctgtgagacgaagcagggagagagtgaacttcagccccgtcccctccccactgccacggctggggcaacccaacccgcgcctgaagcggcttggcttgacctgcggaagcgcgggccgggatggcgtggggagagggaggttgcattggagttttcgaaagacttatctttctgcaggctcgcctctgagctttgtctccttggagccacctcacttagacagcttcggatgtggatgcagatttgaaccatgttgcgtccccagggactgctatggctccctttgttgttcacctctgtctgtgtcatgttaaactccaatgttcttctgtggataactgctcttgccatcaagttcaccctcattgacagccaagcacagtatccagttgtcaacacaaattatggtaaaatccagggcctaagaacaccattacccagtgagatcttgggtccagtggagcagtacttaggggtcccctatgcctcacccccaact

SEQ ID NO: 13957 - DNA, 5310 bp, Homo sapiens
  source 1..5310: mol_type = unassigned DNA
gagacgaagcagggagagagtgaacttcagccccgtcccctccccactgccacggctggggcaacccaacccgcgcctgaagcggcttggcttgacctgcggaagcgcgggccgggatggcgtggggagagggaggtaggtgccactgggctgcagatgacgagtgggttgggggcttgctgtgggacaagaggttcaggttccggcctgcgccttccactccgcggtggcgctctctgcctgcggttttccaggaggccgatctaccccagggacactctcatccttcaggcggtctcctggacgccctttcctccccttgcctcccagcctgacctggctctttcgcccctcggagaaccggttgcattggagttttcgaaagacttatctttctgcaggctcgcctctgagctttgtctccttggagccacctcacttagacagcttcggatgtggatgcagatttgaaccatgttgcgtccccagggactgctatggctccctttgttgttcacctctgtctgtgtcatgttaaactccaatgttcttctgtggataactgctcttgccatcaagttcaccctcattgacagccaagcacagtatccagttgtcaacacaaattatggtaaaatccagggcctaagaacaccattacccagtgagatcttgggtccagtggagcagtacttaggggtcccctatgcctcacccccaactggagagaggcggtttcagccaccagaatccccatcctcctggactggcatccgaaatgctactcagttttctgctgtgtgcccccagcacctggatgaaagattcttattgcatgacatgctgcccatctggtttaccaccagtttggatactttgatgacctatgttcaagatcaaaatgaagactgcctttacttaaacatctatgtgcccatggaagatgatattcatgaacagaacagtaagaagcctgttatggtctatatccatgggggatcttacatggagggaaccggtaacatgattgatggcagcattttggccagctatgggaacgtcatcgttatcaccattaactaccgtctgggaatactagggtttttaagtaccggtgaccaggcagcaaaaggcaactatgggctcctggatcagattcaagcactgaggtggattgaggagaatgtcggagcctttggcggggaccccaagagagtgactatctttggctcgggggctggggcctcctgtgtcagcctgttgaccctgtcccactactcagaaggtctcttccagaaggccatcattcagagcggcactgccctgtccagctgggcagtgaactaccagccggccaagtacactcggatattggcagacaaggtcggctgcaacatgctggacaccacggacatggtagaatgtctgaagaacaagaactacaaggagctcatccagcagaccatcaccccggccacctaccacatagcctttgggccggtgatcgacggcgacgtcatcccagacgacccccagatcctgatggagcaaggcgagttcctcaactacgacatcatgctgggcgtcaaccaaggggaaggcctgaagttcgtggacggcatcgtggataacgaggacggtgtgacgcccaacgactttgacttctccgtgtccaacttcgtggacaacctttacggctaccctgaagggaaagacactttgcgggagactatcaagttcatgtacacagactgggccgataaggaaaacccggagacgcggcggaaaaccctggtggctctctttactgaccatcagtgggtggcccccgccgtggccaccgccgacctgcacgcgcagtacggctcccccacctacttctatgccttctatcatcactgccaaagcgaaatgaagcccagctgggcagattcggcccatggcgatgaagtcccctatgtcttcggcatccccatgatcggtcccacagagctcttcagttgtaatttctccaagaacgacgtcatgctcagtgccgtggtgatgacctactggacgaacttcgccaaaactggtgatccaaaccaaccagttcctcaggataccaagttcattcatacaaaacccaatcgctttgaagaagtggcctggtccaagtataatcccaaagaccagctctatctgcatattggcttgaaacccagagtgagagatcactaccgggcaacgaaagtggctttctggttggaattggttcctcatttgcacaacttgaacgagatattccagtatgtttcaacaaccacaaaggttcctccaccagacatgacatcatttccctatggcacccggcgatctcccgccaagatatggccaaccaccaaacgcccagcaatcactcctgccaacaatcccaaacactctaaggaccctcacaaaacagggcccgaggacacaactgtcctcattgaaaccaaacgagattattccaccgaattaagtgtcaccattgccgtcggggcgtcgctcctcttcctcaacatcttagcctttgcggcgctgtactacaaaaaggacaagaggcgccatgagactcacaggcaccccagtccccagagaaacaccacaaatgatatcactcacatccagaacgaagagatcatgtctctgcagatgaagcagctggaacacgatcacgagtgtgagtcgctgcaggcacacgacacgctgaggctcacctgccctccagactacaccctcacgctgcgccggtcgccggatgacatcccatttatgacgccaaacaccatcaccatgattccaaacacattgatggggatgcagcctttacacacttttaaaaccttcagtggaggacaaaacagtacaaatttaccccacggacattccaccactagagtatagcttttccctatttcccctcctatccctctgcccctactgctcagcaatgtaaaagagacaaataaggagaaagaaaatctccaaaccaggaatgtttttgtgccactgactttagataaaaatgcaaaagggcagtcatcctgtcccagcagacccttctcattggcattttccagtattgtgagatcaatttctgaccatatgaaatgtgaaaagtatatgtttctgttacaatactgctttaagatctaaaccatgccaacagatgtttcgtgtgactaggacatcaccatttcaaggaactgtgtgtttccaacatcatggtagcagcacacacttccaaagctcagccagggacacttaatattttttaattacaatggaaatttaaacatttttatgtgggctacacaatggatggctcttcttaagtgaagaaagactctataggcttttacacagcacatgaagcagtaatccagaaagaaggaaatgcagaattttattatcaaagtaagcgaattgactgtgcagaaaaattgtagggttctgtggaaggaggtattctgccagcctgaactatatttaagaaactttgtaaaaaataaaaatgtatatagctgtgagctcaaacaaaaactgcagacaaacaaaaaagagaaaagcttttatttgtgttttcagtttgaaagaacttttagcaaggttgtgctttcaaacacatattagtcctaccaccttagttcctctacagcaaaagaggcttttcttcttaattacatgtaaacaaagacatgggattttctgacgtaagattttcatttgtaggaatatgtgatgtcaaatggaagactcagaagttttgtgtggcctatttctccctgtcaggttgcacagatgcatgtagagcattcttaggagaccattgttttagaaaactttgatttgtacatgttagttttcatgaaattgcaacacagagataggtcctaaaagtggaatgtatttaaaacttgttgaattagacacacacacacagacacacacaaagaatcagcagagaaaacaaaatacaagtcctgttctgtagttcttgccctttgaatatatttgggaagagttgcttcctatttcaggaccctgccaaaaaagaagaaagcttgcctttggtggggctatgccccttggagtaaatacagctctgtgttccctagcagctgccggaggatttggctgatgaagtacctgctcagcttagctaatcagattaaaggaagacatgtatgtcttttgtttaagcacctagtcccttatgtatcagtaaacaggtttttaaaaatcttttatgtcatttataggataaaacatatgcttgtctgaaaatatcaccttttgtggatttatctgatcaccaaataataaatattaagaagaatgggggaaaaaggatagaatattaaaactgctttgcataggtttttggggaaattaggatatcttcactgacaagacactgaatggaatttattcacccattttaaattggttacttggggatcagagatttgtctctccaacagcttgtggttttcttattactcattttcaggaaagtttgtagtattacaaggcagaaggaaacacagtagcaatggttgctctatattttgtctttcaaagattactgcattaccaagaaacagtagccaaagatgtttgaagatcatgtcccttagctgcattgtgggttattctagaaatccaatgttaaatgcctctactaaagtggggattccccataaaaattgtccagctacctgactcttttgcaataacaactttgattactgaatccatacactcaaactatagtgatatatcagtgtttgggagtgacctctagaaaaaagaaaactgtttttagaaatacataaaatcacttccaaatcctgttgcttatgttgggttaaatttgaaagcaattctctatatataaatatgtgaaatattatgatctgaacttagcacacatgaagcaacatttctttgctacacagaggtgtcttggaaagatttcattcccaattcatttttcatagatctataatcaggcaatttctgcaagcaatgtatgaccccacctgagcaaccacaaataggctctccatgaaactgcaaaggaactgatgtgtggcatccatgctggttttgtctgtctataatatgaattcaagtatctgttcatatttccaattgtctcctgctagcaatatgtgccacaacatgacagtcttgtgacatcttaaggaaaagaagagttcctgttaaatgaatagctttagcttttacaggggattatgattaaaagtgatttagtacatctta

SEQ ID NO: 13958 - DNA, 722 bp, Homo sapiens
  source 1..722: mol_type = unassigned DNA
taaactccaatgttcttctgtggataactgctcttgccatcaagttcaccctcattgacagccaagcacagtatccagttgtcaacacaaattatggtaaaatccagggcctaagaacaccattacccagtgagatcttgggtccagtggagcagtacttaggggtcccctatgcctcacccccaactggagagaggcggtttcagccaccagaatccccatcctcctggactggcatccgaaatgctactcagttttctgctgtgtgcccccagcacctggatgaaagattcttattgcatgacatgctgcccatctggtttaccaccagtttggatactttgatgacctatgttcaagatcaaaatgaagactgcctttacttaaacatctatgtgcccatggaagatggaaccaacataaagagaaatgcagacgatataaccagtaatgaccatggtgaagataaagatattcatgaacagaacagtaagaagcctgttatggtctatatccatgggggatcttacatggagggaaccggtaacatgattgatggcagcattttggccagctatgggaacgtcatcgttatcaccattaactaccgtctgggaatactaggtatgcaagaggcacgtttgtgtgggagctcaaaaatgtttaattattttaaatctcctttcactaatttaataaattttttttgagttcagatgcaa

SEQ ID NO: 13959 - DNA, 8661 bp, Homo sapiens
  source 1..8661: mol_type = unassigned DNA
ggggctggtaggcgccggcgtggagctgccgcacgtgggagggcgctggccaggcagccactgtggcctctgcggctaggccggctcgagactcccgggcgcccaggcgctgccgcccgcctcgccgccccacgccgaaggaccacgcgcccgccgccgccagcctctcagcgctcccatgatcgcccggtgccttttggctgtgcgaagcctccgcagagttggtggttccaggattttactcagaatgacgttaggaagagaagtgatgtctcctcttcaggcaatgtcttcctatactgtggctggcagaaatgttttaagatgggatctttcaccagagcaaattaaaacaagaactgaggagctcattgtgcagaccaaacaggtgtacgatgctgttggaatgctcggtattgaggaagtaacttacgagaactgtctgcaggcactggcagatgtagaagtaaagtatatagtggaaaggaccatgctagactttccccagcatgtatcctctgacaaagaagtacgagcagcaagtacagaagcagacaaaagactttctcgttttgatattgagatgagcatgagaggagatatatttgagagaattgttcatttacaggaaacctgtgatctggggaagataaaacctgaggccagacgatacttggaaaagtcaattaaaatggggaaaagaaatgggctccatcttcctgaacaagtacagaatgaaatcaaatcaatgaagaaaagaatgagtgagctatgtattgattttaacaaaaacctcaatgaggatgataccttccttgtattttccaaggctgaacttggtgctcttcctgatgatttcattgacagtttagaaaagacagatgatgacaagtataaaattaccttaaaatatccacactatttccctgtcatgaagaaatgttgtatccctgaaaccagaagaaggatggaaatggcttttaatacaaggtgcaaagaggaaaacaccataattttgcagcagctactcccactgcgaaccaaggtggccaaactactcggttatagcacacatgctgacttcgtccttgaaatgaacactgcaaagagcacaagccgcgtaacagcctttctagatgatttaagccagaagttaaaacccttgggtgaagcagaacgagagtttattttgaatttgaagaaaaaggaatgcaaagacaggggttttgaatatgatgggaaaatcaatgcctgggatctatattactacatgactcagacagaggaactcaagtattccatagaccaagagttcctcaaggaatacttcccaattgaggtggtcactgaaggcttgctgaacacctaccaggagttgttgggactttcatttgaacaaatgacagatgctcatgtttggaacaagagtgttacactttatactgtgaaggataaagctacaggagaagtattgggacagttctatttggacctctatccaagggaaggaaaatacaatcatgcggcctgcttcggtctccagcctggctgccttctgcctgatggaagccggatgatggcagtggctgccctcgtggtgaacttctcacagccagtggcaggtcgtccctctctcctgagacacgacgaggtgaggacttactttcatgagtttggtcacgtgatgcatcagatttgtgcacagactgattttgcacgatttagcggaacaaatgtggaaactgactttgtagaggtgccatcgcaaatgcttgaaaattgggtgtgggacgtcgattccctccgaagattgtcaaaacattataaagatggaagccctattgcagacgatctgcttgaaaaacttgttgcttctaggctggtcaacacaggtcttctgaccctgcgccagattgttttgagcaaagttgatcagtctcttcataccaacacatcgctggatgctgcaagtgaatatgccaaatactgctcagaaatattaggagttgcagctactccaggcacaaatatgccagctacctttggacatttggcagggggatacgatggccaatattatggatatctttggagtgaagtattttccatggatatgttttacagctgttttaaaaaagaagggataatgaatccagaggttggaatgaaatacagaaacctaatcctgaaacctgggggatctctggacggcatggacatgctccacaatttcttgaaacgtgagccaaaccaaaaagcgttcctaatgagtagaggcctgcatgctccgtgaactggggatctttggtagccgtccatgtctggaggacaagtcgacatcaccatgtgttactggcctggaaactgaagggagttttgcaagtgaaaatttagatttctattgacatccttttgttttctaattttaaaaattataaagatgtaaatggaattataaatactgtgacctaagaaaagacccactagaaagtaattgtactataaaatttcataaaactggatttgatttctttttatgaaagtttcatatgaatgtaacttgattttttactattataatctagataatatgatataagagggctaagaatttttaaattgaatcatatatatgatataatttgatccttcttgtatcttgaagttttgtacttgggatttctggactgataaatgaatcatcacattcttctggtaaatattttcttggagctctgtgtcaactttgatcctttgtctcccaggaaggtgtgacctctcctttgcctgcatacctcaaggccaggggaatatgcctcagtgatgcatttatctttgtatatcaggccgcatgattcccaactttctgccacacttaaattacgttcctccatttcagttttgtcttttctgtctaaagttcagtcaaagagtatcaaaaaattatgtttcagctagactggtgtaatgtataagtttttgtatcttgtattagaggatttcgtagcttttattagaggctcatttccacctcagcatacaagatcgttagtcttttggcatgtgtgccaattagaatactaaagcaagtccaagcacatttttctcttctcacgtttctaataagtgttagggactttgcctcttttacttaccacgtccccaaaagtgtcaggtagacatgtcacaaatggctctgtagagagccatgggaagagagaggaggtggatgtggaacataaagggttcagaaactccagaagaggagtgggttttggatagaagcatttgaggacagctgctccaaagccttatgtgtatgatgaaacttaaccacggggaagagactcttcagtagcctgttctgtctggtgatttttattttaagtgaacctttggatctatctttaactctctttattgtgagtctaaattccaattctgcagcagatcagtaaactcacagtatttttcctgtggaaatctattcaataaggaaaccaagacaggataataaaatttaaaaaaaaaacaactttgaattcccctgcctaggtcttccagttgttttccagcgcatacctcaggtatgactttgctagccggggacaaaattagcaccttccgattctctagtccaaatgaactttgtgctaaataaaaaattattatactacataataaagttacagatagcaggaaatgcaagagctaggagattcctagattatatctgccaagcaaataccttaaacatccacctgaaatcctactaccccctcttctgagataatttgcccagcccttctcttcccacacactcactcaatgtcacccccttctaatccccaaaactgtttttgtggtctttgtagcctatagtagttttctcacatctttccccctagacttttctgtttttcagtttcagacaaaaaaactcttcagctttttccagtgtgtctccttaacagtaactttaccacttgaaatcttatttcatagaaaaactaaattggtgtggaaaggctgcacacaataaagttatattattatccatgaaaatgaactcatatttctttcatactttaacgttaaaaccgaaatgcatgagagcaaaagcaccatggtgttctttctatttagggcctacctctaatatttaaaatctaccaaagagcagtcacaaaattaaaactcagcccgggcgcagtggctcatgcctgtaatcccagcactttgggaggccaaggcaggaggatcacctgaggtcagagttcaagaccagcatggtcaacatggtgaaaccctgtctctacaaaaatacaaaaagctgggcatgatgttgggttcctgtagtcccagctacttaggaggctgaggcaggagaatagcttgaacccgggaggtggaggttgcagtgagctgagatcatgccattgcactccagcctggacgacagagtgagattcagtctcaaaaaaaattaatactcaaagaattatctagcataatttaaaagaaaggactttttaaaaattctctagcataattcaaaagaaaggacttaacttttttttttttagtgtggtcatccgtctagttgttctttttttccagatcagagcagagaatatcactgacatgcttgaaatggtggataactatgtaaattgtaattggacaaatgtacactttagatttatggactgagccacatataataaggtctctcctggtaattgatccaggggatttaggcctctttcgggttttttgttttttttttaggcattgttatgttgtgaaggataaaatcttcaacatcttatgcaaatggatagtaggcatgatcctaaaggtttagttttacgatgctgcagagaagagaaatgtcttgacgttttgccacctgatgtagactttgtccccctctagtataaatgttgcatgttacctagataaacaactaaaaattgccttgagttatcacctgagctacttatgccaaggtcttgcctttctaaagctaataaggtgagaggtggatatctgtagctcttcggatgaaaaattgcattgtgggagataccaaaattgaggaaatagctcttcaaagaaaaattactgatatgatcattgtacttgtaaatgccttaagtagcaggcagtgactcaattttctactttaccattttacctttagcttttatgtatgaattataggtctgtggagattctgcctccccactaggccagtgtgtgtttaccatttattcattttctatcatacacaggtggattaaaatttacattaaaatttacattaaaataccatcatacttcaggcttctataacaaaatatcagactgggtggcttcaaaagcagacatttcttacagttctggaagctgggaagtcccacaatccacatgctggtaaatttggttcgtggtgaggcccctcttcctcttttactgaccacatccccaaaagtgtcaggtagacatgttacaaatagctctgtagagagccatgggaagagacaggaggcagatgtggaacataaagggtttagaaacttctgcaggcagcagtggcagggagcaagccctagagtgtctctttttacgagagcaggaatcccatcatgagagttccttcctcatgactttatctaaacccagtcacccccaacaaaggccccaccccctaaccccatcacattggctgttacggcttcaatgtaggggatggggcacaaacattcagtccataacgaatactgattcctcaaatagggtttaaacatagttaactgagcccccaaagaatgttaaaagagaaaatccattttatttgaatagatgcagtgaccacagcttcttccctcaaatcaacacattacagttagatgtctcccatctgaaattggatagcccactgaaattgaacatgccttctcttataaatgtgtggtgagaataaaagcaacaaagaaatgaatgtggtggctcacacctgtaatcctaacactttggaaggttgaggcaggaggatcctttgtgctcaagagtttgagaccagcctgagcaacacagtgagaccctgtctctacaaaaactaaaaaaattagctagggatggtggcacatgcctgtagtcccagctacttgggaggctgaggtgggaggattgcttgagcccaagaaggtcaaggctgccatgagccataatcacgccactgcactccagcctgggtgacagagaccctgtcttaaaataaaataaaaaaaaaaggaaaaggaaagacatacataccctcagttcttcgaaaaacagtcaacgtccaaaaagtttattttttgagtcacctttaatagagaaatttcccactggaaacagatccacctaagtgattatctagtatcagctgtatcaaggcaaaaggtaaaggttataagatgtaaatattagaccaaaatagccttttttaacaaacacaataatgctgtacgtctgtaacaaaacaaaatttgaaaaattgaggtaatgtacacagcgatgcacacacccccacaccacaccgtgattcctgagttttgatttggttgaattcaccttgtagttccctttcctgagaaaatacaggttcaacacatctagtccacgatgtacgtacaaggggaaggggtgaacaggaaatagactcccttattctgctcacatgagctggaacctgtactagctgcatatttcatagaccccagaggctcacctcaattgtactcctatgataaaatgtctctagcatttgtcatgagagaaactggctagaaatagtttgttcattgcgtccagcaagacacgcattgctgttgatatctttgtggctaagatggagaatgtgactggataatagttatccaggtggattactagctattgaaacagtctgagatagttgcatgatgattaacgttaaactgggagtaatttcaagtcatttggctaaaaatgaaaaaaaagtcccataaaaaggtatcaaatgtacagataatagggctggaattattaagtatgatgatgttattaacatctaaaattattttggccgggcaaggtgggtcacgcctgtaatctcagcactttgggatgccaagatgggtggatcacctgagttcaggagttcaagaccagcttggccaacatggcgaaacccgtctctactaaagaatacaaaaattagccaggtgttgtggcacatgcctgtactcccagctactcaggaggctgaggcagaagaatcatttgaaccccggaggtggaggttgcagtgagccgacattgtgccgcttcattccagcctgggcaacagagtgaaactcttgtctcaaaagtaaaaaaataataatgtttaaaaatatttcaatgtggagacaagctcaaaatgaaattagacacattccattacccaggtaaaagaaggggaagcctgacttgatagtagtattcaggaaaaaagagttggcagttttatttggccaaattccaatatcagctcatggtacagcacaccgggggagggggacgggaggcgagaactaaggctttttaagaatgtgttgatggaagtatgtgcctagatcaaaagaataatccccccggactccagtgtaagatcaattactgttggaatattgtgttcctttctagatatcacattttaagcagactttggccaagtagtacagtgtttgcaggagcagtaacaagatggtgataactttgaaaatacttctcaaaagaaaaataaaaaagaattagggaagttcagtctggagataattcagaaatacagatgataattgttttcaaattcttgaaggaaatgggagagagaataggctaattctgtattgcttcagaaaccaaatggaaacaattaaattccattagagaaacggttggaaaatatgaggaggatttagttcagtacgaggaagctgtttctaatactttttgttggttaaaaatacattccgctgctgtggaaagcctgtagctgccaggagtgttacagagggcattcctcccttgagttgacatttgtgccaaaccggcttttagggcttctccagcttttaagatgcgataatgataagatgatcatcgggaaaacatccctcagatgaaacgttcacaggctggctctgaaaactggcattcagatgattgcggctcccccatactgtaggaatattgtttatggcttaaggttgcctcgctcctcatctgtaatcagtgaaagtttatccagaggttaattaccggttttctggtgggtatctgggaactgaggatgggagattaactgttgtatatgaccatagtaaagcaaaagactgttagagaatgagtaaacgttcgttttcctccctacagaatttacagttactctctgtccattccactcactactgtcttcatcacacacacagaggcaaacgtctgattcagatagccaggtgtgccatgcatgcactccaccatattgtgatctcttcgaggcttgtttctgtcccctgtcctccacagtcctggattgttaatgaatagttcatacatgtttgttaaataaatataccttctttaaaatta

SEQ ID NO: 13960 - DNA, 8354 bp, Homo sapiens
  source 1..8354: mol_type = unassigned DNA
ggccaggcagccactgtggcctctgcggctaggccggctcgagactcccgggcgcccaggcgctgccgcccgcctcgccgccccacgccgaaggaccacgcgcccgccgccgccagcctctcagcgctcccatgatcgcccggtgccttttggctgtgcgaagcctccgcagtggaaaggaccatgctagactttccccagcatgtatcctctgacaaagaagtacgagcagcaagtacagaagcagacaaaagactttctcgttttgatattgagatgagcatgagaggagatatatttgagagaattgttcatttacaggaaacctgtgatctggggaagataaaacctgaggccagacgatacttggaaaagtcaattaaaatggggaaaagaaatgggctccatcttcctgaacaagtacagaatgaaatcaaatcaatgaagaaaagaatgagtgagctatgtattgattttaacaaaaacctcaatgaggatgataccttccttgtattttccaaggctgaacttggtgctcttcctgatgatttcattgacagtttagaaaagacagatgatgacaagtataaaattaccttaaaatatccacactatttccctgtcatgaagaaatgttgtatccctgaaaccagaagaaggatggaaatggcttttaatacaaggtgcaaagaggaaaacaccataattttgcagcagctactcccactgcgaaccaaggtggccaaactactcggttatagcacacatgctgacttcgtccttgaaatgaacactgcaaagagcacaagccgcgtaacagcctttctagatgatttaagccagaagttaaaacccttgggtgaagcagaacgagagtttattttgaatttgaagaaaaaggaatgcaaagacaggggttttgaatatgatgggaaaatcaatgcctgggatctatattactacatgactcagacagaggaactcaagtattccatagaccaagagttcctcaaggaatacttcccaattgaggtggtcactgaaggcttgctgaacacctaccaggagttgttgggactttcatttgaacaaatgacagatgctcatgtttggaacaagagtgttacactttatactgtgaaggataaagctacaggagaagtattgggacagttctatttggacctctatccaagggaaggaaaatacaatcatgcggcctgcttcggtctccagcctggctgccttctgcctgatggaagccggatgatggcagtggctgccctcgtggtgaacttctcacagccagtggcaggtcgtccctctctcctgagacacgacgaggtgaggacttactttcatgagtttggtcacgtgatgcatcagatttgtgcacagactgattttgcacgatttagcggaacaaatgtggaaactgactttgtagaggtgccatcgcaaatgcttgaaaattgggtgtgggacgtcgattccctccgaagattgtcaaaacattataaagatggaagccctattgcagacgatctgcttgaaaaacttgttgcttctaggctggtcaacacaggtcttctgaccctgcgccagattgttttgagcaaagttgatcagtctcttcataccaacacatcgctggatgctgcaagtgaatatgccaaatactgctcagaaatattaggagttgcagctactccaggcacaaatatgccagctacctttggacatttggcagggggatacgatggccaatattatggatatctttggagtgaagtattttccatggatatgttttacagctgttttaaaaaagaagggataatgaatccagaggttggaatgaaatacagaaacctaatcctgaaacctgggggatctctggacggcatggacatgctccacaatttcttgaaacgtgagccaaaccaaaaagcgttcctaatgagtagaggcctgcatgctccgtgaactggggatctttggtagccgtccatgtctggaggacaagtcgacatcaccatgtgttactggcctggaaactgaagggagttttgcaagtgaaaatttagatttctattgacatccttttgttttctaattttaaaaattataaagatgtaaatggaattataaatactgtgacctaagaaaagacccactagaaagtaattgtactataaaatttcataaaactggatttgatttctttttatgaaagtttcatatgaatgtaacttgattttttactattataatctagataatatgatataagagggctaagaatttttaaattgaatcatatatatgatataatttgatccttcttgtatcttgaagttttgtacttgggatttctggactgataaatgaatcatcacattcttctggtaaatattttcttggagctctgtgtcaactttgatcctttgtctcccaggaaggtgtgacctctcctttgcctgcatacctcaaggccaggggaatatgcctcagtgatgcatttatctttgtatatcaggccgcatgattcccaactttctgccacacttaaattacgttcctccatttcagttttgtcttttctgtctaaagttcagtcaaagagtatcaaaaaattatgtttcagctagactggtgtaatgtataagtttttgtatcttgtattagaggatttcgtagcttttattagaggctcatttccacctcagcatacaagatcgttagtcttttggcatgtgtgccaattagaatactaaagcaagtccaagcacatttttctcttctcacgtttctaataagtgttagggactttgcctcttttacttaccacgtccccaaaagtgtcaggtagacatgtcacaaatggctctgtagagagccatgggaagagagaggaggtggatgtggaacataaagggttcagaaactccagaagaggagtgggttttggatagaagcatttgaggacagctgctccaaagccttatgtgtatgatgaaacttaaccacggggaagagactcttcagtagcctgttctgtctggtgatttttattttaagtgaacctttggatctatctttaactctctttattgtgagtctaaattccaattctgcagcagatcagtaaactcacagtatttttcctgtggaaatctattcaataaggaaaccaagacaggataataaaatttaaaaaaaaaacaactttgaattcccctgcctaggtcttccagttgttttccagcgcatacctcaggtatgactttgctagccggggacaaaattagcaccttccgattctctagtccaaatgaactttgtgctaaataaaaaattattatactacataataaagttacagatagcaggaaatgcaagagctaggagattcctagattatatctgccaagcaaataccttaaacatccacctgaaatcctactaccccctcttctgagataatttgcccagcccttctcttcccacacactcactcaatgtcacccccttctaatccccaaaactgtttttgtggtctttgtagcctatagtagttttctcacatctttccccctagacttttctgtttttcagtttcagacaaaaaaactcttcagctttttccagtgtgtctccttaacagtaactttaccacttgaaatcttatttcatagaaaaactaaattggtgtggaaaggctgcacacaataaagttatattattatccatgaaaatgaactcatatttctttcatactttaacgttaaaaccgaaatgcatgagagcaaaagcaccatggtgttctttctatttagggcctacctctaatatttaaaatctaccaaagagcagtcacaaaattaaaactcagcccgggcgcagtggctcatgcctgtaatcccagcactttgggaggccaaggcaggaggatcacctgaggtcagagttcaagaccagcatggtcaacatggtgaaaccctgtctctacaaaaatacaaaaagctgggcatgatgttgggttcctgtagtcccagctacttaggaggctgaggcaggagaatagcttgaacccgggaggtggaggttgcagtgagctgagatcatgccattgcactccagcctggacgacagagtgagattcagtctcaaaaaaaattaatactcaaagaattatctagcataatttaaaagaaaggactttttaaaaattctctagcataattcaaaagaaaggacttaacttttttttttttagtgtggtcatccgtctagttgttctttttttccagatcagagcagagaatatcactgacatgcttgaaatggtggataactatgtaaattgtaattggacaaatgtacactttagatttatggactgagccacatataataaggtctctcctggtaattgatccaggggatttaggcctctttcgggttttttgttttttttttaggcattgttatgttgtgaaggataaaatcttcaacatcttatgcaaatggatagtaggcatgatcctaaaggtttagttttacgatgctgcagagaagagaaatgtcttgacgttttgccacctgatgtagactttgtccccctctagtataaatgttgcatgttacctagataaacaactaaaaattgccttgagttatcacctgagctacttatgccaaggtcttgcctttctaaagctaataaggtgagaggtggatatctgtagctcttcggatgaaaaattgcattgtgggagataccaaaattgaggaaatagctcttcaaagaaaaattactgatatgatcattgtacttgtaaatgccttaagtagcaggcagtgactcaattttctactttaccattttacctttagcttttatgtatgaattataggtctgtggagattctgcctccccactaggccagtgtgtgtttaccatttattcattttctatcatacacaggtggattaaaatttacattaaaatttacattaaaataccatcatacttcaggcttctataacaaaatatcagactgggtggcttcaaaagcagacatttcttacagttctggaagctgggaagtcccacaatccacatgctggtaaatttggttcgtggtgaggcccctcttcctcttttactgaccacatccccaaaagtgtcaggtagacatgttacaaatagctctgtagagagccatgggaagagacaggaggcagatgtggaacataaagggtttagaaacttctgcaggcagcagtggcagggagcaagccctagagtgtctctttttacgagagcaggaatcccatcatgagagttccttcctcatgactttatctaaacccagtcacccccaacaaaggccccaccccctaaccccatcacattggctgttacggcttcaatgtaggggatggggcacaaacattcagtccataacgaatactgattcctcaaatagggtttaaacatagttaactgagcccccaaagaatgttaaaagagaaaatccattttatttgaatagatgcagtgaccacagcttcttccctcaaatcaacacattacagttagatgtctcccatctgaaattggatagcccactgaaattgaacatgccttctcttataaatgtgtggtgagaataaaagcaacaaagaaatgaatgtggtggctcacacctgtaatcctaacactttggaaggttgaggcaggaggatcctttgtgctcaagagtttgagaccagcctgagcaacacagtgagaccctgtctctacaaaaactaaaaaaattagctagggatggtggcacatgcctgtagtcccagctacttgggaggctgaggtgggaggattgcttgagcccaagaaggtcaaggctgccatgagccataatcacgccactgcactccagcctgggtgacagagaccctgtcttaaaataaaataaaaaaaaaaggaaaaggaaagacatacataccctcagttcttcgaaaaacagtcaacgtccaaaaagtttattttttgagtcacctttaatagagaaatttcccactggaaacagatccacctaagtgattatctagtatcagctgtatcaaggcaaaaggtaaaggttataagatgtaaatattagaccaaaatagccttttttaacaaacacaataatgctgtacgtctgtaacaaaacaaaatttgaaaaattgaggtaatgtacacagcgatgcacacacccccacaccacaccgtgattcctgagttttgatttggttgaattcaccttgtagttccctttcctgagaaaatacaggttcaacacatctagtccacgatgtacgtacaaggggaaggggtgaacaggaaatagactcccttattctgctcacatgagctggaacctgtactagctgcatatttcatagaccccagaggctcacctcaattgtactcctatgataaaatgtctctagcatttgtcatgagagaaactggctagaaatagtttgttcattgcgtccagcaagacacgcattgctgttgatatctttgtggctaagatggagaatgtgactggataatagttatccaggtggattactagctattgaaacagtctgagatagttgcatgatgattaacgttaaactgggagtaatttcaagtcatttggctaaaaatgaaaaaaaagtcccataaaaaggtatcaaatgtacagataatagggctggaattattaagtatgatgatgttattaacatctaaaattattttggccgggcaaggtgggtcacgcctgtaatctcagcactttgggatgccaagatgggtggatcacctgagttcaggagttcaagaccagcttggccaacatggcgaaacccgtctctactaaagaatacaaaaattagccaggtgttgtggcacatgcctgtactcccagctactcaggaggctgaggcagaagaatcatttgaaccccggaggtggaggttgcagtgagccgacattgtgccgcttcattccagcctgggcaacagagtgaaactcttgtctcaaaagtaaaaaaataataatgtttaaaaatatttcaatgtggagacaagctcaaaatgaaattagacacattccattacccaggtaaaagaaggggaagcctgacttgatagtagtattcaggaaaaaagagttggcagttttatttggccaaattccaatatcagctcatggtacagcacaccgggggagggggacgggaggcgagaactaaggctttttaagaatgtgttgatggaagtatgtgcctagatcaaaagaataatccccccggactccagtgtaagatcaattactgttggaatattgtgttcctttctagatatcacattttaagcagactttggccaagtagtacagtgtttgcaggagcagtaacaagatggtgataactttgaaaatacttctcaaaagaaaaataaaaaagaattagggaagttcagtctggagataattcagaaatacagatgataattgttttcaaattcttgaaggaaatgggagagagaataggctaattctgtattgcttcagaaaccaaatggaaacaattaaattccattagagaaacggttggaaaatatgaggaggatttagttcagtacgaggaagctgtttctaatactttttgttggttaaaaatacattccgctgctgtggaaagcctgtagctgccaggagtgttacagagggcattcctcccttgagttgacatttgtgccaaaccggcttttagggcttctccagcttttaagatgcgataatgataagatgatcatcgggaaaacatccctcagatgaaacgttcacaggctggctctgaaaactggcattcagatgattgcggctcccccatactgtaggaatattgtttatggcttaaggttgcctcgctcctcatctgtaatcagtgaaagtttatccagaggttaattaccggttttctggtgggtatctgggaactgaggatgggagattaactgttgtatatgaccatagtaaagcaaaagactgttagagaatgagtaaacgttcgttttcctccctacagaatttacagttactctctgtccattccactcactactgtcttcatcacacacacagaggcaaacgtctgattcagatagccaggtgtgccatgcatgcactccaccatattgtgatctcttcgaggcttgtttctgtcccctgtcctccacagtcctggattgttaatgaatagttcatacatgtttgttaaataaatataccttctttaaaatta

SEQ ID NO: 13961 - DNA, 564 bp, Homo sapiens
  source 1..564: mol_type = unassigned DNA
aggcagccactgtggcctctgcggctaggccggctcgagactcccgggcgcccaggcgctgccgcccgcctcgccgccccacgccgaaggaccacgcgcccgccgccgccagcctctcagcgctcccatgatcgcccggtgccttttggctgtgcgaagcctccgcagatggagtctcgctctgttgcctaggctggtgtgcagtggcgtgatcttggctcactgcagcctctgcctccctggttcaagcgattctcctgcttcagccacctgaagttggtggttccaggattttactcagaatgacgttaggaagagaagtgatgtctcctcttcaggcaatgtcttcctatactgtggctggcagaaatgttttaagatgggatctttcaccagagcaaattaaaacaagaactgaggagctcattgtgcagaccaaacaggtgtacgatgctgttggaatgctcggtattgaggaagtaacttacgagaactgtctgcaggcactggcagatgtagaagtaaagtatatagtggaaaggaccatgctagactttccccagc

SEQ ID NO: 13962 - DNA, 2637 bp, Homo sapiens
  source 1..2637: mol_type = unassigned DNA
gtggcctctgcggctaggccggctcgagactcccgggcgcccaggcgctgccgcccgcctcgccgccccacgccgaaggaccacgcgcccgccgccgccagcctctcagcgctcccatgatcgcccggtgccttttggctgtgcgaagcctccgcagagttggtggttccaggattttactcagaatgacgttaggaagagaagtgatgtctcctcttcaggcaatgtcttcctatactgtggctggcagaaatgttttaagatgggatctttcaccagagcaaattaaaacaagaactgaggagctcattgtgcagaccaaacaggtgtacgatgctgttggaatgctcggtattgaggaagtaacttacgagaactgtctgcaggcactggcagatgtagaagtaaagtatatagtggaaaggaccatgctagactttccccagcatgtatcctctgacaaagaagtacgagcagcaagtacagaagcagacaaaagactttctcgttttgatattgagatgagcatgagaggagatatatttgagagaattgttcatttacaggaaacctgtgatctggggaagataaaacctgaggccagacgatacttggaaaagtcaattaaaatggggaaaagaaatgggctccatcttcctgaacaagtacagaatgaaatcaaatcaatgaagaaaagaatgagtgagctatgtattgattttaacaaaaacctcaatgaggatgataccttccttgtattttccaaggctgaacttggtgctcttcctgatgatttcattgacagtttagaaaagacagatgatgacaagtataaaattaccttaaaatatccacactatttccctgtcatgaagaaatgttgtatccctgaaaccagaagaaggatggaaatggcttttaatacaaggtgcaaagaggaaaacaccataattttgcagcagctactcccactgcgaaccaaggtggccaaactactcggttatagcacacatgctgacttcgtccttgaaatgaacactgcaaagagcacaagccgcgtaacagcctttctagatgatttaagccagaagttaaaacccttgggtgaagcagaacgagagtttattttgaatttgaagaaaaaggaatgcaaagacaggggttttgaatatgatgggaaaatcaatgcctgggatctatattactacatgactcagacagaggaactcaagtattccatagaccaagagttcctcaaggaatacttcccaattgaggtggtcactgaaggcttgctgaacacctaccaggagttgttgggactttcatttgaacaaatgacagatgctcatgtttggaacaagagtgttacactttatactgtgaaggataaagctacaggagaagtattgggacagttctatttggacctctatccaagggaaggaaaatacaatcatgcggcctgcttcggtctccagcctggctgccttctgcctgatggaagccggatgatggcagtggctgccctcgtggtgaacttctcacagccagtggcaggtcgtccctctctcctgagacacgacgaggtgaggacttactttcatgagtttggtcacgtgatgcatcagatttgtgcacaggtgagttttttttttcccccagtaaacctgccaattagtttttttagaaaacttcttgactgctgtcaggtttctgctcctaacaggttttttcagaagctgaatgtgttcaagaattttataggccttctgcaaaaccaaaattttccttatcctgtcctctttcacaacatatttttacttggaggttcatctaccagtgaaagatgtttgttgaataacagcctatggaaaaagaataagactatctgtaaggaaaggttacaaatactttgctttttccttttaatcctttaggaatttgatataaatttctcagaaaaactgtgctgtaatctgtctcttctgcttatcaatgctttgtttactttagtggtttttcaatcctcttagaccctttactcatttttaaataataattttgtaacatttgcctttactaacttcaaattaaaatcatagataatatagtctaaccatgcaaagaatttgccagagtggaggtgtatgtgtgcagtagattaaaactgatttttttatttctgaaaataaaaagtacatttattctcaactttgtaatacagtccatttaattaggcccagactattctagcatgaaccatatgaacttgctaacatttaaccattattaacatatgaaaatgtctagttcagcaattcaccgtaatagttgaaatatactgttatttggctgggcatggtggctcatgcctgtaatcccagcactttgggaggccaaggtggaaggatcgcttgagtctaggagtttgagaacagcctgggcaacgtggtaaaacaaacaaaaattatccaggcatggtggtatgtgcctgtggtcccagctactcgggaggctgaggtgggaggatcacttgagttcaggaggttgaggttgtagtgagccatgattgtgccactgcaccacagcctgggtgacagagcagaccttgacttaaaaaaaaaaaaaagaaaa

SEQ ID NO: 13963 - DNA, 2085 bp, Homo sapiens
  source 1..2085: mol_type = unassigned DNA
ttaatttcaggaaacctgtgatctggggaagataaaacctgaggccagacgatacttggaaaagtcaattaaaatggggaaaagaaatgggctccatcttcctgaacaagtacagaatgaaatcaaatcaatgaagaaaagaatgagtgagctatgtattgattttaacaaaaacctcaatgaggatgataccttccttgtattttccaaggctgaacttggtgctcttcctgatgatttcattgacagtttagaaaagacagatgatgacaagtataaaattaccttaaaatatccacactatttccctgtcatgaagaaatgttgtatccctgaaaccagaagaaggatggaaatggcttttaatacaaggtgcaaagaggaaaacaccataattttgcagcagctactcccactgcgaaccaaggtggccaaactactcggttatagcacacatgctgacttcgtccttgaaatgaacactgcaaagagcacaagccgcgtaacagcctttctagatgatttaagccagaagttaaaacccttgggtgaagcagaacgagagtttattttgaatttgaagaaaaaggaatgcaaagacaggggttttgaatatgatgggaaaatcaatgcctgggatctatattactacatgactcagacagaggaactcaagtattccatagaccaagagttcctcaaggaatacttcccaattgaggtggtcactgaaggcttgctgaacacctaccaggagttgttgggactttcatttgaacaaatgacagatgctcatgtttggaacaagagtgttacactttatactgtgaaggataaagctacaggagaagtattgggacagttctatttggacctctatccaagggaaggaaaatacaatcatgcggcctgcttcggtctccagcctggctgccttctgcctgatggaagccggatgatggcagtggctgccctcgtggtgaacttctcacagccagtggcaggtcgtccctctctcctgagacacgacgaggtgaggacttactttcatgagtttggtcacgtgatgcatcagatttgtgcacagactgattttgcacgatttagcggaacaaatgtggaaactgactttgtagaggtgccatcgcaaatgcttgaaaattgggtgtgggacgtcgattccctccgaagattgtcaaaacattataaagatggaagccctattgcagacgatctgcttgaaaaacttgttgcttctaggctggtcaacacaggtcttctgaccctgcgccagattgttttgagcaaagttgatcagtctcttcataccaacacatcgctggatgctgcaagtgaatatgccaaatactgctcagaaatattaggagttgcagctactccaggcacaaatatgccagctacctttggacatttggcagggggatacgatggccaatattatggatatctttggagtgaagtattttccatggatatgttttacagctgttttaaaaaagaagggataatgaatccagaggttggaatgaaatacagaaacctaatcctgaaacctgggggatctctggacggcatggacatgctccacaatttcttgaaacgtgagccaaaccaaaaagcgttcctaatgagtagaggcctgcatgctccgtgaactggggatctttggtagccgtccatgtctggaggacaagtcgacatcaccatgtgttactggcctggaaactgaagggagttttgcaagtgaaaatttagatttctattgacatccttttgttttctaattttaaaaattataaagatgtaaatggaattataaatactgtgacctaagaaaagacccactagaaagtaattgtactataaaatttcataaaactggatttgatttctttttatgaaagtttcatatgaatgtaacttgattttttactattataatctagataatatgatataagagggctaagaatttttaaattgaatcatatatatgatataatttgatccttcttgtatcttgaagttttgtacttgggatttctggactgataaatgaatcat

SEQ ID NO: 13964 - DNA, 701 bp, Homo sapiens
  source 1..701: mol_type = unassigned DNA
gttagccaggctggtcttggactcttgacctcaaatgatccacccaccttagcctcccaaattgctgggattacaggtgtgggccaccgtgcctggcaaaaaatgagtttctttttattgctaatgccctgtatttttatcttcctttcaggaaatcaaatcaatgaagaaaagaatgagtgagctatgtattgattttaacaaaaacctcaatgaggatgataccttccttgtattttccaaggctgaacttggtgctcttcctgatgatttcattgacagtttagaaaagacagatgatgacaagtataaaattaccttaaaatatccacactatttccctgtcatgaagaaatgttgtatccctgaaaccagaagaaggatggaaatggcttttaatacaaggtgcaaagaggaaaacaccataattttgcagcagctactcccactgcgaaccaaggtggccaaactactcggttatagcacacatgctgacttcgtccttgaaatgaacactgcaaagagcacaagccgcgtaacagcctttctaggttagttcttttttttttttctatgactgttttgctataccatgtcaaccagacagaaggcctcagaacataatatgcctttgaggacatcctacttttccttcatttgagagaagtatattgatcacctattaagtgttagatagtgtg

SEQ ID NO: 13965 - DNA, 1658 bp, Homo sapiens
  source 1..1658: mol_type = unassigned DNA
aaagaggaaaacaccataattttgcagcagctactcccactgcgaaccaaggtggccaaactactcggttatagcacacatgctgacttcgtccttgaaatgaacactgcaaagagcacaagccgcgtaacagcctttctagatgatttaagccagaagttaaaacccttgggtgaagcagaacgagagtttattttgaatttgaagaaaaaggaatgcaaagacaggggttttgaatatgatgggaaaatcaatgcctgggatctatattactacatgactcagacagaggaactcaagtattccatagaccaagagttcctcaaggaatacttcccaattgaggtggtcactgaaggcttgctgaacacctaccaggagttgttgggactttcatttgaacaaatgacagatgctcatgtttggaacaagagtgttacactttatactgtgaaggataaagctacaggagaagtattgggacagttctatttggacctctatccaagggaaggaaaatacaatcatgcggcctgcttcggtctccagcctggctgccttctgcctgatggaagccggatgatggcagtggctgccctcgtggtgaacttctcacagccagtggcaggtcgtccctctctcctgagacacgacgagactgattttgcacgatttagcggaacaaatgtggaaactgactttgtagaggtgccatcgcaaatgcttgaaaattgggtgtgggacgtcgattccctccgaagattgtcaaaacattataaagatggaagccctattgcagacgatctgcttgaaaaacttgttgcttctaggctggtcaacacaggtcttctgaccctgcgccagattgttttgagcaaagttgatcagtctcttcataccaacacatcgctggatgctgcaagtgaatatgccaaatactgctcagaaatattaggagttgcagctactccaggcacaaatatgccagctacctttggacatttggcagggggatacgatggccaatattatggatatctttggagtgaagtattttccatggatatgttttacagctgttttaaaaaagaagggataatgaatccagaggttggaatgaaatacagaaacctaatcctgaaacctgggggatctctggacggcatggacatgctccacaatttcttgaaacgtgagccaaaccaaaaagcgttcctaatgagtagaggcctgcatgctccgtgaactggggatctttggtagccgtccatgtctggaggacaagtcgacatcaccatgtgttactggcctggaaactgaagggagttttgcaagtgaaaatttagatttctattgacatccttttgttttctaattttaaaaattataaagatgtaaatggaattataaatactgtgacctaagaaaagacccactagaaagtaattgtactataaaatttcataaaactggatttgatttctttttatgaaagtttcatatgaatgtaacttgattttttactattataatctagataatatgatataagagggctaagaatttttaaattgaatcatatatatgatataatttgatccttcttgtatcttgaagttttgtacttgggatttctggactgataaatgaatcatcac

SEQ ID NO: 13966 - DNA, 1106 bp, Homo sapiens
  source 1..1106: mol_type = unassigned DNA
ggactttcatttgaacaaatgacagatgctcatgtttggaacaagagtgttacactttatactgtgaaggataaagctacaggagaagtattgggacagttctatttggacctctatccaagggaaggaaaatacaatcatgcggcctgcttcggtctccagcctggctgccttctgcctgatggaagccggatgatggcagtggctgccctcgtggtgaacttctcacagccagtggcaggtcgtccctctctcctgagacacgacgaggtgaggacttactttcatgagtttggtcacgtgatgcatcagatttgtgcacagactgattttgcacgatttagcggaacaaatgtggaaactgactttgtagaggtgccatcgcaaatgcttgaaaattgggtgtgggacgtcgattccctccgaagattgtcaaaacattataaagatggaagccctattgcagacgatctgcttgaaaaacttgttgcttctaggctggtcaacacaggtcttctgaccctgcgccagattgttttgagcaaagttgatcagtctcttcataccaacacatcgctggatgctgcaagtgaatatgccaaatactgctcagaaatattaggagttgcagctactccaggcacaaatatgccagctacctttggacatttggcagggggatacgatggccaatattatggatatctttggagtgaagtattttccatggatatgttttacagctgttttaaaaaagaagggataatgaatccagagacttctaaacatcatggaatctccttgatcatgtttcactattcaaagggagaggtggatcttgttcctttttgaagtaggagccaggctagccagtgttcccttctcctctaggagccatacacttgatggacataaaacattgcagagaaaacagaagccctttcttctaaaaagattacaactcatatttgcttcaaataagacctgaaatagctgctcactcctaaaagagtatctgaactttatgggaaaagaagagcaccatcaagtaggcaaccattcctggggagaagttgatttggctatcaggttaaataaacatcttt

SEQ ID NO: 13967 - DNA, 617 bp, Homo sapiens
  source 1..617: mol_type = unassigned DNA
ggagctagggagaaattgcttgtttaatggatctcttcatttttaatggaaaattctttaaaaatacttctgctttcaaagcttaaggcttgtttttagcttagactgattgtatttttcagttctggttttctgatgattgttccaactttgtctacaattcaaaggaatgaaattactactgtaatatagagtatttgggggttgtttttcacactgttcagctgctgtgttttattttcacttgactatgaggttattctaacccctcattcagaggaacaactgattttgcacgatttagcggaacaaatgtggaaactgactttgtagaggtgccatcgcaaatgcttgaaaattgggtgtgggacgtcgattccctccgaagattgtcaaaacattataaagatggaagccctattgcagacgatctgcttgaaaaacttgttgcttctaggctggtcaacacaggtcttctgaccctgcgccagattgttttgagcaaagttgatcagtctcttcataccaacacatcgctggatgctgcaagtgaatatgccaaatactgctcagaaatattaggagttgcagctactccaggcacaaatatgccagct

SEQ ID NO: 13968 - DNA, 720 bp, Homo sapiens
  source 1..720: mol_type = unassigned DNA
ggtgagcttgtcaggtgcctgatcgtcatcccccgtccttggctggtcgctctctgccctgatgactgccgctcagtgtaggaaggagacagctctggctgccctccccagagtcatccatgctgggaaggatggaggaggggtggaaagttagtgagagcctgcatgtgctgctgcagagatgcccaagatagcaggagacccaatctgtttcccatttatatattctcattgctgatagatgatggacatccttcatttaggttggaatgaaatacagaaacctaatcctgaaacctgggggatctctggacggcatggacatgctccacaatttcttgaaacgtgagccaaaccaaaaagcgttcctaatgagtagaggcctgcatgctccgtgaactggggatctttggtagccgtccatgtctggaggacaagtcgacatcaccatgtgttactggcctggaaactgaagggagttttgcaagtgaaaatttagatttctattgacatccttttgttttctaattttaaaaattataaagatgtaaatggaattataaatactgtgacctaagaaaagacccactagaaagtaattgtactataaaatttcataaaactggatttgatttctttttatgaaagtttcatatgaatgtaacttgattttttactattataatctagataatatgatataagagggctaagaatttt

SEQ ID NO: 13969 - DNA, 708 bp, Homo sapiens
  source 1..708: mol_type = unassigned DNA
tcccttgggtcctctctgttacagaagttctgatttttcctagcgagctggaggaaagtgatttgccttcaaggaaactggggagtcagaaaattgggaactcatatcaacatggcaaacctattgaaaacagtggtgactggctgctcgtgtcctctacttagcaatttggggtcctgtaagggtctacgtgtgaagaaggattttttacgaacattttatactcaccaagaactgtggtgtaaagcgcctgtaaaaccaggaattccatataagcaactgactgttggagtccccaaagagatattccaaaatgagaagcgagtggcattgtctcctgctggtgttcagaacttggtcaagcagggttttaatgttgtcgtggaatcgggtgcgggcgaagcttccaagttctcagatgatcactatagagtggcaggtgcccaaatccaaggggcaaaggaagtgctggcttctgatttggtggtcaaagtgcgagcccctatggttaatccaacattaggtgttcatgaagctgaccttttaaagacatcaggaacgctgattagttttatttacccagcccaaaatccagagttgctaaataaactttcccaaagaaaaactacagttctggcaatggaccaggttccaagagtcacaattgctcagggatatgatgcgctaagctccatggccaacattgcg

SEQ ID NO: 13970 - DNA, 754 bp, Homo sapiens
  source 1..754: mol_type = unassigned DNA
ctctgttacagaagttctgatttttcctagcgagctggaggaaaggcagtgatttgccttcaaggaaactggggagtcagaaaattgggaactcatatcaacatggcaaacctattgaaaacagtggtgactggctgctcgtgtcctctacttagcaatttggggtcctgtaagggtctacgtgtgaagaaggattttttacgaacattttatactcaccaagaactgtggtgtaaagcgcctgtaaaaccaggaattccatataagcaactgactgttggagtccccaaagagatattccaaaatgagaagcgagtggcattgtctcctgctggtgttcagaacttggtcaagcagggttttaatgttgtcgtggaatcgggtgcgggcgaagcttccaagttctcagatgatcactatagagtggcaggtgcccaaatccaaggggcaaaggaagtgctggcttctgatttggtggtcaaagtgcgagcccctatggttaatccaacattaggtgttcatgaagctgaccttttaaagacatcaggaacgctgattagttttatttacccagcccaaaatccagagttgctaaataaactttcccaaagaaaaactacagttctggcaatggaccaggttccaagagtcacaattgctcagggatatgatgcgctaagctccatggccaacattgcgggttataaggctgttgtcctagcagcaaatcattttggacgtttttttactggtc

SEQ ID NO: 13971 - DNA, 6483 bp, Homo sapiens
  source 1..6483: mol_type = unassigned DNA
gatttttcctagcgagctggaggaaaggcaggtacccggagtggagttatattacctgtttctttgttctgatgggaccccagagaggacatcacgctttgtaactggttcttcaaggggagaagcaaatgtgtccctgaaaacttcagctgccgcgtttggcaccagtgatttgccttcaaggaaactggggagtcagaaaattgggaactcatatcaacatggcaaacctattgaaaacagtggtgactggctgctcgtgtcctctacttagcaatttggggtcctgtaagggtctacgtgtgaagaaggattttttacgaacattttatactcaccaagaactgtggtgtaaagcgcctgtaaaaccaggaattccatataagcaactgactgttggagtccccaaagagatattccaaaatgagaagcgagtggcattgtctcctgctggtgttcagaacttggtcaagcagggttttaatgttgtcgtggaatcgggtgcgggcgaagcttccaagttctcagatgatcactatagagtggcaggtgcccaaatccaaggggcaaaggaagtgctggcttctgatttggtggtcaaagtgcgagcccctatggttaatccaacattaggtgttcatgaagctgaccttttaaagacatcaggaacgctgattagttttatttacccagcccaaaatccagagttgctaaataaactttcccaaagaaaaactacagttctggcaatggaccaggttccaagagtcacaattgctcagggatatgatgcgctaagctccatggccaacattgcgggttataaggctgttgtcctagcagcaaatcattttggacgtttttttactggtcagatcacagctgctggaaaagttcctccagctaagattctgatagttggtggtggtgttgctgggcttgcttctgcaggcgcagcaaagtcgatgggtgcaattgttcgaggatttgacacaagagctgcagctttggaacagttcaagtctcttggtgctgagcccttggaggtggacttgaaggaatctggtgagggacaaggaggatatgcaaaagagatgtccaaagagttcattgaagctgaaatgaaactctttgctcaacaatgcaaggaggtagacatccttatcagcacagcacttattccaggtaaaaaagctccagttttatttaataaagaaatgattgagtcaatgaaggaaggttcagttgttgtggatttagctgctgaggctggtggaaactttgaaaccactaagccaggagaactctacattcataagggaattactcacataggctacacagacctgcccagccgaatggccactcaggccagcaccctatattccaacaacatcaccaaactcctgaaggccatcagcccggacaaagataatttttattttgatgtgaaagatgactttgactttggtacgatgggtcatgtcattagaggaactgtagtgatgaaagatggtaaagtgattttcccagctcccacaccgaaaaatattcctcaaggtgccccagtaaaacagaagacagtggctgagctggaagctgaaaaagcagctaccattacacccttcaggaagacaatgtcaacggcttctgcatatacagcaggtctcacagggatactgggtttgggcattgcggctcccaatctagccttttctcagatggtgaccacttttggcttggctggcattgtggggtatcataccgtctggggagtgacccctgctctccactcaccactgatgtctgtgacaaatgcaatctcagggctgactgcagttggtgggttggcactgatgggaggacatttgtatccttccacaacttctcagggccttgctgctcttgctgcattcatatcctctgtcaacattgcaggtggctttctggtgactcagagaatgctggacatgttcaagcgtcccactgaccccccagaatacaactacctgtacctgctccctgccggcacctttgttggtggatatttagctgccctctacagtggttataacattgaacagatcatgtacctaggctcgggtttgtgctgtgtcggtgccttggctggcctctccacccagggaacagcacgtcttggcaatgcactgggcatgattggggttgctggaggactggcagccaccctcggagtcctaaaaccgggcccagaattactagctcagatgtctggagcgatggctttgggtggtaccattggattgacaattgccaaacgcatccagatttctgatttacctcaattagttgctgcttttcacagtttagtgggtttggcagctgtacttacttgcatagctgagtacattatagaatatccacattttgctacggatgcagcagcaaatctcaccaagattgtggcctacctcggcacttacattggtggcgtcacctttagtgggtctctcattgcctatggaaaattgcagggtctcctgaaatctgcccctctcctactgcctggaaggcacttactcaatgcaggcttactggctgctagtgtgggcgggataatcccattcatggtggacccaagctttactactggcatcacctgtctgggttcagtgtctgctctctctgctgtcatgggtgtgactttgacagctgctattgggggtgctgacatgcccgtcgttatcactgtgctgaacagctactcaggctgggccctgtgtgcagagggcttcctgctcaacaacaatctgctgaccatcgtgggtgcactcataggctcgtctggtgctatcctgtcatacatcatgtgtgtggcaatgaatcgctccctggctaatgtgattcttggaggctatggcaccacttcaacagctggtggaaaacccatggaaatttctggcacacatacggaaatcaaccttgacaatgcaattgacatgattcgagaagctaatagcattattattacaccaggctatggtctctgtgcagccaaagctcaataccccattgctgatttggtaaagatgctcactgagcaaggcaaaaaagtcaggtttggaattcacccagttgcaggccgaatgcctggtcagcttaatgtgctgctggctgaggctggtgtgccatatgacattgtgttggaaatggatgagatcaaccatgattttccagatactgatttggtccttgtaattggagctaatgacactgttaattcagcagctcaagaagatcccaactctattattgcaggcatgccagtccttgaggtctggaaatcaaagcaggtgattgttatgaagaggtctttgggtgttggctatgctgcagtggacaatccaatcttctacaaacctaacacggccatgcttctaggtgatgccaagaaaacatgtgacgcgctccaggcgaaagttagagaatcctatcagaagtaaatattaaggatcaagctgttagctaataatgccacctctgcagttttgggaacaggcaaataaagtatcagtatacatggtgatgtacatctgtagcaaagctcttggagaaaatgaagactgaagaaagcaaagcaaaaactgtatagagagatttttcaaaagcagtaatccctcaattttaaaaaaggattgaaaattctaaatgtctttctgtgcatattttttgtgttaggaatcaaaagtattttataaaaggagaaagaacagcctcattttagatgtagtcctgttggattttttatgcctcctcagtaaccagaaatgttttaaaaaactaagtgtttaggatttcaagacaacattatacatggctctgaaatatctgacacaatgtaaacattgcaggcacctgcattttatgttttttttttcaacaaatgtgactaatttgaaacttttatgaacttctgagctgtccccttgcaattcaaccgcagtttgaattaatcatatcaaatcagttttaattttttaaattgtacttcagagtctatatttcaagggcacattttctcactactattttaatacattaaaggactaaataatctttcagagatgctggaaacaaatcatttgctttatatgtttcattagaataccaatgaaacatacaacttgaaaattagtaatagtatttttgaagatcccatttctaattggagatctctttaatttcgatcaacttataatgtgtagtactatattaagtgcacttgagtggaattcaacatttgactaataaaatgagttcatcatgttggcaagtgatgtggcaattatctctggtgacaaaagagtaaaatcaaatatttctgcctgttacaaatatcaaggaagacctgctactatgaaatagatgacattaatctgtcttcactgtttataatacggatggattttttttcaaatcagtgtgtgttttgaggtcttatgtaattgatgacatttgagagaaatggtggctttttttagctacctctttgttcatttaagcaccagtaaagatcatgtctttttatagaagtgtagattttctttgtgactttgctatcgtgcctaaagctctaaatataggtgaatgtgtgatgaatactcagattatttgtctctctatataattagtttggtactaagtttctcaaaaaattattaacacatgaaagacaatctctaaaccagaaaaagaagtagtacaaattttgttactgtaatgctcgcgtttagtgagtttaaaacacacagtatcttttggttttataatcagtttctattttgctgtgcctgagattaagatctgtgtatgtgtgtgtgtgtgtgtgtgcgtttgtgtgttaaagcagaaaagacttttttaaaagttttaagtgataaatgcaatttgttaattgatcttagatcactagtaaactcagggctgaattataccatgtatattctattagaagaaagtaaacaccatctttattcctgccctttttcttctctcaaagtagttgtagttatatctagaaagaagcaattttgatttcttgaaaaggtagttcctgcactcagtttaaactaaaaataatcatacttggattttatttatttttgtcatagtaaaaattttaatttatatatatttttatttagtattatcttattctttgctatttgccaatcctttgtcatcaattgtgttaaatgaattgaaaattcatgccctgttcattttattttactttattggttaggatatttaaaggatttttgtatatataatttcttaaattaatattccaaaaggttagtggacttagattataaattatggcaaaaatctaaaaacaacaaaaatgatttttatacattctatttcattattcctctttttccaataagtcatacaattggtagatatgacttattttatttttgtattattcactatatctttatgatatttaagtataaataattaaaaaaatttattgtaccttatagtctgtcaccaaaaaaaaaaaattatctgtaggtagtgaaatgctaatgttgatttgtctttaagggcttgttaactatcctttattttctcatttgtcttaaattaggagtttgtgtttaaattactcatctaagcaaaaaatgtatataaatcccattactgggtatatacccaaaggattataaatcatgctgctataaagacacatgcacacgtatgtttattgcagcactattcacaatagcaaagacttggaaccaacccaaatgtccatcaatgatagacttgattaagaaaatgtgcacatatacaccatggaatactatgcagccataaaaaaggatgagttcatgtcctttgtagggacatggataaagctggaaaccatcattctgagcaaactattgcaaggacagaaaaccaaacactgcatgttctcactcataggtgggaattgaacaatgagaacacttggacacaaggtggggaacaccacacaccagggcctgtcatggggtggggggagtggggagggatagcattaggagatatacctaatgtaaatgatgagttaatgggtgcagcacaccaacatggcacatgtatacatatgtagcaaacctgcacgttgtgcacatgtaccctagaacttaaagtataattaaaaaaaaaaagaaaacagaagctatttataaagaagttatttgctgaaataaatgtgatctttcccattaaaaaaataaagaaattttggggtaaaaaaacacaatatattgtattcttgaaaaattctaagagagtggatgtgaagtgttctcaccacaaaagtgataactaattgaggtaatgcacatattaattagaaagattttgtcattccacaatgtatatatacttaaaaatatgttatacacaataaatacatacattaaaaaataagtaaatgta

SEQ ID NO: 13972 - DNA, 4310 bp, Homo sapiens
  source 1..4310: mol_type = unassigned DNA
cgaggtgggagcggagctgcagtcacgtggccgcccgccgccgcggagttggggctgttcttccgggttggaggcgcagcgccgcggggcccaagcccgggtctgccagcgcgacgtcctctcgcggccctcagggcacagcccaaggctgtcagcctcccggcccagtgatttgccttcaaggaaactggggagtcagaaaattgggaactcatatcaacatggcaaacctattgaaaacagtggtgactggctgctcgtgtcctctacttagcaatttggggtcctgtaagggtctacgtgtgaagaaggattttttacgaacattttatactcaccaagaactgtggtgtaaagcgcctgtaaaaccaggaattccatataagcaactgactgttggagtccccaaagagatattccaaaatgagaagcgagtggcattgtctcctgctggtgttcagaacttggtcaagcagggttttaatgttgtcgtggaatcgggtgcgggcgaagcttccaagttctcagatgatcactatagagtggcaggtgcccaaatccaaggggcaaaggaagtgctggcttctgatttggtggtcaaagtgcgagcccctatggttaatccaacattaggtgttcatgaagctgaccttttaaagacatcaggaacgctgattagttttatttacccagcccaaaatccagagttgctaaataaactttcccaaagaaaaactacagttctggcaatggaccaggttccaagagtcacaattgctcagggatatgatgcgctaagctccatggccaacattgcgggttataaggctgttgtcctagcagcaaatcattttggacgtttttttactggtcagatcacagctgctggaaaagttcctccagctaagattctgatagttggtggtggtgttgctgggcttgcttctgcaggcgcagcaaagtcgatgggtgcaattgttcgaggatttgacacaagagctgcagctttggaacagttcaagtctcttggtgctgagcccttggaggtggacttgaaggaatctggtgagggacaaggaggatatgcaaaagagatgtccaaagagttcattgaagctgaaatgaaactctttgctcaacaatgcaaggaggtagacatccttatcagcacagcacttattccaggtaaaaaagctccagttttatttaataaagaaatgattgagtcaatgaaggaaggttcagttgttgtggatttagctgctgaggctggtggaaactttgaaaccactaagccaggagaactctacattcataagggaattactcacataggctacacagacctgcccagccgaatggccactcaggccagcaccctatattccaacaacatcaccaaactcctgaaggccatcagcccggacaaagataatttttattttgatgtgaaagatgactttgactttggtacgatgggtcatgtcattagaggaactgtagtgatgaaagatggtaaagtgattttcccagctcccacaccgaaaaatattcctcaaggtgccccagtaaaacagaagacagtggctgagctggaagctgaaaaagcagctaccattacacccttcaggaagacaatgtcaacggcttctgcatatacagcaggtctcacagggatactgggtttgggcattgcggctcccaatctagccttttctcagatggtgaccacttttggcttggctggcattgtggggtatcataccgtctggggagtgacccctgctctccactcaccactgatgtctgtgacaaatgcaatctcagggctgactgcagttggtgggttggcactgatgggaggacatttgtatccttccacaacttctcagggccttgctgctcttgctgcattcatatcctctgtcaacattgcaggtggctttctggtgactcagagaatgctggacatgttcaagcgtcccactgaccccccagaatacaactacctgtacctgctccctgccggcacctttgttggtggatatttagctgccctctacagtggttataacattgaacagatcatgtacctaggctcgggtttgtgctgtgtcggtgccttggctggcctctccacccagggaacagcacgtcttggcaatgcactgggcatgattggggttgctggaggactggcagccaccctcggagtcctaaaaccgggcccagaattactagctcagatgtctggagcgatggctttgggtggtaccattggattgacaattgccaaacgcatccagatttctgatttacctcaattagttgctgcttttcacagtttagtgggtttggcagctgtacttacttgcatagctgagtacattatagaatatccacattttgctacggatgcagcagcaaatctcaccaagattgtggcctacctcggcacttacattggtggcgtcacctttagtgggtctctcattgcctatggaaaattgcagggtctcctgaaatctgcccctctcctactgcctggaaggcacttactcaatgcaggcttactggctgctagtgtgggcgggataatcccattcatggtggacccaagctttactactggcatcacctgtctgggttcagtgtctgctctctctgctgtcatgggtgtgactttgacagctgctattgggggtgctgacatgcccgtcgttatcactgtgctgaacagctactcaggctgggccctgtgtgcagagggcttcctgctcaacaacaatctgctgaccatcgtgggtgcactcataggctcgtctggtgctatcctgtcatacatcatgtgtgtggcaatgaatcgctccctggctaatgtgattcttggaggctatggcaccacttcaacagctggtggaaaacccatggaaatttctggcacacatacggaaatcaaccttgacaatgcaattgacatgattcgagaagctaatagcattattattacaccaggctatggtctctgtgcagccaaagctcaataccccattgctgatttggtaaagatgctcactgagcaaggcaaaaaagtcaggtttggaattcacccagttgcaggccgaatgcctggtcagcttaatgtgctgctggctgaggctggtgtgccatatgacattgtgttggaaatggatgagatcaaccatgattttccagatactgatttggtccttgtaattggagctaatgacactgttaattcagcagctcaagaagatcccaactctattattgcaggcatgccagtccttgaggtctggaaatcaaagcaggtgattgttatgaagaggtctttgggtgttggctatgctgcagtggacaatccaatcttctacaaacctaacacggccatgcttctaggtgatgccaagaaaacatgtgacgcgctccaggcgaaagttagagaatcctatcagaagtaaatattaaggatcaagctgttagctaataatgccacctctgcagttttgggaacaggcaaataaagtatcagtatacatggtgatgtacatctgtagcaaagctcttggagaaaatgaagactgaagaaagcaaagcaaaaactgtatagagagatttttcaaaagcagtaatccctcaattttaaaaaaggattgaaaattctaaatgtctttctgtgcatattttttgtgttaggaatcaaaagtattttataaaaggagaaagaacagcctcattttagatgtagtcctgttggattttttatgcctcctcagtaaccagaaatgttttaaaaaactaagtgtttaggatttcaagacaacattatacatggctctgaaatatctgacacaatgtaaacattgcaggcacctgcattttatgttttttttttcaacaaatgtgactaatttgaaacttttatgaacttctgagctgtccccttgcaattcaaccgcagtttgaattaatcatatcaaatcagttttaattttttaaattgtacttcagagtctatatttcaagggcacattttctcactactattttaatacattaaaggactaaataatctttcagagatgctggaaacaaatcatttgctttatatgtttcattagaataccaatgaaacatacaacttgaaaattagtaatagtatttttgaagatcccatttctaattggagatctctttaatttcgatcaacttataatgtgtagtactatattaagtgcacttgagtggaattcaacatttgactaataaaatgagttcatcatgttggc

SEQ ID NO: 13973 - DNA, 4288 bp, Homo sapiens
  source 1..4288: mol_type = unassigned DNA
ggcgcagcgccgcggggcccaagcccgggtctgccagcgcgacgtcctctcgcggccctcagggcacagcccaaggctgtcagcctcccggcccaggaattccatataagcaactgactgttggagtccccaaagagatattccaaaatgagaagcgagtggcattgtctcctgctggtgttcagaacttggtcaagcagggttttaatgttgtcgtggaatcgggtgcgggcgaagcttccaagttctcagatgatcactatagagtggcaggtgcccaaatccaaggggcaaaggaagtgctggcttctgatttggtggtcaaagtgcgagcccctatggttaatccaacattaggtgttcatgaagctgaccttttaaagacatcaggaacgctgattagttttatttacccagcccaaaatccagagttgctaaataaactttcccaaagaaaaactacagttctggcaatggaccaggttccaagagtcacaattgctcagggatatgatgcgctaagctccatggccaacattgcgggttataaggctgttgtcctagcagcaaatcattttggacgtttttttactggtcagatcacagctgctggaaaagttcctccagctaagattctgatagttggtggtggtgttgctgggcttgcttctgcaggcgcagcaaagtcgatgggtgcaattgttcgaggatttgacacaagagctgcagctttggaacagttcaagtctcttggtgctgagcccttggaggtggacttgaaggaatctggtgagggacaaggaggatatgcaaaagagatgtccaaagagttcattgaagctgaaatgaaactctttgctcaacaatgcaaggaggtagacatccttatcagcacagcacttattccaggtaaaaaagctccagttttatttaataaagaaatgattgagtcaatgaaggaaggttcagttgttgtggatttagctgctgaggctggtggaaactttgaaaccactaagccaggagaactctacattcataagggaattactcacataggctacacagacctgcccagccgaatggccactcaggccagcaccctatattccaacaacatcaccaaactcctgaaggccatcagcccggacaaagataatttttattttgatgtgaaagatgactttgactttggtacgatgggtcatgtcattagaggaactgtagtgatgaaagatggtaaagtgattttcccagctcccacaccgaaaaatattcctcaaggtgccccagtaaaacagaagacagtggctgagctggaagctgaaaaagcagctaccattacacccttcaggaagacaatgtcaacggcttctgcatatacagcaggtctcacagggatactgggtttgggcattgcggctcccaatctagccttttctcagatggtgaccacttttggcttggctggcattgtggggtatcataccgtctggggagtgacccctgctctccactcaccactgatgtctgtgacaaatgcaatctcagggctgactgcagttggtgggttggcactgatgggaggacatttgtatccttccacaacttctcagggccttgctgctcttgctgcattcatatcctctgtcaacattgcaggtggctttctggtgactcagagaatgctggacatgttcaagcgtcccactgaccccccagaatacaactacctgtacctgctccctgccggcacctttgttggtggatatttagctgccctctacagtggttataacattgaacagatcatgtacctaggctcgggtttgtgctgtgtcggtgccttggctggcctctccacccagggaacagcacgtcttggcaatgcactgggcatgattggggttgctggaggactggcagccaccctcggagtcctaaaaccgggcccagaattactagctcagatgtctggagcgatggctttgggtggtaccattggattgacaattgccaaacgcatccagatttctgatttacctcaattagttgctgcttttcacagtttagtgggtttggcagctgtacttacttgcatagctgagtacattatagaatatccacattttgctacggatgcagcagcaaatctcaccaagattgtggcctacctcggcacttacattggtggcgtcacctttagtgggtctctcattgcctatggaaaattgcagggtctcctgaaatctgcccctctcctactgcctggaaggcacttactcaatgcaggcttactggctgctagtgtgggcgggataatcccattcatggtggacccaagctttactactggcatcacctgtctgggttcagtgtctgctctctctgctgtcatgggtgtgactttgacagctgctattgggggtgctgacatgcccgtcgttatcactgtgctgaacagctactcaggctgggccctgtgtgcagagggcttcctgctcaacaacaatctgctgaccatcgtgggtgcactcataggctcgtctggtgctatcctgtcatacatcatgtgtgtggcaatgaatcgctccctggctaatgtgattcttggaggctatggcaccacttcaacagctggtggaaaacccatggaaatttctggcacacatacggaaatcaaccttgacaatgcaattgacatgattcgagaagctaatagcattattattacaccaggctatggtctctgtgcagccaaagctcaataccccattgctgatttggtaaagatgctcactgagcaaggcaaaaaagtcaggtttggaattcacccagttgcaggccgaatgcctggtcagcttaatgtgctgctggctgaggctggtgtgccatatgacattgtgttggaaatggatgagatcaaccatgattttccagatactgatttggtccttgtaattggagctaatgacactgttaattcagcagctcaagaagatcccaactctattattgcaggcatgccagtccttgaggtctggaaatcaaagcaggtgattgttatgaagaggtctttgggtgttggctatgctgcagtggacaatccaatcttctacaaacctaacacggccatgcttctaggtgatgccaagaaaacatgtgacgcgctccaggcgaaagttagagaatcctatcagaagtaaatattaaggatcaagctgttagctaataatgccacctctgcagttttgggaacaggcaaataaagtatcagtatacatggtgatgtacatctgtagcaaagctcttggagaaaatgaagactgaagaaagcaaagcaaaaactgtatagagagatttttcaaaagcagtaatccctcaattttaaaaaaggattgaaaattctaaatgtctttctgtgcatattttttgtgttaggaatcaaaagtattttataaaaggagaaagaacagcctcattttagatgtagtcctgttggattttttatgcctcctcagtaaccagaaatgttttaaaaaactaagtgtttaggatttcaagacaacattatacatggctctgaaatatctgacacaatgtaaacattgcaggcacctgcattttatgttttttttttcaacaaatgtgactaatttgaaacttttatgaacttctgagctgtccccttgcaattcaaccgcagtttgaattaatcatatcaaatcagttttaattttttaaattgtacttcagagtctatatttcaagggcacattttctcactactattttaatacattaaaggactaaataatctttcagagatgctggaaacaaatcatttgctttatatgtttcattagaataccaatgaaacatacaacttgaaaattagtaatagtatttttgaagatcccatttctaattggagatctctttaatttcgatcaacttataatgtgtagtactatattaagtgcacttgagtggaattcaacatttgactaataaaatgagttcatcatgttggcaagtgatgtggcaattatctctggtgacaaaagagtaaaatcaaatatttctgcctgttacaaatatcaaggaagacctgctactatgaaatagatgacattaatctgtcttcactgtttataatacggatggattttttttcaaatcagtgtgtgttttgaggtcttatgtaattgatgacatttgagagaaatggtggctttttttagctacctctttgttcatttaagcaccagtaaagatcatgtctttt

SEQ ID NO: 13974 - DNA, 747 bp, Homo sapiens
  source 1..747: mol_type = unassigned DNA
aaatccaaggggcaaaggaagtgctggcttctgatttggtggtcaaagtaattattcctttttcctctcccatttacagcatgctgactttttgaaatcttttcatagaaaaattaaattactttatctggagttacaccttttcctattttcaaacagtgtatttttctcaaagaaatgactgcatgtcgtcatattcttcatgctccagtaaaacttttatcagacaatatgatctatgtttaaccatgaggagagaaaaagtgatcttcatttttacatttgctatatggacattttcttttaattggctaggaaaaatttgttctacatggtccatatatatccagagtacccacacgtgaacatttactgctagaatggaaagaaggtatggaacttagtctgggactaaatgttcagtgatcttctgacacctgaaggcgcaatgacttacactgacatacgtgctatttctagagagggcatgactattttggagaaagcagctttgggctgagtggcgagtagctttacctactctaaaataagttcttaaggtgcgagcccctatggttaatccaacattaggtgttcatgaagctgaccttttaaagacatcaggaacgctgattagttttatttacccagcccaaaatccagagttgctaaataaactttcccaaagaaaaactacagttctggcaatggaccaggttccaagagtcacaattgctcagggatatg

SEQ ID NO: 13975 - DNA, 367 bp, Homo sapiens
  source 1..367: mol_type = unassigned DNA
agatgactttgactttggtacgatgggtcatgtcattagaggaactgtagtgatgaaagatggtaaagtgattttcccagctcccacaccgaaaaatattcctcaaggtgccccagtaaaacagaagacagtggctgagctggaagctgaaaaagcagctaccattacacccttcaggaagacaatgtcaacggcttctgcatatacagcaggtgaggataccatttaccagggtttagtcttgattgtttgattttgcaagttatatatatatatatctatagatatatgtgtagctatatatacgtatatatagatatatatacacatatatatctacacatctatctatctatctctctctctc

SEQ ID NO: 13976 - DNA, 682 bp, Homo sapiens
  source 1..682: mol_type = unassigned DNA
gatggtaaagtgattttcccagctcccacaccgaaaaatattcctcaaggtgccccagtaaaacagaagacagtggctgagctggaagctgaaaaagcagctaccattacacccttcaggaagacaatgtcaacggcttctgcatatacagcagatgaagacagagagggttgataattttacctatgaagacactgaagcacagagaggttaagtaacttgcctgagatgacacagctagggagcagcagaaccaggattcaaaccagactgacttaagaaaacatattcttattcacaaccctatgcaacttctctaatttttaactggaagacaaaatagtgttgtatctaactctctcaccagatggttaatgggctatgcactggaactttggatacatgatatgtgggtaggaaaataaattaaaactacagtcatattgaatgatttaatgtaaaattaatgtcaatccctagatattccagtggtgccacttccaaagtaatagtttacatcaaggaaaaaggtaccttattcaggaaagttaacttctagttccctggtcacccactgtcattttctttttactgaccactaggtaacactttcttctgttgcagaacaactgtccacatgtttgctatcaaggaaggcgataattaaagatgtatgttcaga

SEQ ID NO: 13977 - DNA, 664 bp, Homo sapiens
  source 1..664: mol_type = unassigned DNA
ccactgaccccccagaatacaactacctgtacctgctccctgccggcacctttgttggtggatatttagctgccctctacagtggttataacattgaacagatcatgtacctaggctcgggtttgtgctgtgtcggtgccttggctggcctctccacccagggaacagcacgtcttggcaatgcactgggcatgattggggttgctggaggactggcagccaccctcggagtcctaaaaccgggcccagaattactagctcagatgtctggagcgatggctttgggtggtaccattggtaagcacttgtgggcttctgccttcatgtgaactccagtttctcaatatatatttctaaggtccatattgatgaaataattaaattttgttcatggaagttgcttcagttaatattattttggtgaaaattcattccagttggtgtaattctcattcaaatacattttagaacactgaataaatgcatcaactgagtcaaaatatcctatactcaattcttatcttcctttactgactgtgtcccgttagctgataatggaatgggggattggaatccttatgtatgtactatacataagctaacttttgttctgctgggtataaataacagccaaagattctgcttcatagacctgttaaaaatg

SEQ ID NO: 13978 - DNA, 634 bp, Homo sapiens
  source 1..634: mol_type = unassigned DNA
tgctcactgagcaaggcaaaaaagtcagatactgatttggtccttgtaattggagctaatgacactgttaattcagcagctcaagaagatcccaactctattattgcaggcatgccagtccttgaggtctggaaatcaaagcaggtgattgttatgaagaggtctttgggtgttggctatgctgcagtggacaatccaatcttctacaaacctaacacggccatgcttctaggtgatgccaagaaaacatgtgacgcgctccaggcgaaagttagagaatcctatcagaagtaaatattaaggatcaagctgttagctaataatgccacctctgcagttttgggaacaggcaaataaagtatcagtatacatggtgatgtacatctgtagcaaagctcttggagaaaatgaagactgaagaaagcaaagcaaaaactgtatagagagatttttcaaaagcagtaatccctcaattttaaaaaaggattgaaaattctaaatgtctttctgtgcatattttttgtgttaggaatcaaaagtattttataaaaggagaaagaacagcctcattttagatgtagtcctgttggattttttatgcctcctcagtaaccagaaatgttttaaaaaacta

SEQ ID NO: 13979 - DNA, 579 bp, Homo sapiens
  source 1..579: mol_type = unassigned DNA
gcttctgggtcgcgctcagctctgcaatgcatgcgttctgtgatcctgccccgacaatgggcaacgcgcaggagcggccgtcagagactatcgaccgcgagcggaaacgcctggtcgagacgctgcaggcggactcgggactgctgttggacgcgctgctggcgcggggcgtgctcaccgggccagagtacgaggcattggatgcactgcctgatgccgagcgcagggtgcgccgcctactgctgctggtgcagggcaagggcgaggccgcctgccaggagctgctacgctgtgcccagcgtaccgcgggcgcgccggaccccgcttgggactggcagcacgtgggtccgggctaccgggaccgcagctatgaccctccatgcccaggccactggacgccggaggcacccggctcggggaccacatgccccgggttgcccagagcttcagaccctgacgaggccgggggccctgagggctccgaggcggtgcaatccgggaccccggaggagccagagccagagctggaagctgaggcctctaaagaggctgaaccggagccggagccagagccagagc

SEQ ID NO: 13980 - DNA, 642 bp, Homo sapiens
  source 1..642: mol_type = unassigned DNA
gccgcagctgctgcacccacccccaccctgcccggccctttctgcaccgtcatctcctgccccgccgaggcttgacccgtgctgtccccctctcccttcctttgcccaccgattggagggacactctggaaaactcagttgaagaaagcggagagtctgcgtgtacacagtgcaatgatgtcctgtgcttgcggagccgtccggcggctgggatcgagccccgacaatgggcaacgcgcaggagcggccgtcagagactatcgaccgcgagcggaaacgcctggtcgagacgctgcaggcggactcgggactgctgttggacgcgctgctggcgcggggcgtgctcaccgggccagagtacgaggcattggatgcactgcctgatgccgagcgcagggtgcgccgcctactgctgctggtgcagggcaagggcgaggccgcctgccaggagctgctacgctgtgcccagcgtaccgcgggcgcgccggaccccgcttgggactggcagcacgtgggtccgggctaccgggaccgcagctatgaccctccatgcccaggccactggacgccggaggcacccggctcggggaccacatgccccgggttgcccagagcttcagaccctgacgaggccgggggccc

SEQ ID NO: 13981 - DNA, 578 bp, Homo sapiens
  source 1..578: mol_type = unassigned DNA
agctgctgcacccacccccaccctgcccggccctttctgcaccgtcatctcctgccccgccgaggcttgacccgtgctgtccccctctcccttcctttgcccaccgattggagggacactctggaaaactcagttgaagaaagcggagagtctgcgtgtacacagtgcaatgatgtcagttaatgcactagtgagggcatgtgttgttcacggtacacagaagaaggaaccaccagcccttgggacacttaggcattggtgtagacaagggaacatttgagtcctggacgatggataggtccacggagcggagggaggagaaaaggattccagtcttagcgatcagcatcagcaaaggctccgaggtgccagaggcatagtgagttctccgatccctggctggtggagggaagctgggaagggcctggctgtccagggtggtgggaggaggctagagtagccagaccagatattttgggttgtctctgatgggcagtggggtgtgggggggaggtagataggtatttaggatggaattctgctagacaggaaaatatagttcagttcctcatagttca

SEQ ID NO: 13982 - DNA, 677 bp, Homo sapiens
  source 1..677: mol_type = unassigned DNA
tgcccggccctttctgcaccgtcatctcctgccccgccgaggcttgacccccccgacaatgggcaacgcgcaggagcggccgtcagagactatcgaccgcgagcggaaacgcctggtcgagacgctgcaggcggactcgggactgctgttggacgcgctgctggcgcggggcgtgctcaccgggccagagtacgaggcattggatgcactgcctgatgccgagcgcagggtgcgccgcctactgctgctggtgcagggcaagggcgaggccgcctgccaggagctgctacgctgtgcccagcgtaccgcgggcgcgccggaccccgcttgggactggcagcacgtgggtccgggctaccgggaccgcagctatgaccctccatgcccaggccactggacgccggaggcacccggctcggggaccacatgccccgggttgcccagagcttcagaccctgacgaggccgggggccctgagggctccgaggcggtgcaatccgggaccccggaggagccagagccagagctggaagctgaggcctctaaagaggctgaaccggagccggagccagagccagagctggaacccgaggctgaagcagaaccagagccggaactggagccagaaccggacccagagcccgagcccgacttcgaggaaagggacgagtccgaag

SEQ ID NO: 13983 - DNA, 1592 bp, Homo sapiens
  source 1..1592: mol_type = unassigned DNA
gcaccgtcatctcctgccccgccgaggcttgacccgtgctgtccccctctcccttcctttgcccaccgattggagggacactctggaaaactcagttgaagaaagcggagagtctgcgtgtacacagtgcaatgatgtcagttaatgcactagtgagggcatgtgttgttcacggtacacagaagaaggaaccaccagcccttgggacacttaggcattggtgtagacaagggaacatttgagtcctggacgatggataggtccacggagcggagggaggagaaaaggattccagtcttagcgatcagcatcagcaaaggctccgaggtgccagaggcataagagtagatgccagtcctgggaaaggcaggggaggagaggagagccacggctgacgcttggggacagaaggaggagcctgaggaggagacaggacagagcgtctggagaggcaggaggacaccgagttccccgtgttggcctccaggtcctgtgcttgcggagccgtccggcggctgggatcgagccccgacaatgggcaacgcgcaggagcggccgtcagagactatcgaccgcgagcggaaacgcctggtcgagacgctgcaggcggactcgggactgctgttggacgcgctgctggcgcggggcgtgctcaccgggccagagtacgaggcattggatgcactgcctgatgccgagcgcagggtgcgccgcctactgctgctggtgcagggcaagggcgaggccgcctgccaggagctgctacgctgtgcccagcgtaccgcgggcgcgccggaccccgcttgggactggcagcacgtgggtccgggctaccgggaccgcagctatgaccctccatgcccaggccactggacgccggaggcacccggctcggggaccacatgccccgggttgcccagagcttcagaccctgacgaggccgggggccctgagggctccgaggcggtgcaatccgggaccccggaggagccagagccagagctggaagctgaggcctctaaagaggctgaaccggagccggagccagagccagagctggaacccgaggctgaagcagaaccagagccggaactggagccagaaccggacccagagcccgagcccgacttcgaggaaagggacgagtccgaagattcctgaaggccagagctctgacaggcggtgccccgcccatgctggataggacctgggatgctgctggagctgaatcggatgccaccaaggctcggtccagcccagtaccgctggaagtgaataaactccggagggtcggacgggacctgggctctctccacgattctggctgtttgcccaggaacttagggtgggtacctctgagtcccagggacctgggcaggcccaagcccaccacgagcatcatccagtcctcagccctaatctgcccttaggagtccaggctgcaccctggagatcccaaacctagccccctagtgggacaaggacctgaccctcctgcccgcatacacaacccatttcccctggtgagccacttggcagcatatgtaggtaccagctcaaccccacgcaagttcctgagctgaacatggagc

SEQ ID NO: 13984 - DNA, 519 bp, Homo sapiens
  source 1..519: mol_type = unassigned DNA
accgtcatctcctgccccgccgaggcttgacccgtgctgtccccctctcccttcctttgcccaccgattggagggacactctggaaaactcagttgaagaaagcggagagtctgcgtgtacacagtgcaatgatgtcagttaatgcactagtgagggcatgtgttgttcacggtacacagaagaaggaaccaccagcccttgggacacttaggcattggtgtagacaagggaacatttgagtcctggacgatggataggtccacggagcggagggaggagaaaaggattccagtcttagcgatcagcatcagcaaaggctccgaggtgccagaggcatagtggggaagcagatttgagagaaagaccttagtttggataaacggggtctgaactcgcctcggatttgccgggggtggagctcaggacgtcctggttggggagggcattcagagagtagatgccagtcctgggaaaggcaggggaggagaggagagccacggctgacgcttggggacaga

SEQ ID NO: 13985 - DNA, 613 bp, Homo sapiens
  source 1..613: mol_type = unassigned DNA
atagttcagttcctcatagttcaggctggagcaagtaagattccagttttaccactgaatctctgagcctgtctcctcatctgtaaaatgggaacagcaatcctagcccagagggttgtcaaagtcactgtgctatcgggcctggcagaatgggagtgagaggggctcagagggactgttacaggacatgaggtgacgatggtggggtggcaaggcaggagctgatggagactcactgagaagtggagaagcaagattcatcacatacgggacataaagggagatggaggggcagggggtagtcctggtctcggcctggtggggaagggcttcaatgggaggaagccagggtgtgaagtgacgggggaggattgcttgaggccagcagttcgagaccagcctgatcaatatagcaagaccaggacaggcgcggtggctcacgcctgtaatcccagcactttgggaggccaaggcaggtggatcacgaggtcaggagttcaagaccagcctggccaacatagtgaaaccccgtctccactaaaataaataaatacaaaaaatatatatagcaagaccccacctctaaaaaaaaaaaaaaaaaaaaaggctgggc

SEQ ID NO: 13986 - DNA, 752 bp, Homo sapiens
  source 1..752: mol_type = unassigned DNA
caggacagagcgtctggagaggcaggaggacaccgagttccccgtgttggcctccaggtcctgtgcttgcggagccgtccggcggctgggatcgagccccgacaatgggcaacgcgcaggagcggccgtcagagactatcgaccgcgagcggaaacgcctggtcgagacgctgcaggcggactcgggactgctgttggacgcgctgctggcgcggggcgtgctcaccgggccagagtacgaggcattggatgcactgcctgatgccgagcgcagggctaccgggaccgcagctatgaccctccatgcccaggccactggacgccggaggcacccggctcggggaccacatgccccgggttgcccagagcttcagaccctgacgaggccgggggccctgagggctccgaggcggtgcaatccgggaccccggaggagccagagccagagctggaagctgaggcctctaaagaggctgaaccggagccggagccagagccagagctggaacccgaggctgaagcagaaccagagccggaactggagccagaaccggacccagagcccgagcccgacttcgaggaaagggacgagtccgaagattcctgaaggccagagctctgacaggcggtgccccgcccatgctggataggacctgggatgctgctggagctgaatcggatgccaccaaggctcggtccagcccagtaccgctggaagtgaataaactccggagggtcggacgggacctggg

SEQ ID NO: 13987 - DNA, 1511 bp, Homo sapiens
  source 1..1511: mol_type = unassigned DNA
gacagagcgtctggagaggcaggaggacaccgagttccccgtgttggcctccaggtcctgtgcttgcggagccgtccggcggctgggatcgagccccgacaatgggcaacgcgcaggagcggccgtcagagactatcgaccgcgagcggaaacgcctggtcgagacgctgcaggcggactcgggactgctgttggacgcgctgctggcgcggggcgtgctcaccgggccagagtacgaggcattggatgcactgcctgatgccgagcgcagggtgcgccgcctactgctgctggtgcagggcaagggcgaggccgcctgccaggagctgctacgctgtgcccagcgtaccgcgggcgcgccggaccccgcttgggactggcagcacgtgggtccgggtgagcgcgcggggcggggcctagggcagagcagggacggggctggggcagacaaaaggcccggggagggcagggttgtcgtctccgctagaagtaggcgagtgtgaaaccgcacaggggtaaattgagcctcagtcactcccacttccgccccaggctaccgggaccgcagctatgaccctccatgcccaggccactggacgccggaggcacccggctcggggaccacatgccccgggttgcccagagcttcagaccctgacgaggccgggggccctgagggctccgaggcggtgcaatccgggaccccggaggagccagagccagagctggaagctgaggcctctaaagaggctgaaccggagccggagccagagccagagctggaacccgaggctgaagcagaaccagagccggaactggagccagaaccggacccagagcccgagcccgacttcgaggaaagggacgagtccgaagattcctgaaggccagagctctgacaggcggtgccccgcccatgctggataggacctgggatgctgctggagctgaatcggatgccaccaaggctcggtccagcccagtaccgctggaagtgaataaactccggagggtcggacgggacctgggctctctccacgattctggctgtttgcccaggaacttagggtgggtacctctgagtcccagggacctgggcaggcccaagcccaccacgagcatcatccagtcctcagccctaatctgcccttaggagtccaggctgcaccctggagatcccaaacctagccccctagtgggacaaggacctgaccctcctgcccgcatacacaacccatttcccctggtgagccacttggcagcatatgtaggtaccagctcaaccccacgcaagttcctgagctgaacatggagcaaggggagggtgacttctctccacatagggagggcttagagctcacagccttgggaagtgagactagaagaggggagcagaaagggaccttgagtagacaaaggccacacacatcattgtcattactgttttaattgtctggcttctctctggactgggagctcagtgaggattctgaccagtgacttacacaaaa

SEQ ID NO: 13988 - DNA, 794 bp, Homo sapiens
  source 1..794: mol_type = unassigned DNA
cgagttccccgtgttggcctccaggtcctgtgcttgcggagccgtccggcggctgggatcgaggctaccgggaccgcagctatgaccctccatgcccaggccactggacgccggaggcacccggctcggggaccacatgccccgggttgcccagagcttcagaccctgacgaggccgggggccctgagggctccgaggcggtgcaatccgggaccccggaggagccagagccagagctggaagctgaggcctctaaagaggctgaaccggagccggagccagagccagagctggaacccgaggctgaagcagaaccagagccggaactggagccagaaccggacccagagcccgagcccgacttcgaggaaagggacgagtccgaagattcctgaaggccagagctctgacaggcggtgccccgcccatgctggataggacctgggatgctgctggagctgaatcggatgccaccaaggctcggtccagcccagtaccgctggaagtgaataaactccggagggtcggacgggacctgggctctctccacgattctggctgtttgcccaggaacttagggtgggtacctctgagtcccagggacctgggcaggcccaagcccaccacgagcatcatccagtcctcagccctaatctgcccttaggagtccaggctgcaccctggagatcccaaacctagccccctagtgggacaaggacctgaccctcctgcccgcatacacaacccatttcccctggtgagccacttggcagcatatgtaggtaccagctcaa

SEQ ID NO: 13989 - DNA, 1351 bp, Homo sapiens
  source 1..1351: mol_type = unassigned DNA
ctccaggtcctgtgcttgcggagccgtccggcggctgggatcgagccccgacaatgggcaacgcgcaggagcggccgtcagagactatcgaccgcgagcggaaacgcctggtcgagacgctgcaggcggactcgggactgctgttggacgcgctgctggcgcggggcgtgctcaccgggccagagtacgaggcattggatgcactgcctgatgccgagcgcagggtgcgccgcctactgctgctggtgcagggcaagggcgaggccgcctgccaggagctgctacgctgtgcccagcgtaccgcgggcgcgccggaccccgcttgggactggcagcacgctaccgggaccgcagctatgaccctccatgcccaggccactggacgccggaggcacccggctcggggaccacatgccccgggttgcccagagcttcagaccctgacgaggccgggggccctgagggctccgaggcggtgcaatccgggaccccggaggagccagagccagagctggaagctgaggcctctaaagaggctgaaccggagccggagccagagccagagctggaacccgaggctgaagcagaaccagagccggaactggagccagaaccggacccagagcccgagcccgacttcgaggaaagggacgagtccgaagattcctgaaggccagagctctgacaggcggtgccccgcccatgctggataggacctgggatgctgctggagctgaatcggatgccaccaaggctcggtccagcccagtaccgctggaagtgaataaactccggagggtcggacgggacctgggctctctccacgattctggctgtttgcccaggaacttagggtgggtacctctgagtcccagggacctgggcaggcccaagcccaccacgagcatcatccagtcctcagccctaatctgcccttaggagtccaggctgcaccctggagatcccaaacctagccccctagtgggacaaggacctgaccctcctgcccgcatacacaacccatttcccctggtgagccacttggcagcatatgtaggtaccagctcaaccccacgcaagttcctgagctgaacatggagcaaggggagggtgacttctctccacatagggagggcttagagctcacagccttgggaagtgagactagaagaggggagcagaaagggaccttgagtagacaaaggccacacacatcattgtcattactgttttaattgtctggcttctctctggactgggagctcagtgaggattctgaccagtgacttacacaaaaggcgctctatacatattataatatattcgcttactaaatgaataaggactttcc

SEQ ID NO: 13990 - DNA, 317 bp, Homo sapiens
  source 1..317: mol_type = unassigned DNA
agagctggaacccgaggctgaagcagaaccagagccggaactggagccagaaccggacccagagcccgagcccgacttcgaggaaagggacgagtccgaaggtattcctgaaggccagagctctgacaggcggtgccccgcccatgctggataggacctgggatgctgctggagctgaatcggatgccaccaaggctcggtccagcccagtaccgctggaagtgaataaactccggagggtcggacgggacctgggctctctccacgattctggctgtttgcccaggaacttagggtgggtacctctgagtcccagg

SEQ ID NO: 13991 - DNA, 1394 bp, Homo sapiens
  source 1..1394: mol_type = unassigned DNA
gccgcagctgctgcacccacccccaccctgcccggccctttctgcaccgtcatctcctgccccgccgaggcttgacccccccgacaatgggcaacgcgcaggagcggccgtcagagactatcgaccgcgagcggaaacgcctggtcgagacgctgcaggcggactcgggactgctgttggacgcgctgctggcgcggggcgtgctcaccgggccagagtacgaggcattggatgcactgcctgatgccgagcgcagggtgcgccgcctactgctgctggtgcagggcaagggcgaggccgcctgccaggagctgctacgctgtgcccagcgtaccgcgggcgcgccggaccccgcttgggactggcagcacgtgggtccgggctaccgggaccgcagctatgaccctccatgcccaggccactggacgccggaggcacccggctcggggaccacatgccccgggttgcccagagcttcagaccctgacgaggccgggggccctgagggctccgaggcggtgcaatccgggaccccggaggagccagagccagagctggaagctgaggcctctaaagaggctgaaccggagccggagccagagccagagctggaacccgaggctgaagcagaaccagagccggaactggagccagaaccggacccagagcccgagcccgacttcgaggaaagggacgagtccgaagattcctgaaggccagagctctgacaggcggtgccccgcccatgctggataggacctgggatgctgctggagctgaatcggatgccaccaaggctcggtccagcccagtaccgctggaagtgaataaactccggagggtcggacgggacctgggctctctccacgattctggctgtttgcccaggaacttagggtgggtacctctgagtcccagggacctgggcaggcccaagcccaccacgagcatcatccagtcctcagccctaatctgcccttaggagtccaggctgcaccctggagatcccaaacctagccccctagtgggacaaggacctgaccctcctgcccgcatacacaacccatttcccctggtgagccacttggcagcatatgtaggtaccagctcaaccccacgcaagttcctgagctgaacatggagcaaggggagggtgacttctctccacatagggagggcttagagctcacagccttgggaagtgagactagaagaggggagcagaaagggaccttgagtagacaaaggccacacacatcattgtcattactgttttaattgtctggcttctctctggactgggagctcagtgaggattctgaccagtgacttacacaaaaggcgctctatacatattataatatattcgcttactaaatgaataaggactttcc

SEQ ID NO: 13992 - DNA, 12158 bp, Homo sapiens
  source 1..12158: mol_type = unassigned DNA
agagcggctcttttaatgagggttgcgacgtctccctccccacacccataaaccagtcgggttggacgtcactgctaattcgtttcagtgatgataggataaaggagggacattaagaaataaattccccctcacgaccctcgctgagctcacggctcagtccctacatatttatgccgcgtttccagccgctgggtgaggagctacttagcgccgcggctcctccgaggggcggccgggcagcgagcagcggccgagcggacgggctcatgatgcctcagatctgatccgcatctaacaggctggcaatgaagatacccagagaatagttcacatctatcatgcgtcacttctagacacagccatcagacgcatctcctcccctttctgcctgaccttagggacacgtcccaccgcctctcttgacgtctgcctggtcaaccatcacttccttagagaataaggagagaggcggatgcaggaaatcatgccaccgacgggccaccagccatgagtgggtgacgctgagctgacgtcaaagacagagagggctgaagccttgtcagcacctgtcaccccggctcctgctctccgtgtagcctgaagcctggatcctcctggtgaaatcatcttggcctgatagcattgtgaggtcttcagacaggacccctcggaagctagttaccatggaggatcacatgttcggtgttcagcaaatccagcccaatgtcatttctgttcgtctcttcaagcgcaaagttgggggcctgggatttctggtgaaggagcgggtcagtaagccgcccgtgatcatctctgacctgattcgtgggggcgccgcagagcagagtggcctcatccaggccggagacatcattcttgcggtcaacggccggcccttggtggacctgagctatgacagcgccctggaggtactcagaggcattgcctctgagacccacgtggtcctcattctgaggggccctgaaggtttcaccacgcacctggagaccacctttacaggtgatgggacccccaagaccatccgggtgacacagcccctgggtccccccaccaaagccgtggatctgtcccaccagccaccggccggcaaagaacagcccctggcagtggatggggcctcgggtcccgggaatgggcctcagcatgcctacgatgatgggcaggaggctggctcactcccccatgccaacggcctggcccccaggcccccaggccaggaccccgcgaagaaagcaaccagagtcagcctccaaggcagaggggagaacaatgaactgctcaaggagatagagcctgtgctgagccttctcaccagtgggagcagaggggtcaagggaggggcacctgccaaggcagagatgaaagatatgggaatccaggtggacagagatttggacggcaagtcacacaaacctctgcccctcggcgtggagaacgaccgagtcttcaatgacctatgggggaagggcaatgtgcctgtcgtcctcaacaacccatattcagagaaggagcagccccccacctcaggaaaacagtcccccacaaagaatggcagcccctccaagtgtccacgcttcctcaaggtcaagaactgggagactgaggtggttctcactgacaccctccaccttaagagcacattggaaacgggatgcactgagtacatctgcatgggctccatcatgcatccttctcagcatgcaaggaggcctgaagacgtccgcacaaaaggacagctcttccctctcgccaaagagtttattgatcaatactattcatcaattaaaagatttggctccaaagcccacatggaaaggctggaagaggtgaacaaagagatcgacaccactagcacttaccagctcaaggacacagagctcatctatggggccaagcacgcctggcggaatgcctcgcgctgtgtgggcaggatccagtggtccaagctgcaggtattcgatgcccgtgactgcaccacggcccacgggatgttcaactacatctgtaaccatgtcaagtatgccaccaacaaagggaacctcaggtctgccatcaccatattcccccagaggacagacggcaagcacgacttccgagtctggaactcccagctcatccgctacgctggctacaagcagcctgacggctccaccctgggggacccagccaatgtgcagttcacagagatatgcatacagcagggctggaaaccgcctagaggccgcttcgatgtcctgccgctcctgcttcaggccaacggcaatgaccctgagctcttccagattcctccagagctggtgttggaagttcccatcaggcaccccaagtttgagtggttcaaggacctggggctgaagtggtacggcctccccgccgtgtccaacatgctcctagagattggcggcctggagttcagcgcctgtcccttcagtggctggtacatgggcacagagattggtgtccgcgactactgtgacaactcccgctacaatatcctggaggaagtggccaagaagatgaacttagacatgaggaagacgtcctccctgtggaaggaccaggcgctggtggagatcaatatcgcggttctctatagcttccagagtgacaaagtgaccattgttgaccatcactccgccaccgagtccttcattaagcacatggagaatgagtaccgctgccgggggggctgccctgccgactgggtgtggatcgtgccccccatgtccggaagcatcacccctgtgttccaccaggagatgctcaactaccggctcaccccctccttcgaataccagcctgatccctggaacacgcatgtctggaaaggcaccaacgggacccccacaaagcggcgagccattggcttcaagaagctagcagaagctgtcaagttctcggccaagctgatggggcaggctatggccaagagggtgaaagcgaccatcctctatgccacagagacaggcaaatcgcaagcttatgccaagaccttgtgtgagatcttcaaacacgcctttgatgccaaggtgatgtccatggaagaatatgacattgtgcacctggaacatgaaactctggtccttgtggtcaccagcacctttggcaatggagatccccctgagaatggggagaaattcggctgtgctttgatggaaatgaggcaccccaactctgtgcaggaagaaaggaagagctacaaggtccgattcaacagcgtctcctcctactctgactcccaaaaatcatcaggcgatgggcccgacctcagagacaactttgagagtgctggacccctggccaatgtgaggttctcagtttttggcctcggctcacgagcataccctcacttttgcgccttcggacacgctgtggacaccctcctggaagaactgggaggggagaggatcctgaagatgagggaaggggatgagctctgtgggcaggaagaggctttcaggacctgggccaagaaggtcttcaaggcagcctgtgatgtcttctgtgtgggagatgatgtcaacattgaaaaggccaacaattccctcatcagcaatgatcgcagctggaagagaaacaagttccgcctcacctttgtggccgaagctccagaactcacacaaggtctatccaatgtccacaaaaagcgagtctcagctgcccggctccttagccgtcaaaacctccagagccctaaatccagtcggtcaactatcttcgtgcgtctccacaccaacgggagccaggagctgcagtaccagcctggggaccacctgggtgtcttccctggcaaccacgaggacctcgtgaatgccctgatcgagcggctggaggacgcgccgcctgtcaaccagatggtgaaagtggaactgctggaggagcggaacacggctttaggtgtcatcagtaactggacagacgagctccgcctcccgccctgcaccatcttccaggccttcaagtactacctggacatcaccacgccaccaacgcctctgcagctgcagcagtttgcctccctagctaccagcgagaaggagaagcagcgtctgctggtcctcagcaagggtttgcaggagtacgaggaatggaaatggggcaagaaccccaccatcgtggaggtgctggaggagttcccatctatccagatgccggccaccctgctcctgacccagctgtccctgctgcagccccgctactattccatcagctcctccccagacatgtaccctgatgaagtgcacctcactgtggccatcgtttcctaccgcactcgagatggagaaggaccaattcaccacggcgtatgctcctcctggctcaaccggatacaggctgacgaactggtcccctgtttcgtgagaggagcacccagcttccacctgccccggaacccccaagtcccctgcatcctcgttggaccaggcaccggcattgcccctttccgaagcttctggcaacagcggcaatttgatatccaacacaaaggaatgaacccctgccccatggtcctggtcttcgggtgccggcaatccaagatagatcatatctacagggaagagaccctgcaggccaagaacaagggggtcttcagagagctgtacacggcttactcccgggagccagacaaaccaaagaagtacgtgcaggacatcctgcaggagcagctggcggagtctgtgtaccgagccctgaaggagcaagggggccacatatacgtctgtggggacgtcaccatggctgctgatgtcctcaaagccatccagcgcatcatgacccagcaggggaagctctcggcagaggacgccggcgtattcatcagccggatgagggatgacaaccgataccatgaggatatttttggagtcaccctgcgaacgtacgaagtgaccaaccgccttagatctgagtccattgccttcattgaagagagcaaaaaagacaccgatgaggttttcagctcctaactggaccctcttgcccagccggctgcaagttttgtaagcgcggacagacactgctgaacctttcctctgggaccccctgtggccctcgctctgcctcctgtccttgtcgctgtgccctggtttccctcctcgggcttctcgcccctcagtggtttcctcggccctcctgggtttactccttgagttttcctgctgcgatgcaatgcttttctaatctgcagtggctcttacaaaactctgttcccactccctctcttgccgacaagggcaactcacgggtgcatgaaaccactggaacatggccgtcgctgtgggggtttttttctctggggttcccctggaaaggctgcaggaactaggcacaagctctctgagccagtccctcagccactgaagtccccctttctccttttttatgatgacattttggttgtgcgtgcctgtgtgtgtgtgtgtgtgtgtgtgtgtgtgtgtgatgggccaggtctctgtccgtcctcttccctgcacaagtgtgtcgatcttagattgccactgctttcattgaagaccctcaatgccaagaaacgtgtccctggcccatattaatccctcgtgtgtccataattagggtccacgcccatgtacctgaaacatttggaagccccataattgttctagttagaaagggttcagggcatggggagaggagtgggaaattgattaaaggggctgtctcccaatgaaagaggcattcccagaatttgctgcatttagattttgataccagtgagcagagccctcatgtgacatgaacccatccaatggattgtgcaaatcccctccccaaacccacccataccagctagaatcacttgactttgccacatccattgactgaccccctcctccagcaatagcatccaaggggcctggaagttatgttgttcaaagaagcctggtggcaataaggatcttcccactttgccactggatgactttggatgggtcacttgtcctcagtttttcctagtcataatgtcatacgaacctaaagaatatgaatggattaaatgttaaagctttggtgcctggaaacaatatcaagtaacaatatgattattatttttttattcccccaaagcgggcttgctgcttcacccttggggatgaaataatggaagctggttaaagtggatgaggttggaaagagttgccataatgaggtcccacgtggcttcttcgataggagccacaacttggggtgggaagaacttgtccctcaggcttgttgccctctgcagttgatctccaaagttttaaacctgttaaattaattttgacaaataagttaccctcaactcagatcaaaaatgggcagccaagtcttcggtaggaattggagccggtgtaattcctccctaagaggcaacctgttgaatttactctctcagagtaaatggtgggaagggatccctttgtatacttttttaaatactacaaattagtgtcaggcagttcccagaaagagacaagaaatcctagtggcctcccagactgcagggtccccaaggatggaaagggaatgttctgctggttctaccctgtttgttgtgtcttgctatacagaaaaaccacatttcttttatatactgtacgtgggcatatcttgttgttcagtttgggtgtctgctaaagaggaagtgcactggccctctttgaaagggctttacagtgggggcaccaagaccccaaagggcccaggccaggagactgttaaagtgaaaaggcaatctatgactcaccttgctctgccatccctggcagcccccaccggtgtcctgttcctgccacatggagcttgacttcatgccagctataatctcccctgccttcctttaatcccaatttcccctgctcactcttccacagatataaagaacaaacacttagcatcccacactcaccccttctaatcctgaagggaagcccattctaaactcctttcctgcaaacccatttccagctcctagtagctttcctcccaaaggctttctttccaatcctttatagctttggagacgcctccccaattccccagggaaggaaactgttgtgtccaatccccattaaagacaaattgatcagtgcttcccactccaagtcaagctttatgcaggaatgcttttccatcagggaataaatacttagaagcgcttacaaggtgccaggcacctcctttctgcatgtgcctgcctttctagtagcagacagatggaaacattgtctcattttgtcaaggagtccaaagaaatgattataaaaccaggattcatccttcttctccagaaagatttttttttaagtaaacacctttcaatccccaacacaagctgcttcacaactccaggctagaaggcaggagagcgatctgatgtgtttctttcatttgccagaattcctgataccaaaagcctctctctctgttgagtaacctctcaaggaccagagtggagtccagattgttaggctcagatcaagggtggggaaatactgccctctcgtggtggcttttcatccaggcctcgtagccaaccgtttaagtgcaaaatagaattaagcaatgggtaagcaaaatagggttgacaagatatttgggggttattcgggttatggcccatttatttccctcttccccctgaattgaccagtagcagctccagccccatttcacaaaagtgagtttggccaggaggaatgagacgtctcctgaaataggaacaccggaacatcatgctcacctgccatcactatgcatccagttcccacagcttgtgtcgtgaaagagcagagagatgatgttaaactccttgggaggagagagggcttcttttggtttccctggagtgagacagccaggtgtctttcttttgcggggggacacttcagacccatcaatatggaattttgggagccgacctgagtgcaaatcctaattctgcccctgttggtgcagatggctgtgggcggctcacttgaccttttagagtctgcatacccacctgtataacaaggtggattgaatgagacaatgcccacgaaatgcccagttacagtacctggttcaaaacttactgcattttaatttttcacttaacttataacatgtcttgcttctccagtgtgtggaaggcaccgggcagtttgcagagataagcaaaacacagttcctctcgtgcagaaggttagaatctatttttttttttgacagagtcttgctctgtcacccaggctggcgtacagtggtacgatctcagctcactgcatcctctgcctcccccagttcaagtgattcttctgcctcggcctcctgagtaactgggactacaggcgcctaccaccacgcccagctaagttttgtatttttagtagagtcagggtttcaccatgttggccaggctggtcttgaattcctgacctcaaatgatccacgcacctcagcctcccaaagtgctggattacaggcatgagccaccacgcccagccaaaggttataatctgatggagagagacacccgtcttggaactgacataaatttctggggtttgagaaatgggcgggatttcactggtagcttctggaaggtaagagttgtccaggaattgggaagagtgagaggaaaggcacggacagggagcatgtaagataaattgaggctggctttggaaggctgaggagggtgagaaaaggtgggctgggaccagaccgtggggagaggtgagtggcattacaagaaatttaggctttattcagaaggcaacagggagtccctaagaatgtttttcaaaaagggacattaaggcgattggagttatacttggaaaagaaagttctggccacagtacagagcatggcccgttgagctgttgggggggttattgctgcaaccaaggcttgagtgagggaagaggcggatgtagtgataaagagactccaggaactgaatcagcgtacctggcaccccatccattgtagagggtgagaataaaggagaaattaaagcatcttgcaggctgggcgcggtagctcatgtctgtaatcccagcactttgggaggccgaggtgggtgtatcagttgaggtcaggagttggagaccagtcagccagttagtagaaaccctgactctactaagaaaatacaaaaattagctgggcatggtggcatgcgcctgtagtctcagctacctgggaggctgaggaaggaggatcgcttgagcccaggaggtggaggctgcagtgagccaagattgtaccactgcactccagcctgggtgacagagcaagactcttatctcaaaaaaaataaaataaaataaaataaaataaaacatcttgcccctagctgagagagaggtctctgaagagcaggctcagggaaaagatgagttttcagagctgatgtgatagtcagcttctctggagtcaacagggtgaatccttcccaagtccagccatgcccagatgcccggagggaaaactgacccccagccagtagacattggctaagaacacagaatcttctgaccaaacacgctttcagcagctgcctgctctggactttgaaagaggtcaggtcttgccctaagctcaaaacaagtgagaggtgtcctgacctagctcatagggcaaatggtcctaataggatgggcaatccagatgcctgagccccttcactccgacagcaccagcgcctaatgcagccttttcattcttgccattaggaaatctgtggacttctagcctgtgttttaaaccagccatgtttccttgtatatttccctacccgctgccccacatacccagcatgccgctgtggccaccatgtcctcaaagccttctgtctgtatcaggaatgtagtctgagactgccaggaagcaacaaggagagagaaacactaactagtcttcctttataacccattcatactctctggctgtccccaaccttcatagtctcctgcatccaaatgtcctctttggctcaaaaagtaggccaggcatggtggttcatgcctgtaatagcactttgggagactgaggtgggaggatcacttggggccaggagtttgagaccagcttgggcaacacagcgcaatctcgtctctactaaaaaaaaaaaaaaaaaaaaattagctgggcatgatggcatgctcctgtggtcccagctacttgggaggctgaggcaggaggatcacttggtcccaggagtttgaggcgacagtgagctaggatcgcaccactgcactccagcctgagtgacagagcaagaccctgtctctaaaaaaaattaaaatgaaagaccaggtgctgggattaaggaaacacaggtctgagggtctgagggaaggggcctgcctcccagggagtcaacatagatgttccccatgaacagggatttgactttggaggccaacctggcctggcctctgccctttatctcacactccctatccttggcccactgccagtccctgccttgtggcaaaggggccccaaaagaaaagctgcccttccccaaatgtaaggacccaggtacactttcacccgtggaaagcagtgtctgtcgagagtctgtttcctattaatacttatcaaagccatgtgcgagggaggtggtcagctgtcaatatgccttagtatgtttatatgagtttgttttgttctaaaatacccaaacagttctggtcaagcggggctatgcccgtctggcccaaaacacagtccgttattaacgagatggccctggcaggcgggaacaaatctgcctccatgcactgcttcctgtagtcttttagaaagtaactccaggacatcgaagtgcccagatttgactcctaagttctaggagactgtagcgcagggtctgtcaaccttagcactattggcatttggggctgggtaattctttcttgtgggggccgtcttgggtactgtaggaagctgagcagcattcctggcctccatccacaagatacctgtagcagtgtcctgccaacggtaacaatcaagtatgtcatcagacattgcccaatgtccccagggggcaacacccctctcttggacttcagggtcaagagaatctctgctggctaccccaggacttctcattatagatttcctggagcacgcagcagaaactttgcctagcccagtggttgtttccattatctgctgccaaagtgggatttgagggtgtccgggggagggggcatggggagggcagtatgctttcaaaaacccctcccaggccaggcgtggtggctcatgcctgtaatcacaggactttgggaggccgaggctggcagatcacttgaggctgggagttagagaccaacctggctaacatggcaaaacctcgtctctactaaaaatacaaaaatcagcccggcgtggtggcgggcatctgtaatcccatctactcgggaggctgaggcaggagaattacttgaacccaggaggcagaggctgcagtgagccgagatggcaccactgcactccagcttgttgacagaatgagaccctgtggaaaaaaaaaaaaaagccctcccatgccagaacagaggatggcagtctgtttcaataagacactgtgtccttggtgttggttctgattaagactcactgagatccagtgctcttgagctgggtctcagtcccctcccatgtcctgtgctctgccgccactgttttcattgttgtgttctcgttgtgattgttaagactcacactcctggctcagcagtggttttccagaaggcccaaagagcggtgccgggcaccccacgtcgcagtgtccgttccgggcttgggaagctggggaggtgggcagacctggtcgcatctcaccacacacacacacacacacacacacacacacgctgtcagaaactcggccgtcccccctacctctgagctctcaatgctgctaatctctgccaagtgtccctgtgctccagcaccttccttgaaggactgacgcccaccccacgctctttgcgaggttgtccaggctgtgtttgtcgcatgctcttcttctgtatagttctcatcttccaattttatgggattcaacaaaagcctattatgcttgtttgcattatggttacaatattaaaaagtggattcaa

SEQ ID NO: 13993 - DNA, 4462 bp, Homo sapiens
  source 1..4462: mol_type = unassigned DNA
ttaccatggaggatcacatgttcggtgttcagcaaatccagcccaatgtcatttctgttcgtctcttcaagcgcaaagttgggggcctgggatttctggtgaaggagcgggtcagtaagccgcccgtgatcatctctgacctgattcgtgggggcgccgcagagcagagtggcctcatccaggccggagacatcattcttgcggtcaacggccggcccttggtggacctgagctatgacagcgccctggaggtactcagaggcattgcctctgagacccacgtggtcctcattctgaggggccctgaaggtttcaccacgcacctggagaccacctttacaggtgatgggacccccaagaccatccgggtgacacagcccctgggtccccccaccaaagccgtggatctgtcccaccagccaccggccggcaaagaacagcccctggcagtggatggggcctcgggtcccgggaatgggcctcagcatgcctacgatgatgggcaggaggctggctcactcccccatgccaacggcctggcccccaggcccccaggccaggaccccgcgaagaaagcaaccagagtcagcctccaaggcagaggggagaacaatgaactgctcaaggagatagagcctgtgctgagccttctcaccagtgggagcagaggggtcaagggaggggcacctgccaaggcagagatgaaagatatgggaatccaggtggacagagatttggacggcaagtcacacaaacctctgcccctcggcgtggagaacgaccgagtcttcaatgacctatgggggaagggcaatgtgcctgtcgtcctcaacaacccatattcagagaaggagcagccccccacctcaggaaaacagtcccccacaaagaatggcagcccctccaagtgtccacgcttcctcaaggtcaagaactgggagactgaggtggttctcactgacaccctccaccttaagagcacattggaaacgggatgcactgagtacatctgcatgggctccatcatgcatccttctcagcatgcaaggaggcctgaagacgtccgcacaaaaggacagctcttccctctcgccaaagagtttattgatcaatactattcatcaattaaaagatttggctccaaagcccacatggaaaggctggaagaggtgaacaaagagatcgacaccactagcacttaccagctcaaggacacagagctcatctatggggccaagcacgcctggcggaatgcctcgcgctgtgtgggcaggatccagtggtccaagctgcaggtattcgatgcccgtgactgcaccacggcccacgggatgttcaactacatctgtaaccatgtcaagtatgccaccaacaaagggaacctcaggtctgccatcaccatattcccccagaggacagacggcaagcacgacttccgagtctggaactcccagctcatccgctacgctggctacaagcagcctgacggctccaccctgggggacccagccaatgtgcagttcacagagatatgcatacagcagggctggaaaccgcctagaggccgcttcgatgtcctgccgctcctgcttcaggccaacggcaatgaccctgagctcttccagattcctccagagctggtgttggaagttcccatcaggcaccccaagtttgagtggttcaaggacctggggctgaagtggtacggcctccccgccgtgtccaacatgctcctagagattggcggcctggagttcagcgcctgtcccttcagtggctggtacatgggcacagagattggtgtccgcgactactgtgacaactcccgctacaatatcctggaggaagtggccaagaagatgaacttagacatgaggaagacgtcctccctgtggaaggaccaggcgctggtggagatcaatatcgcggttctctatagcttccagagtgacaaagtgaccattgttgaccatcactccgccaccgagtccttcattaagcacatggagaatgagtaccgctgccgggggggctgccctgccgactgggtgtggatcgtgccccccatgtccggaagcatcacccctgtgttccaccaggagatgctcaactaccggctcaccccctccttcgaataccagcctgatccctggaacacgcatgtctggaaaggcaccaacgggacccccacaaagcggcgagccattggcttcaagaagctagcagaagctgtcaagttctcggccaagctgatggggcaggctatggccaagagggtgaaagcgaccatcctctatgccacagagacaggcaaatcgcaagcttatgccaagaccttgtgtgagatcttcaaacacgcctttgatgccaaggtgatgtccatggaagaatatgacattgtgcacctggaacatgaaactctggtccttgtggtcaccagcacctttggcaatggagatccccctgagaatggggagaaattcggctgtgctttgatggaaatgaggcaccccaactctgtgcaggaagaaaggaagtacccggaacccttgcgtttctttccccgtaaagggcctcccctccccaatggtgacacagaagtccacggtctggctgcagcccgtgacagccagcacaggagctacaaggtccgattcaacagcgtctcctcctactctgactcccaaaaatcatcaggcgatgggcccgacctcagagacaactttgagagtgctggacccctggccaatgtgaggttctcagtttttggcctcggctcacgagcataccctcacttttgcgccttcggacacgctgtggacaccctcctggaagaactgggaggggagaggatcctgaagatgagggaaggggatgagctctgtgggcaggaagaggctttcaggacctgggccaagaaggtcttcaaggcagcctgtgatgtcttctgtgtgggagatgatgtcaacattgaaaaggccaacaattccctcatcagcaatgatcgcagctggaagagaaacaagttccgcctcacctttgtggccgaagctccagaactcacacaaggtctatccaatgtccacaaaaagcgagtctcagctgcccggctccttagccgtcaaaacctccagagccctaaatccagtcggtcaactatcttcgtgcgtctccacaccaacgggagccaggagctgcagtaccagcctggggaccacctgggtgtcttccctggcaaccacgaggacctcgtgaatgccctgatcgagcggctggaggacgcgccgcctgtcaaccagatggtgaaagtggaactgctggaggagcggaacacggctttaggtgtcatcagtaactggacagacgagctccgcctcccgccctgcaccatcttccaggccttcaagtactacctggacatcaccacgccaccaacgcctctgcagctgcagcagtttgcctccctagctaccagcgagaaggagaagcagcgtctgctggtcctcagcaagggtttgcaggagtacgaggaatggaaatggggcaagaaccccaccatcgtggaggtgctggaggagttcccatctatccagatgccggccaccctgctcctgacccagctgtccctgctgcagccccgctactattccatcagctcctccccagacatgtaccctgatgaagtgcacctcactgtggccatcgtttcctaccgcactcgagatggagaaggaccaattcaccacggcgtatgctcctcctggctcaaccggatacaggctgacgaactggtcccctgtttcgtgagaggagcacccagcttccacctgccccggaacccccaagtcccctgcatcctcgttggaccaggcaccggcattgcccctttccgaagcttctggcaacagcggcaatttgatatccaacacaaaggaatgaacccctgccccatggtcctggtcttcgggtgccggcaatccaagatagatcatatctacagggaagagaccctgcaggccaagaacaagggggtcttcagagagctgtacacggcttactcccgggagccagacaaaccaaagaagtacgtgcaggacatcctgcaggagcagctggcggagtctgtgtaccgagccctgaaggagcaagggggccacatatacgtctgtggggacgtcaccatggctgctgatgtcctcaaagccatccagcgcatcatgacccagcaggggaagctctcggcagaggacgccggcgtattcatcagccggatgagggatgacaaccgataccatgaggatatttttggagtcaccctgcgaacgtacgaagtgaccaaccgccttagatctgagtccattgccttcattgaagagagcaaaaaagacaccgatgaggttttcagctcctaactggaccctcttgcccagccggctgcaagttttgtaagcgcggacagaca

SEQ ID NO: 13994 - DNA, 527 bp, Homo sapiens
  source 1..527: mol_type = unassigned DNA
ctagggacaaatgcagaaattcgtccgtgaattcgtcgtgtgaatgcagaaatatacacggatgtgcacacaactacagctctccacactgagcatgtgatctgtgcccagattaatccccacaaccacacaattccattttatagatgtgaaggctgggtgcagagggatgaagtaactggcccaccccaagttcagaacccaaaactcatagccctcttggggccacacacagcatgatgggcttctaagtaccttggatttttaaaagccactttataaagtgcttttatgaaacaagatctcacctgacctggaaaaccagtgaggctgggactattcaactcattcgacagcagaataactgaagatggagaaacaggctatccggcaaatctgactggaactcccaggcccctcccttgaggagctgctgctgagagatggaagaactggcctcatctgtcctgctcatgatgcctcagatctgatccgcatctaacaggctggcaatgaagatacccaga

SEQ ID NO: 13995 - DNA, 476 bp, Homo sapiens
  source 1..476: mol_type = unassigned DNA
ctcacggctcagtccctacatatttatgccgcgtttccagccgctgggtgaggagctacttagcgccgcggctcctccgaggggcggccgggcagcgagcagcggccgagcggacgggatgaagaaacggaggcaccaagatgctgaagcccttgaccgagtcacgtgtcagtaaatgacagaatcaggatttgaatcccatgcctgtgatcctgaaccatgacattcccctttaacccttccttccaacctctgcgacatcagcttatagactgttgaaggtgacaccgttctcttctgtgatttttatttcaggggttatttgcagagctctgttcagtaaagctgactcaggtggggatgtgtcccgcagtgtcgaggtagggtgtcctccaggggcttcccaggtgtgctggtgcaacacgagataaagaccaagccagttcaggtaacccccaggtagagtcactaaaaaa

SEQ ID NO: 13996 - DNA, 12283 bp, Homo sapiens
  source 1..12283: mol_type = unassigned DNA
ataaaagatgtatgctttggagcccagagcggctcttttaatgagggttgcgacgtctccctccccacacccataaaccagtcgggttggacgtcactgctaattcgtttcagtgatgataggataaaggagggacattaagaaataaattccccctcacgaccctcgctgagctcacggctcagtccctacatatttatgccgcgtttccagccgctgggtgaggagctacttagcgccgcggctcctccgaggggcggccgggcagcgagcagcggccgagcggacgggctcatgatgcctcagatctgatccgcatctaacaggctggcaatgaagatacccagagaatagttcacatctatcatgcgtcacttctagacacagccatcagacgcatctcctcccctttctgcctgaccttagggacacgtcccaccgcctctcttgacgtctgcctggtcaaccatcacttccttagagaataaggagagaggcggatgcaggaaatcatgccaccgacgggccaccagccatgagtgggtgacgctgagctgacgtcaaagacagagagggctgaagccttgtcagcacctgtcaccccggctcctgctctccgtgtagcctgaagcctggatcctcctggtgaaatcatcttggcctgatagcattgtgaggtcttcagacaggacccctcggaagctagttaccatggaggatcacatgttcggtgttcagcaaatccagcccaatgtcatttctgttcgtctcttcaagcgcaaagttgggggcctgggatttctggtgaaggagcgggtcagtaagccgcccgtgatcatctctgacctgattcgtgggggcgccgcagagcagagtggcctcatccaggccggagacatcattcttgcggtcaacggccggcccttggtggacctgagctatgacagcgccctggaggtactcagaggcattgcctctgagacccacgtggtcctcattctgaggggccctgaaggtttcaccacgcacctggagaccacctttacaggtgatgggacccccaagaccatccgggtgacacagcccctgggtccccccaccaaagccgtggatctgtcccaccagccaccggccggcaaagaacagcccctggcagtggatggggcctcgggtcccgggaatgggcctcagcatgcctacgatgatgggcaggaggctggctcactcccccatgccaacggcctggcccccaggcccccaggccaggaccccgcgaagaaagcaaccagagtcagcctccaaggcagaggggagaacaatgaactgctcaaggagatagagcctgtgctgagccttctcaccagtgggagcagaggggtcaagggaggggcacctgccaaggcagagatgaaagatatgggaatccaggtggacagagatttggacggcaagtcacacaaacctctgcccctcggcgtggagaacgaccgagtcttcaatgacctatgggggaagggcaatgtgcctgtcgtcctcaacaacccatattcagagaaggagcagccccccacctcaggaaaacagtcccccacaaagaatggcagcccctccaagtgtccacgcttcctcaaggtcaagaactgggagactgaggtggttctcactgacaccctccaccttaagagcacattggaaacgggatgcactgagtacatctgcatgggctccatcatgcatccttctcagcatgcaaggaggcctgaagacgtccgcacaaaaggacagctcttccctctcgccaaagagtttattgatcaatactattcatcaattaaaagatttggctccaaagcccacatggaaaggctggaagaggtgaacaaagagatcgacaccactagcacttaccagctcaaggacacagagctcatctatggggccaagcacgcctggcggaatgcctcgcgctgtgtgggcaggatccagtggtccaagctgcaggtattcgatgcccgtgactgcaccacggcccacgggatgttcaactacatctgtaaccatgtcaagtatgccaccaacaaagggaacctcaggtctgccatcaccatattcccccagaggacagacggcaagcacgacttccgagtctggaactcccagctcatccgctacgctggctacaagcagcctgacggctccaccctgggggacccagccaatgtgcagttcacagagatatgcatacagcagggctggaaaccgcctagaggccgcttcgatgtcctgccgctcctgcttcaggccaacggcaatgaccctgagctcttccagattcctccagagctggtgttggaagttcccatcaggcaccccaagtttgagtggttcaaggacctggggctgaagtggtacggcctccccgccgtgtccaacatgctcctagagattggcggcctggagttcagcgcctgtcccttcagtggctggtacatgggcacagagattggtgtccgcgactactgtgacaactcccgctacaatatcctggaggaagtggccaagaagatgaacttagacatgaggaagacgtcctccctgtggaaggaccaggcgctggtggagatcaatatcgcggttctctatagcttccagagtgacaaagtgaccattgttgaccatcactccgccaccgagtccttcattaagcacatggagaatgagtaccgctgccgggggggctgccctgccgactgggtgtggatcgtgccccccatgtccggaagcatcacccctgtgttccaccaggagatgctcaactaccggctcaccccctccttcgaataccagcctgatccctggaacacgcatgtctggaaaggcaccaacgggacccccacaaagcggcgagccattggcttcaagaagctagcagaagctgtcaagttctcggccaagctgatggggcaggctatggccaagagggtgaaagcgaccatcctctatgccacagagacaggcaaatcgcaagcttatgccaagaccttgtgtgagatcttcaaacacgcctttgatgccaaggtgatgtccatggaagaatatgacattgtgcacctggaacatgaaactctggtccttgtggtcaccagcacctttggcaatggagatccccctgagaatggggagaaattcggctgtgctttgatggaaatgaggcaccccaactctgtgcaggaagaaaggaagtacccggaacccttgcgtttctttccccgtaaagggcctcccctccccaatggtgacacagaagtccacggtctggctgcagcccgtgacagccagcacaggagctacaaggtccgattcaacagcgtctcctcctactctgactcccaaaaatcatcaggcgatgggcccgacctcagagacaactttgagagtgctggacccctggccaatgtgaggttctcagtttttggcctcggctcacgagcataccctcacttttgcgccttcggacacgctgtggacaccctcctggaagaactgggaggggagaggatcctgaagatgagggaaggggatgagctctgtgggcaggaagaggctttcaggacctgggccaagaaggtcttcaaggcagcctgtgatgtcttctgtgtgggagatgatgtcaacattgaaaaggccaacaattccctcatcagcaatgatcgcagctggaagagaaacaagttccgcctcacctttgtggccgaagctccagaactcacacaaggtctatccaatgtccacaaaaagcgagtctcagctgcccggctccttagccgtcaaaacctccagagccctaaatccagtcggtcaactatcttcgtgcgtctccacaccaacgggagccaggagctgcagtaccagcctggggaccacctgggtgtcttccctggcaaccacgaggacctcgtgaatgccctgatcgagcggctggaggacgcgccgcctgtcaaccagatggtgaaagtggaactgctggaggagcggaacacggctttaggtgtcatcagtaactggacagacgagctccgcctcccgccctgcaccatcttccaggccttcaagtactacctggacatcaccacgccaccaacgcctctgcagctgcagcagtttgcctccctagctaccagcgagaaggagaagcagcgtctgctggtcctcagcaagggtttgcaggagtacgaggaatggaaatggggcaagaaccccaccatcgtggaggtgctggaggagttcccatctatccagatgccggccaccctgctcctgacccagctgtccctgctgcagccccgctactattccatcagctcctccccagacatgtaccctgatgaagtgcacctcactgtggccatcgtttcctaccgcactcgagatggagaaggaccaattcaccacggcgtatgctcctcctggctcaaccggatacaggctgacgaactggtcccctgtttcgtgagaggagcacccagcttccacctgccccggaacccccaagtcccctgcatcctcgttggaccaggcaccggcattgcccctttccgaagcttctggcaacagcggcaatttgatatccaacacaaaggaatgaacccctgccccatggtcctggtcttcgggtgccggcaatccaagatagatcatatctacagggaagagaccctgcaggccaagaacaagggggtcttcagagagctgtacacggcttactcccgggagccagacaaaccaaagaagtacgtgcaggacatcctgcaggagcagctggcggagtctgtgtaccgagccctgaaggagcaagggggccacatatacgtctgtggggacgtcaccatggctgctgatgtcctcaaagccatccagcgcatcatgacccagcaggggaagctctcggcagaggacgccggcgtattcatcagccggatgagggatgacaaccgataccatgaggatatttttggagtcaccctgcgaacgtacgaagtgaccaaccgccttagatctgagtccattgccttcattgaagagagcaaaaaagacaccgatgaggttttcagctcctaactggaccctcttgcccagccggctgcaagttttgtaagcgcggacagacactgctgaacctttcctctgggaccccctgtggccctcgctctgcctcctgtccttgtcgctgtgccctggtttccctcctcgggcttctcgcccctcagtggtttcctcggccctcctgggtttactccttgagttttcctgctgcgatgcaatgcttttctaatctgcagtggctcttacaaaactctgttcccactccctctcttgccgacaagggcaactcacgggtgcatgaaaccactggaacatggccgtcgctgtgggggtttttttctctggggttcccctggaaaggctgcaggaactaggcacaagctctctgagccagtccctcagccactgaagtccccctttctccttttttatgatgacattttggttgtgcgtgcctgtgtgtgtgtgtgtgtgtgtgtgtgtgtgtgtgatgggccaggtctctgtccgtcctcttccctgcacaagtgtgtcgatcttagattgccactgctttcattgaagaccctcaatgccaagaaacgtgtccctggcccatattaatccctcgtgtgtccataattagggtccacgcccatgtacctgaaacatttggaagccccataattgttctagttagaaagggttcagggcatggggagaggagtgggaaattgattaaaggggctgtctcccaatgaaagaggcattcccagaatttgctgcatttagattttgataccagtgagcagagccctcatgtgacatgaacccatccaatggattgtgcaaatcccctccccaaacccacccataccagctagaatcacttgactttgccacatccattgactgaccccctcctccagcaatagcatccaaggggcctggaagttatgttgttcaaagaagcctggtggcaataaggatcttcccactttgccactggatgactttggatgggtcacttgtcctcagtttttcctagtcataatgtcatacgaacctaaagaatatgaatggattaaatgttaaagctttggtgcctggaaacaatatcaagtaacaatatgattattatttttttattcccccaaagcgggcttgctgcttcacccttggggatgaaataatggaagctggttaaagtggatgaggttggaaagagttgccataatgaggtcccacgtggcttcttcgataggagccacaacttggggtgggaagaacttgtccctcaggcttgttgccctctgcagttgatctccaaagttttaaacctgttaaattaattttgacaaataagttaccctcaactcagatcaaaaatgggcagccaagtcttcggtaggaattggagccggtgtaattcctccctaagaggcaacctgttgaatttactctctcagagtaaatggtgggaagggatccctttgtatacttttttaaatactacaaattagtgtcaggcagttcccagaaagagacaagaaatcctagtggcctcccagactgcagggtccccaaggatggaaagggaatgttctgctggttctaccctgtttgttgtgtcttgctatacagaaaaaccacatttcttttatatactgtacgtgggcatatcttgttgttcagtttgggtgtctgctaaagaggaagtgcactggccctctttgaaagggctttacagtgggggcaccaagaccccaaagggcccaggccaggagactgttaaagtgaaaaggcaatctatgactcaccttgctctgccatccctggcagcccccaccggtgtcctgttcctgccacatggagcttgacttcatgccagctataatctcccctgccttcctttaatcccaatttcccctgctcactcttccacagatataaagaacaaacacttagcatcccacactcaccccttctaatcctgaagggaagcccattctaaactcctttcctgcaaacccatttccagctcctagtagctttcctcccaaaggctttctttccaatcctttatagctttggagacgcctccccaattccccagggaaggaaactgttgtgtccaatccccattaaagacaaattgatcagtgcttcccactccaagtcaagctttatgcaggaatgcttttccatcagggaataaatacttagaagcgcttacaaggtgccaggcacctcctttctgcatgtgcctgcctttctagtagcagacagatggaaacattgtctcattttgtcaaggagtccaaagaaatgattataaaaccaggattcatccttcttctccagaaagatttttttttaagtaaacacctttcaatccccaacacaagctgcttcacaactccaggctagaaggcaggagagcgatctgatgtgtttctttcatttgccagaattcctgataccaaaagcctctctctctgttgagtaacctctcaaggaccagagtggagtccagattgttaggctcagatcaagggtggggaaatactgccctctcgtggtggcttttcatccaggcctcgtagccaaccgtttaagtgcaaaatagaattaagcaatgggtaagcaaaatagggttgacaagatatttgggggttattcgggttatggcccatttatttccctcttccccctgaattgaccagtagcagctccagccccatttcacaaaagtgagtttggccaggaggaatgagacgtctcctgaaataggaacaccggaacatcatgctcacctgccatcactatgcatccagttcccacagcttgtgtcgtgaaagagcagagagatgatgttaaactccttgggaggagagagggcttcttttggtttccctggagtgagacagccaggtgtctttcttttgcggggggacacttcagacccatcaatatggaattttgggagccgacctgagtgcaaatcctaattctgcccctgttggtgcagatggctgtgggcggctcacttgaccttttagagtctgcatacccacctgtataacaaggtggattgaatgagacaatgcccacgaaatgcccagttacagtacctggttcaaaacttactgcattttaatttttcacttaacttataacatgtcttgcttctccagtgtgtggaaggcaccgggcagtttgcagagataagcaaaacacagttcctctcgtgcagaaggttagaatctatttttttttttgacagagtcttgctctgtcacccaggctggcgtacagtggtacgatctcagctcactgcatcctctgcctcccccagttcaagtgattcttctgcctcggcctcctgagtaactgggactacaggcgcctaccaccacgcccagctaagttttgtatttttagtagagtcagggtttcaccatgttggccaggctggtcttgaattcctgacctcaaatgatccacgcacctcagcctcccaaagtgctggattacaggcatgagccaccacgcccagccaaaggttataatctgatggagagagacacccgtcttggaactgacataaatttctggggtttgagaaatgggcgggatttcactggtagcttctggaaggtaagagttgtccaggaattgggaagagtgagaggaaaggcacggacagggagcatgtaagataaattgaggctggctttggaaggctgaggagggtgagaaaaggtgggctgggaccagaccgtggggagaggtgagtggcattacaagaaatttaggctttattcagaaggcaacagggagtccctaagaatgtttttcaaaaagggacattaaggcgattggagttatacttggaaaagaaagttctggccacagtacagagcatggcccgttgagctgttgggggggttattgctgcaaccaaggcttgagtgagggaagaggcggatgtagtgataaagagactccaggaactgaatcagcgtacctggcaccccatccattgtagagggtgagaataaaggagaaattaaagcatcttgcaggctgggcgcggtagctcatgtctgtaatcccagcactttgggaggccgaggtgggtgtatcagttgaggtcaggagttggagaccagtcagccagttagtagaaaccctgactctactaagaaaatacaaaaattagctgggcatggtggcatgcgcctgtagtctcagctacctgggaggctgaggaaggaggatcgcttgagcccaggaggtggaggctgcagtgagccaagattgtaccactgcactccagcctgggtgacagagcaagactcttatctcaaaaaaaataaaataaaataaaataaaataaaacatcttgcccctagctgagagagaggtctctgaagagcaggctcagggaaaagatgagttttcagagctgatgtgatagtcagcttctctggagtcaacagggtgaatccttcccaagtccagccatgcccagatgcccggagggaaaactgacccccagccagtagacattggctaagaacacagaatcttctgaccaaacacgctttcagcagctgcctgctctggactttgaaagaggtcaggtcttgccctaagctcaaaacaagtgagaggtgtcctgacctagctcatagggcaaatggtcctaataggatgggcaatccagatgcctgagccccttcactccgacagcaccagcgcctaatgcagccttttcattcttgccattaggaaatctgtggacttctagcctgtgttttaaaccagccatgtttccttgtatatttccctacccgctgccccacatacccagcatgccgctgtggccaccatgtcctcaaagccttctgtctgtatcaggaatgtagtctgagactgccaggaagcaacaaggagagagaaacactaactagtcttcctttataacccattcatactctctggctgtccccaaccttcatagtctcctgcatccaaatgtcctctttggctcaaaaagtaggccaggcatggtggttcatgcctgtaatagcactttgggagactgaggtgggaggatcacttggggccaggagtttgagaccagcttgggcaacacagcgcaatctcgtctctactaaaaaaaaaaaaaaaaaaaaattagctgggcatgatggcatgctcctgtggtcccagctacttgggaggctgaggcaggaggatcacttggtcccaggagtttgaggcgacagtgagctaggatcgcaccactgcactccagcctgagtgacagagcaagaccctgtctctaaaaaaaattaaaatgaaagaccaggtgctgggattaaggaaacacaggtctgagggtctgagggaaggggcctgcctcccagggagtcaacatagatgttccccatgaacagggatttgactttggaggccaacctggcctggcctctgccctttatctcacactccctatccttggcccactgccagtccctgccttgtggcaaaggggccccaaaagaaaagctgcccttccccaaatgtaaggacccaggtacactttcacccgtggaaagcagtgtctgtcgagagtctgtttcctattaatacttatcaaagccatgtgcgagggaggtggtcagctgtcaatatgccttagtatgtttatatgagtttgttttgttctaaaatacccaaacagttctggtcaagcggggctatgcccgtctggcccaaaacacagtccgttattaacgagatggccctggcaggcgggaacaaatctgcctccatgcactgcttcctgtagtcttttagaaagtaactccaggacatcgaagtgcccagatttgactcctaagttctaggagactgtagcgcagggtctgtcaaccttagcactattggcatttggggctgggtaattctttcttgtgggggccgtcttgggtactgtaggaagctgagcagcattcctggcctccatccacaagatacctgtagcagtgtcctgccaacggtaacaatcaagtatgtcatcagacattgcccaatgtccccagggggcaacacccctctcttggacttcagggtcaagagaatctctgctggctaccccaggacttctcattatagatttcctggagcacgcagcagaaactttgcctagcccagtggttgtttccattatctgctgccaaagtgggatttgagggtgtccgggggagggggcatggggagggcagtatgctttcaaaaacccctcccaggccaggcgtggtggctcatgcctgtaatcacaggactttgggaggccgaggctggcagatcacttgaggctgggagttagagaccaacctggctaacatggcaaaacctcgtctctactaaaaatacaaaaatcagcccggcgtggtggcgggcatctgtaatcccatctactcgggaggctgaggcaggagaattacttgaacccaggaggcagaggctgcagtgagccgagatggcaccactgcactccagcttgttgacagaatgagaccctgtggaaaaaaaaaaaaaagccctcccatgccagaacagaggatggcagtctgtttcaataagacactgtgtccttggtgttggttctgattaagactcactgagatccagtgctcttgagctgggtctcagtcccctcccatgtcctgtgctctgccgccactgttttcattgttgtgttctcgttgtgattgttaagactcacactcctggctcagcagtggttttccagaaggcccaaagagcggtgccgggcaccccacgtcgcagtgtccgttccgggcttgggaagctggggaggtgggcagacctggtcgcatctcaccacacacacacacacacacacacacacacacgctgtcagaaactcggccgtcccccctacctctgagctctcaatgctgctaatctctgccaagtgtccctgtgctccagcaccttccttgaaggactgacgcccaccccacgctctttgcgaggttgtccaggctgtgtttgtcgcatgctcttcttctgtatagttctcatcttccaattttatgggattcaacaaaagcctattatgcttgtttgcattatggttacaatattaaaaagtggattc

SEQ ID NO: 13997 - DNA, 4340 bp, Homo sapiens
  source 1..4340: mol_type = unassigned DNA
gctagttaccatggaggatcacatgttcggtgttcagcaaatccagcccaatgtcatttctgttcgtctcttcaagcgcaaagttgggggcctgggatttctggtgaaggagcgggtcagtaagccgcccgtgatcatctctgacctgattcgtgggggcgccgcagagcagagtggcctcatccaggccggagacatcattcttgcggtcaacggccggcccttggtggacctgagctatgacagcgccctggaggtactcagaggcattgcctctgagacccacgtggtcctcattctgaggggccctgaaggtttcaccacgcacctggagaccacctttacaggtgatgggacccccaagaccatccgggtgacacagcccctgggtccccccaccaaagccgtggatctgtcccaccagccaccggccggcaaagaacagcccctggcagtggatggggcctcgggtcccgggaatgggcctcagcatgcctacgatgatgggcaggaggctggctcactcccccatgccaacggctggccccaggcccccaggcaggaccccgcgaagaaagcaaccagagtcagcctccaaggcagaggggagaacaatgaactgctcaaggagatagagcctgtgctgagccttctcaccagtgggagcagaggggtcaagggaggggcacctgccaaggcagagatgaaagatatgggaatccaggtggacagagatttggacggcaagtcacacaaacctctgcccctcggcgtggagaacgaccgagtcttcaatgacctatgggggaagggcaatgtgcctgtcgtcctcaacaacccatattcagagaaggagcagccccccacctcaggaaaacagtcccccacaaagaatggcagcccctccaagtgtccacgcttcctcaaggtcaagaactgggagactgaggtggttctcactgacaccctccaccttaagagcacattggaaacgggatgcactgagtacatctgcatgggctccatcatgcatccttctcagcatgcaaggaggcctgaagacgtccgcacaaaaggacagctcttccctctcgccaaagagtttattgatcaatactattcatcaattaaaagatttggctccaaagcccacatggaaaggctggaagaggtgaacaaagagatcgacaccactagcacttaccagctcaaggacacagagctcatctatggggccaagcacgcctggcggaatgcctcgcgctgtgtgggcaggatccagtggtccaagctgcaggtattcgatgcccgtgactgcaccacggcccacgggatgttcaactacatctgtaaccatgtcaagtatgccaccaacaaagggaacctcaggtctgccatcaccatattcccccagaggacagacggcaagcacgacttccgagtctggaactcccagctcatccgctacgctggctacaagcagcctgacggctccaccctgggggacccagccaatgtgcagttcacagagatatgcatacagcagggctggaaaccgcctagaggccgcttcgatgtcctgccgctcctgcttcaggccaacggcaatgaccctgagctcttccagattcctccagagctggtgttggaagttcccatcaggcaccccaagtttgagtggttcaaggacctggggctgaagtggtacggcctccccgccgtgtccaacatgctcctagagattggcggcctggagttcagcgcctgtcccttcagtggctggtacatgggcacagagattggtgtccgcgactactgtgacaactcccgctacaatatcctggaggaagtggccaagaagatgaacttagacatgaggaagacgtcctccctgtggaaggaccaggcgctggtggagatcaatatcgcggttctctatagcttccagagtgacaaagtgaccattgttgaccatcactccgccaccgagtccttcattaagcacatggagaatgagtaccgctgccgggggggctgccctgccgactgggtgtggatcgtgccccccatgtccggaagcatcacccctgtgttccaccaggagatgctcaactaccggctcaccccctccttcgaataccagcctgatccctggaacacgcatgtctggaaaggcaccaacgggacccccacaaagcggcgagccattggcttcaagaagctagcagaagctgtcaagttctcggccaagctgatggggcaggctatggccaagagggtgaaagcgaccatcctctatgccacagagacaggcaaatcgcaagcttatgccaagaccttgtgtgagatcttcaaacacgcctttgatgccaaggtgatgtccatggaagaatatgacattgtgcacctggaacatgaaactctggtccttgtggtcaccagcacctttggcaatggagatccccctgagaatggggagaaattcggctgtgctttgatggaaatgaggcaccccaactctgtgcaggaagaaaggaagagctacaaggtccgattcaacagcgtctcctcctactctgactcccaaaaatcatcaggcgatgggcccgacctcagagacaactttgagagtgctggacccctggccaatgtgaggttctcagtttttggcctcggctcacgagcataccctcacttttgcgccttcggacacgctgtggacaccctcctggaagaactgggaggggagaggatcctgaagatgagggaaggggatgagctctgtgggcaggaagaggctttcaggacctgggccaagaaggtcttcaaggcagcctgtgatgtcttctgtgtgggagatgatgtcaacattgaaaaggccaacaattccctcatcagcaatgatcgcagctggaagagaaacaagttccgcctcacctttgtggccgaagctccagaactcacacaaggtctatccaatgtccacaaaaagcgagtctcagctgcccggctccttagccgtcaaaacctccagagccctaaatccagtcggtcaactatcttcgtgcgtctccacaccaacgggagccaggagctgcagtaccagcctggggaccacctgggtgtcttccctggcaaccacgaggacctcgtgaatgccctgatcgagcggctggaggacgcgccgcctgtcaaccagatggtgaaagtggaactgctggaggagcggaacacggctttaggtgtcatcagtaactggacagacgagctccgcctcccgccctgcaccatcttccaggccttcaagtactacctggacatcaccacgccaccaacgcctctgcagctgcagcagtttgcctccctagctaccagcgagaaggagaagcagcgtctgctggtcctcagcaagggtttgcaggagtacgaggaatggaaatggggcaagaaccccaccatcgtggaggtgctggaggagttcccatctatccagatgccggccaccctgctcctgacccagctgtccctgctgcagccccgctactattccatcagctcctccccagacatgtaccctgatgaagtgcacctcactgtggccatcgtttcctaccgcactcgagatggagaaggaccaattcaccacggcgtatgctcctcctggctcaaccggatacaggctgacgaactggtcccctgtttcgtgagaggagcacccagcttccacctgccccggaacccccaagtcccctgcatcctcgttggaccaggcaccggcattgcccctttccgaagcttctggcaacagcggcaatttgatatccaacacaaaggaatgaacccctgccccatggtcctggtcttcgggtgccggcaatccaagatagatcatatctacagggaagagaccctgcaggccaagaacaagggggtcttcagagagctgtacacggcttactcccgggagccagacaaaccaaagaagtacgtgcaggacatcctgcaggagcagctggcggagtctgtgtaccgagccctgaaggagcaagggggccacatatacgtctgtggggacgtcaccatggctgctgatgtcctcaaagccatccagcgcatcatgacccagcaggggaagctctcggcagaggacgccggcgtattcatcagccggatgagggatgacaaccgataccatgaggatatttttggagtcaccctgcgaacgtacgaagtgaccaaccgccttagatctgagtccattgccttcattgaagagagcaaaaaagacaccgatgaggttttcagctcctaactggaccctcttgcccagccggctgcaa

SEQ ID NO: 13998 - DNA, 9371 bp, Homo sapiens
  source 1..9371: mol_type = unassigned DNA
gcgcgtgtgcgtcccagccccgccggccagcgcaggaggccgccgcccgggcgcagagggcagccggtggggaggcatgccgccgctcctggcgcccctgctctgcctggcgctgctgcccgcgctcgccgcacgaggcccgcgatgctcccagcccggtgagacctgcctgaatggcgggaagtgtgaagcggccaatggcacggaggcctgcgtctgtggcggggccttcgtgggcccgcgatgccaggaccccaacccgtgcctcagcaccccctgcaagaacgccgggacatgccacgtggtggaccgcagaggcgtggcagactatgcctgcagctgtgccctgggcttctctgggcccctctgcctgacacccctggacaatgcctgcctcaccaacccctgccgcaacgggggcacctgcgacctgctcacgctgacggagtacaagtgccgctgcccgcccggctggtcagggaaatcgtgccagcaggctgacccgtgcgcctccaacccctgcgccaacggtggccagtgcctgcccttcgaggcctcctacatctgccactgcccacccagcttccatggccccacctgccggcaggatgtcaacgagtgtggccagaagcccgggctttgccgccacggaggcacctgccacaacgaggtcggctcctaccgctgcgtctgccgcgccacccacactggccccaactgcgagcggccctacgtgccctgcagcccctcgccctgccagaacgggggcacctgccgccccacgggcgacgtcacccacgagtgtgcctgcctgccaggcttcaccggccagaactgtgaggaaaatatcgacgattgtccaggaaacaactgcaagaacgggggtgcctgtgtggacggcgtgaacacctacaactgccgctgcccgccagagtggacaggtcagtactgtaccgaggatgtggacgagtgccagctgatgccaaatgcctgccagaacggcgggacctgccacaacacccacggtggctacaactgcgtgtgtgtcaacggctggactggtgaggactgcagcgagaacattgatgactgtgccagcgccgcctgcttccacggcgccacctgccatgaccgtgtggcctccttctactgcgagtgtccccatggccgcacaggtctgctgtgccacctcaacgacgcatgcatcagcaacccctgtaacgagggctccaactgcgacaccaaccctgtcaatggcaaggccatctgcacctgcccctcggggtacacgggcccggcctgcagccaggacgtggatgagtgctcgctgggtgccaacccctgcgagcatgcgggcaagtgcatcaacacgctgggctccttcgagtgccagtgtctgcagggctacacgggcccccgatgcgagatcgacgtcaacgagtgcgtctcgaacccgtgccagaacgacgccacctgcctggaccagattggggagttccagtgcatctgcatgcccggctacgagggtgtgcactgcgaggtcaacacagacgagtgtgccagcagcccctgcctgcacaatggccgctgcctggacaagatcaatgagttccagtgcgagtgccccacgggcttcactgggcatctgtgccagtacgatgtggacgagtgtgccagcaccccctgcaagaatggtgccaagtgcctggacggacccaacacttacacctgtgtgtgcacggaagggtacacggggacgcactgcgaggtggacatcgatgagtgcgaccccgacccctgccactacggctcctgcaaggacggcgtcgccaccttcacctgcctctgccgcccaggctacacgggccaccactgcgagaccaacatcaacgagtgctccagccagccctgccgccacgggggcacctgccaggaccgcgacaacgcctacctctgcttctgcctgaaggggaccacaggacccaactgcgagatcaacctggatgactgtgccagcagcccctgcgactcgggcacctgtctggacaagatcgatggctacgagtgtgcctgtgagccgggctacacagggagcatgtgtaacatcaacatcgatgagtgtgcgggcaacccctgccacaacgggggcacctgcgaggacggcatcaatggcttcacctgccgctgccccgagggctaccacgaccccacctgcctgtctgaggtcaatgagtgcaacagcaacccctgcgtccacggggcctgccgggacagcctcaacgggtacaagtgcgactgtgaccctgggtggagtgggaccaactgtgacatcaacaacaatgagtgtgaatccaacccttgtgtcaacggcggcacctgcaaagacatgaccagtggctacgtgtgcacctgccgggagggcttcagcggtcccaactgccagaccaacatcaacgagtgtgcgtccaacccatgtctgaaccagggcacgtgtattgacgacgttgccgggtacaagtgcaactgcctgctgccctacacaggtgccacgtgtgaggtggtgctggccccgtgtgcccccagcccctgcagaaacggcggggagtgcaggcaatccgaggactatgagagcttctcctgtgtctgccccacgggctggcaagggcagacctgtgaggtcgacatcaacgagtgcgttctgagcccgtgccggcacggcgcatcctgccagaacacccacggcggctaccgctgccactgccaggccggctacagtgggcgcaactgcgagaccgacatcgacgactgccggcccaacccgtgtcacaacgggggctcctgcacagacggcatcaacacggccttctgcgactgcctgcccggcttccggggcactttctgtgaggaggacatcaacgagtgtgccagtgacccctgccgcaacggggccaactgcacggactgcgtggacagctacacgtgcacctgccccgcaggcttcagcgggatccactgtgagaacaacacgcctgactgcacagagagctcctgcttcaacggtggcacctgcgtggacggcatcaactcgttcacctgcctgtgtccacccggcttcacgggcagctactgccagcacgatgtcaatgagtgcgactcacagccctgcctgcatggcggcacctgtcaggacggctgcggctcctacaggtgcacctgcccccagggctacactggccccaactgccagaaccttgtgcactggtgtgactcctcgccctgcaagaacggcggcaaatgctggcagacccacacccagtaccgctgcgagtgccccagcggctggaccggcctttactgcgacgtgcccagcgtgtcctgtgaggtggctgcgcagcgacaaggtgttgacgttgcccgcctgtgccagcatggagggctctgtgtggacgcgggcaacacgcaccactgccgctgccaggcgggctacacaggcagctactgtgaggacctggtggacgagtgctcacccagcccctgccagaacggggccacctgcacggactacctgggcggctactcctgcaagtgcgtggccggctaccacggggtgaactgctctgaggagatcgacgagtgcctctcccacccctgccagaacgggggcacctgcctcgacctccccaacacctacaagtgctcctgcccacggggcactcagggtgtgcactgtgagatcaacgtggacgactgcaatccccccgttgaccccgtgtcccggagccccaagtgctttaacaacggcacctgcgtggaccaggtgggcggctacagctgcacctgcccgccgggcttcgtgggtgagcgctgtgagggggatgtcaacgagtgcctgtccaatccctgcgacgcccgtggcacccagaactgcgtgcagcgcgtcaatgacttccactgcgagtgccgtgctggtcacaccgggcgccgctgcgagtccgtcatcaatggctgcaaaggcaagccctgcaagaatgggggcacctgcgccgtggcctccaacaccgcccgcgggttcatctgcaagtgccctgcgggcttcgagggcgccacgtgtgagaatgacgctcgtacctgcggcagcctgcgctgcctcaacggcggcacatgcatctccggcccgcgcagccccacctgcctgtgcctgggccccttcacgggccccgaatgccagttcccggccagcagcccctgcctgggcggcaacccctgctacaaccaggggacctgtgagcccacatccgagagccccttctaccgttgcctgtgccccgccaaattcaacgggctcttgtgccacatcctggactacagcttcgggggtggggccgggcgcgacatccccccgccgctgatcgaggaggcgtgcgagctgcccgagtgccaggaggacgcgggcaacaaggtctgcagcctgcagtgcaacaaccacgcgtgcggctgggacggcggtgactgctccctcaacttcaatgacccctggaagaactgcacgcagtctctgcagtgctggaagtacttcagtgacggccactgtgacagccagtgcaactcagccggctgcctcttcgacggctttgactgccagcgtgcggaaggccagtgcaaccccctgtacgaccagtactgcaaggaccacttcagcgacgggcactgcgaccagggctgcaacagcgcggagtgcgagtgggacgggctggactgtgcggagcatgtacccgagaggctggcggccggcacgctggtggtggtggtgctgatgccgccggagcagctgcgcaacagctccttccacttcctgcgggagctcagccgcgtgctgcacaccaacgtggtcttcaagcgtgacgcacacggccagcagatgatcttcccctactacggccgcgaggaggagctgcgcaagcaccccatcaagcgtgccgccgagggctgggccgcacctgacgccctgctgggccaggtgaaggcctcgctgctccctggtggcagcgagggtgggcggcggcggagggagctggaccccatggacgtccgcggctccatcgtctacctggagattgacaaccggcagtgtgtgcaggcctcctcgcagtgcttccagagtgccaccgacgtggccgcattcctgggagcgctcgcctcgctgggcagcctcaacatcccctacaagatcgaggccgtgcagagtgagaccgtggagccgcccccgccggcgcagctgcacttcatgtacgtggcggcggccgcctttgtgcttctgttcttcgtgggctgcggggtgctgctgtcccgcaagcgccggcggcagcatggccagctctggttccctgagggcttcaaagtgtctgaggccagcaagaagaagcggcgggagcccctcggcgaggactccgtgggcctcaagcccctgaagaacgcttcagacggtgccctcatggacgacaaccagaatgagtggggggacgaggacctggagaccaagaagttccggttcgaggagcccgtggttctgcctgacctggacgaccagacagaccaccggcagtggactcagcagcacctggatgccgctgacctgcgcatgtctgccatggcccccacaccgccccagggtgaggttgacgccgactgcatggacgtcaatgtccgcgggcctgatggcttcaccccgctcatgatcgcctcctgcagcgggggcggcctggagacgggcaacagcgaggaagaggaggacgcgccggccgtcatctccgacttcatctaccagggcgccagcctgcacaaccagacagaccgcacgggcgagaccgccttgcacctggccgcccgctactcacgctctgatgccgccaagcgcctgctggaggccagcgcagatgccaacatccaggacaacatgggccgcaccccgctgcatgcggctgtgtctgccgacgcacaaggtgtcttccagatcctgatccggaaccgagccacagacctggatgcccgcatgcatgatggcacgacgccactgatcctggctgcccgcctggccgtggagggcatgctggaggacctcatcaactcacacgccgacgtcaacgccgtagatgacctgggcaagtccgccctgcactgggccgccgccgtgaacaatgtggatgccgcagttgtgctcctgaagaacggggctaacaaagatatgcagaacaacagggaggagacacccctgtttctggccgcccgggagggcagctacgagaccgccaaggtgctgctggaccactttgccaaccgggacatcacggatcatatggaccgcctgccgcgcgacatcgcacaggagcgcatgcatcacgacatcgtgaggctgctggacgagtacaacctggtgcgcagcccgcagctgcacggagccccgctggggggcacgcccaccctgtcgcccccgctctgctcgcccaacggctacctgggcagcctcaagcccggcgtgcagggcaagaaggtccgcaagcccagcagcaaaggcctggcctgtggaagcaaggaggccaaggacctcaaggcacggaggaagaagtcccaggacggcaagggctgcctgctggacagctccggcatgctctcgcccgtggactccctggagtcaccccatggctacctgtcagacgtggcctcgccgccactgctgccctccccgttccagcagtctccgtccgtgcccctcaaccacctgcctgggatgcccgacacccacctgggcatcgggcacctgaacgtggcggccaagcccgagatggcggcgctgggtgggggcggccggctggcctttgagactggcccacctcgtctctcccacctgcctgtggcctctggcaccagcaccgtcctgggctccagcagcggaggggccctgaatttcactgtgggcgggtccaccagtttgaatggtcaatgcgagtggctgtcccggctgcagagcggcatggtgccgaaccaatacaaccctctgcgggggagtgtggcaccaggccccctgagcacacaggccccctccctgcagcatggcatggtaggcccgctgcacagtagccttgctgccagcgccctgtcccagatgatgagctaccagggcctgcccagcacccggctggccacccagcctcacctggtgcagacccagcaggtgcagccacaaaacttacagatgcagcagcagaacctgcagccagcaaacatccagcagcagcaaagcctgcagccgccaccaccaccaccacagccgcaccttggcgtgagctcagcagccagcggccacctgggccggagcttcctgagtggagagccgagccaggcagacgtgcagccactgggccccagcagcctggcggtgcacactattctgccccaggagagccccgccctgcccacgtcgctgccatcctcgctggtcccacccgtgaccgcagcccagttcctgacgcccccctcgcagcacagctactcctcgcctgtggacaacacccccagccaccagctacaggtgcctgagcaccccttcctcaccccgtcccctgagtcccctgaccagtggtccagctcgtccccgcattccaacgtctccgactggtccgagggcgtctccagccctcccaccagcatgcagtcccagatcgcccgcattccggaggccttcaagtaaacggcgcgccccacgagaccccggcttcctttcccaagccttcgggcgtctgtgtgcgctctgtggatgccagggccgaccagaggagcctttttaaaacacatgtttttatacaaaataagaacgaggattttaattttttttagtatttatttatgtacttttattttacacagaaacactgcctttttatttatatgtactgttttatctggccccaggtagaaacttttatctattctgagaaaacaagcaagttctgagagccagggttttcctacgtaggatgaaaagattcttctgtgtttataaaatataaacaaagattcatgatttataaatgccatttatttattgattccttttttcaaaatccaaaaagaaatgatgttggagaagggaagttgaacgagcatagtccaaaaagctcctggggcgtccaggccgcgccctttccccgacgcccacccaaccccaagccagcccggccgctccaccagcatcacctgcctgttaggagaagctgcatccagaggcaaacggaggcaaagctggctcaccttccgcacgcggattaatttgcatctgaaataggaaacaagtgaaagcatatgggttagatgttgccatgtgttttagatggtttcttgcaagcatgcttgtgaaaatgtgttctcggagtgtgtatgccaagagtgcacccatggtaccaatcatgaatctttgtttcaggttcagtattatgtagttgttcgttggttatacaagttcttggtccctccagaaccaccccggccccctgcccgttcttgaaatgtaggcatcatgcatgtcaaacatgagatgtgtggactgtggcacttgcctgggtcacacacggaggcatcctacccttttctggggaaagacactgcctgggctgaccccggtggcggccccagcacctcagcctgcacagtgtcccccaggttccgaagaagatgctccagcaacacagcctgggccccagctcgcgggacccgaccccccgtgggctcccgtgttttgtaggagacttgccagagccgggcacattgagctgtgcaacgccgtgggctgcgtcctttggtcctgtccccgcagccctggcagggggcatgcggtcgggcaggggctggagggaggcgggggctgcccttgggccacccctcctagtttgggaggagcagatttttgcaataccaagtatagcctatggcagaaaaaatgtctgtaaatatgtttttaaaggtggattttgtttaaaaaatcttaatgaatgagtctgttgtgtgtcatgccagtgagggacgtcagacttggctcagctcggggagccttagccgcccatgcactggggacgctccgctgccgtgccgcctgcactcctcagggcagcctcccccggctctacgggggccgcgtggtgccatccccagggggcatgaccagatgcgtcccaagatgttgatttttactgtgttttataaaatagagtgtagtttacagaaaaagactttaaaagtgatctacatgaggaactgtagatgatgtatttttttcatcttttttgttaactgatttgcaataaaaatgatactgatggtga

SEQ ID NO: 13999 - DNA, 652 bp, Homo sapiens
  source 1..652: mol_type = unassigned DNA
atcttcccctactacggccgcgaggaggagctgcgcaagcaccccatcaagcgtgccgccgagggctgggccgcacctgacgccctgctgggccaggtgaaggcctcgctgctccctggtggcagcgagggtgggcggcggcggagggagctggaccccatggacgtccgcggctccatcgtctacctggagattgacaaccggcagtgtgtgcaggcctcctcgcagtgcttccagagtgccaccgacgtggccgcattcctgggagcgctcgcctcgctgggcagcctcaacatcccctacaagatcgaggccgtgcagactcagtgcgagtgcagcgatttgaagttgactaatcctccttccttaaaggagaaaaaagtaaaagccgtctccagatagagtcggctggtgcaggagagaatttagcgatagtttgcaattctgattaatcgcgtagaaaatgaccttattttggagggcgggatggaggagagtgggtgaggaggcgcccggacgcggagccagtccgccgccccccggccaccagcctgctgcgtagccgctgcctgatgtccgggcacctgcccctggcccccgtgcccgcaggtgagaccgtggagccgcccccgccggcgcagctgcacttcat

SEQ ID NO: 14000 - DNA, 743 bp, Homo sapiens
  source 1..743: mol_type = unassigned DNA
ccacgtggtggaccgcagaggcgtggcagactatgcctgcagctgtgccctgggcttctctgggcccctctgcctgacacccctggacaatgcctgcctcaccaacccctgccgcaacgggggcacctgcgacctgctcacgctgacggagtacaagtgccgctgcccgcccggctggtcagggaaatcgtgccagcaggctgacccgtgcgcctccaacccctgcgccaacggtggccagtgcctgcccttcgaggcctcctacatctgccactgcccacccagcttccatggccccacctgccggcaggatgtcaacgagtgtggccagaagcccgggctttgccgccacggaggcacctgccacaacgaggtcggctcctaccgctgcgtctgccgcgccacccacactggccccaactgcgagcggccctacgtgccctgcagcccctcgccctgccagaacgggggcacctgccgccccacgggcgacgtcacccacgagtgtgcctgcctgccaggtagtgctgcccgctggccggggtgcacgagcccctccccggctgccaggcccagggggtgggaacggggcgcctggtgtaggggcagccctgggagggcccatggcggggagttgggaaggcgggatggcgagttccccagactgcgtgtggtgtcggggggacgcgtctggagcggggtgtgcgctgggaggaggcttgcacagggtccaggtgccagcc

SEQ ID NO: 14001 - DNA, 8666 bp, Homo sapiens
  source 1..8666: mol_type = unassigned DNA
gcggcgcggaggctggcccgggacgcgcccggagcccagggaaggagggaggaggggagggtcgcggccggccgccatggggccgggggcccgtggccgccgccgccgccgtcgcccgatgtcgccgccaccgccaccgccacccgtgcgggcgctgcccctgctgctgctgctagcggggccgggggctgcagcccccccttgcctggacggaagcccgtgtgcaaatggaggtcgttgcacccagctgccctcccgggaggctgcctgcctgtgcccgcctggctgggtgggtgagcggtgtcagctggaggacccctgtcactcaggcccctgtgctggccgtggtgtctgccagagttcagtggtggctggcaccgcccgattctcatgccggtgcccccgtggcttccgaggccctgactgctccctgccagatccctgcctcagcagcccttgtgcccacggtgcccgctgctcagtggggcccgatggacgcttcctctgctcctgcccacctggctaccagggccgcagctgccgaagcgacgtggatgagtgccgggtgggtgagccctgccgccatggtggcacctgcctcaacacacctggctccttccgctgccagtgtccagctggctacacagggccactatgtgagaaccccgcggtgccctgtgcaccctcaccatgccgtaacgggggcacctgcaggcagagtggcgacctcacttacgactgtgcctgtcttcctgggtttgagggtcagaattgtgaagtgaacgtggacgactgtccaggacaccgatgtctcaatggggggacatgcgtggatggcgtcaacacctataactgccagtgccctcctgagtggacaggccagttctgcacggaggacgtggatgagtgtcagctgcagcccaacgcctgccacaatgggggtacctgcttcaacacgctgggtggccacagctgcgtgtgtgtcaatggctggacaggcgagagctgcagtcagaatatcgatgactgtgccacagccgtgtgcttccatggggccacctgccatgaccgcgtggcttctttctactgtgcctgccccatgggcaagactggcctcctgtgtcacctggatgacgcctgtgtcagcaacccctgccacgaggatgctatctgtgacacaaatccggtgaacggccgggccatttgcacctgtcctcccggcttcacgggtggggcatgtgaccaggatgtggacgagtgctctatcggcgccaacccctgcgagcacttgggcaggtgcgtgaacacgcagggctccttcctgtgccagtgcggtcgtggctacactggacctcgctgtgagaccgatgtcaacgagtgtctgtcggggccctgccgaaaccaggccacgtgcctcgaccgcataggccagttcacctgtatctgtatggcaggcttcacaggaacctattgcgaggtggacattgacgagtgtcagagtagcccctgtgtcaacggtggggtctgcaaggaccgagtcaatggcttcagctgcacctgcccctcgggcttcagcggctccacgtgtcagctggacgtggacgaatgcgccagcacgccctgcaggaatggcgccaaatgcgtggaccagcccgatggctacgagtgccgctgtgccgagggctttgagggcacgctgtgtgatcgcaacgtggacgactgctcccctgacccatgccaccatggtcgctgcgtggatggcatcgccagcttctcatgtgcctgtgctcctggctacacgggcacacgctgcgagagccaggtggacgaatgccgcagccagccctgccgccatggcggcaaatgcctagacctggtggacaagtacctctgccgctgcccttctgggaccacaggtgtgaactgcgaagtgaacattgacgactgtgccagcaacccctgcacctttggagtctgccgtgatggcatcaaccgctacgactgtgtctgccaacctggcttcacagggcccctttgtaacgtggagatcaatgagtgtgcttccagcccatgcggcgagggaggttcctgtgtggatggggaaaatggcttccgctgcctctgcccgcctggctccttgcccccactctgcctccccccgagccatccctgtgcccatgagccctgcagtcacggcatctgctatgatgcacctggcgggttccgctgtgtgtgtgagcctggctggagtggcccccgctgcagccagagcctggcccgagacgcctgtgagtcccagccgtgcagggccggtgggacatgcagcagcgatggaatgggtttccactgcacctgcccgcctggtgtccagggacgtcagtgtgaactcctctccccctgcaccccgaacccctgtgagcatgggggccgctgcgagtctgcccctggccagctgcctgtctgctcctgcccccagggctggcaaggcccacgatgccagcaggatgtggacgagtgtgctggccccgcaccctgtggccctcatggtatctgcaccaacctggcagggagtttcagctgcacctgccatggagggtacactggcccttcctgcgatcaggacatcaatgactgtgaccccaacccatgcctgaacggtggctcgtgccaagacggcgtgggctccttttcctgctcctgcctccctggtttcgccggcccacgatgcgcccgcgatgtggatgagtgcctgagcaacccctgcggcccgggcacctgtaccgaccacgtggcctccttcacctgcacctgcccgccaggctacggaggcttccactgcgaacaggacctgcccgactgcagccccagctcctgcttcaatggcgggacctgtgtggacggcgtgaactcgttcagctgcctgtgccgtcccggctacacaggagcccactgccaacatgaggcagacccctgcctctcgcggccctgcctacacgggggcgtctgcagcgccgcccaccctggcttccgctgcacctgcctcgagagcttcacgggcccgcagtgccagacgctggtggattggtgcagccgccagccttgtcaaaacgggggtcgctgcgtccagactggggcctattgcctttgtccccctggatggagcggacgcctctgtgacatccgaagcttgccctgcagggaggccgcagcccagatcggggtgcggctggagcagctgtgtcaggcgggtgggcagtgtgtggatgaagacagctcccactactgcgtgtgcccagagggccgtactggtagccactgtgagcaggaggtggacccctgcttggcccagccctgccagcatggggggacctgccgtggctatatggggggctacatgtgtgagtgtcttcctggctacaatggtgataactgtgaggacgacgtggacgagtgtgcctcccagccctgccagcacgggggttcatgcattgacctcgtggcccgctatctctgctcctgtcccccaggaacgctgggggtgctctgcgagattaatgaggatgactgcggcccaggcccaccgctggactcagggccccggtgcctacacaatggcacctgcgtggacctggtgggtggtttccgctgcacctgtcccccaggatacactggtttgcgctgcgaggcagacatcaatgagtgtcgctcaggtgcctgccacgcggcacacacccgggactgcctgcaggacccaggcggaggtttccgttgcctttgtcatgctggcttctcaggtcctcgctgtcagactgtcctgtctccctgcgagtcccagccatgccagcatggaggccagtgccgtcctagcccgggtcctgggggtgggctgaccttcacctgtcactgtgcccagccgttctggggtccgcgttgcgagcgggtggcgcgctcctgccgggagctgcagtgcccggtgggcgtcccatgccagcagacgccccgcgggccgcgctgcgcctgccccccagggttgtcgggaccctcctgccgcagcttcccggggtcgccgccgggggccagcaacgccagctgcgcggccgccccctgtctccacgggggctcctgccgccccgcgccgctcgcgcccttcttccgctgcgcttgcgcgcagggctggaccgggccgcgctgcgaggcgcccgccgcggcacccgaggtctcggaggagccgcggtgcccgcgcgccgcctgccaggccaagcgcggggaccagcgctgcgaccgcgagtgcaacagcccaggctgcggctgggacggcggcgactgctcgctgagcgtgggcgacccctggcggcaatgcgaggcgctgcagtgctggcgcctcttcaacaacagccgctgcgaccccgcctgcagctcgcccgcctgcctctacgacaacttcgactgccacgccggtggccgcgagcgcacttgcaacccggtgtacgagaagtactgcgccgaccactttgccgacggccgctgcgaccagggctgcaacacggaggagtgcggctgggatgggctggattgtgccagcgaggtgccggccctgctggcccgcggcgtgctggtgctcacagtgctgctgccgccagaggagctactgcgttccagcgccgactttctgcagcggctcagcgccatcctgcgcacctcgctgcgcttccgcctggacgcgcacggccaggccatggtcttcccttaccaccggcctagtcctggctccgaaccccgggcccgtcgggagctggcccccgaggtgatcggctcggtagtaatgctggagattgacaaccggctctgcctgcagtcgcctgagaatgatcactgcttccccgatgcccagagcgccgctgactacctgggagcgttgtcagcggtggagcgcctggacttcccgtacccactgcgggacgtgcggggggagccgctggagcctccagaacccagcgtcccgctgctgccactgctagtggcgggcgctgtcttgctgctggtcattctcgtcctgggtgtcatggtggcccggcgcaagcgcgagcacagcaccctctggttccctgagggcttctcactgcacaaggacgtggcctctggtcacaagggccggcgggaacccgtgggccaggacgcgctgggcatgaagaacatggccaagggtgagagcctgatgggggaggtggccacagactggatggacacagagtgcccagaggccaagcggctaaaggtagaggagccaggcatgggggctgaggaggctgtggattgccgtcagtggactcaacaccatctggttgctgctgacatccgcgtggcaccagccatggcactgacaccaccacagggcgacgcagatgctgatggcatggatgtcaatgtgcgtggcccagatggcttcaccccgctaatgctggcttccttctgtgggggggctctggagccaatgccaactgaagaggatgaggcagatgacacatcagctagcatcatctccgacctgatctgccagggggctcagcttggggcacggactgaccgtactggcgagactgctttgcacctggctgcccgttatgcccgtgctgatgcagccaagcggctgctggatgctggggcagacaccaatgcccaggaccactcaggccgcactcccctgcacacagctgtcacagccgatgcccagggtgtcttccagattctcatccgaaaccgctctacagacttggatgcccgcatggcagatggctcaacggcactgatcctggcggcccgcctggcagtagagggcatggtggaagagctcatcgccagccatgctgatgtcaatgctgtggatgagcttgggaaatcagccttacactgggctgcggctgtgaacaacgtggaagccactttggccctgctcaaaaatggagccaataaggacatgcaggatagcaaggaggagacccccctattcctggccgcccgcgagggcagctatgaggctgccaagctgctgttggaccactttgccaaccgtgagatcaccgaccacctggacaggctgccgcgggacgtagcccaggagagactgcaccaggacatcgtgcgcttgctggatcaacccagtgggccccgcagcccccccggtccccacggcctggggcctctgctctgtcctccaggggccttcctccctggcctcaaagcggcacagtcggggtccaagaagagcaggaggccccccgggaaggcggggctggggccgcaggggccccgggggcggggcaagaagctgacgctggcctgcccgggccccctggctgacagctcggtcacgctgtcgcccgtggactcgctggactccccgcggcctttcggtgggccccctgcttcccctggtggcttcccccttgaggggccctatgcagctgccactgccactgcagtgtctctggcacagcttggtggcccaggccgggcgggtctagggcgccagccccctggaggatgtgtactcagcctgggcctgctgaaccctgtggctgtgcccctcgattgggcccggctgcccccacctgcccctccaggcccctcgttcctgctgccactggcgccgggaccccagctgctcaacccagggacccccgtctccccgcaggagcggcccccgccttacctggcagtcccaggacatggcgaggagtacccggcggctggggcacacagcagccccccaaaggcccgcttcctgcgggttcccagtgagcacccttacctgaccccatcccccgaatcccctgagcactgggccagcccctcacctccctccctctcagactggtccgaatccacgcctagcccagccactgccactggggccatggccaccaccactggggcactgcctgcccagccacttcccttgtctgttcccagctcccttgctcaggcccagacccagctggggccccagccggaagttacccccaagaggcaagtgttggcctgagacgctcgtcagttcttagatcttgggggcctaaagagacccccgtcctgcctcctttctttctctgtctcttccttccttttagtctttttcatcctcttctctttccaccaaccctcctgcatccttgccttgcagcgtgaccgagataggtcatcagcccagggcttcagtcttcctttatttataatgggtgggggctaccacccaccctctcagtcttgtgaagagtctgggacctccttcttccccacttctctcttccctcattcctttctctctccttctggcctctcatttccttacactctgacatgaatgaattattattatttttatttttctttttttttttacattttgtatagaaacaaattcatttaaacaaacttattattattattttttacaaaatatatatatggagatgctccctccccctgtgaaccccccagtgcccccgtggggctgagtctgtgggcccattcggccaagctggattctgtgtacctagtacacaggcatgactgggatcccgtgtaccgagtacacgacccaggtatgtaccaagtaggcacccttgggcgcacccactggggccaggggtcgggggagtgttgggagcctcctccccaccccacctccctcacttcactgcattccagatgggacatgttccatagccttgctggggaagggcccactgccaactccctctgccccagccccacccttggccatctccctttgggaactagggggctgctggtgggaaatgggagccagggcagatgtatgcattcctttgtgtccctgtaaatgtgggactacaagaagaggagctgcctgagtggtactttctcttcctggtaatcctctggcccagcctcatggcagaatagaggtatttttaggctatttttgtaatatggcttctggtcaaaatccctgtgtagctgaattcccaagccctgcattgtacagccccccactcccctcaccacctaataaaggaatagttaacactcagtgttgttggtctgtgtctaggtaaggtggggagtggtggcagtgggacttctatctcccccacccagggctaacttgagctcccatcttggggtaaatacatttgacttgccagtctacttatgcttcctcttttggcagatgactaccgattggattagtggttgtcacctgacttaagctgagccaatcagattcttttgctcgagaactttctttaatggagaggctaagaaagttgtcagttggtggagctcttaaggtcacaatcagatttagaaatatcagtggccaattcgaggtggtgggcaaagagacaagcaaacagggcagaagaatgaagctaatattcagggagaatcagaaatgagagctcaaatggctccttgagggctgggggggttatctcggctcccagtgcagttatcaattccagttaattgagtgttcattccattgagatcaacaggtatttattaattgctttctaagtatctgatcatggttctgcatgaatttcacttttacttcatgctcctatgggttttggagataaccttggacccatgtaataaatacttctttacttgtgcca

SEQ ID NO: 14002 - DNA, 564 bp, Homo sapiens
  source 1..564: mol_type = unassigned DNA
gcctgatgggggaggtggccacagactggatggacacagagtgcccagaggccaagcggctaaaggtagaggagccaggcatgggggctgaggaggctgtggattgccgtcagtggactcaacaccatctggttgctgctgacatccgcgtggcaccagccatggcactgacaccaccacagggcgacgcagatgctgatggcatggatgtcaatgtgcgtggcccagattctcatccgaaaccgctctacagacttggatgcccgcatggcagatggctcaacggcactgatcctggcggcccgcctggcagtagagggcatggtggaagagctcatcgccagccatgctgatgtcaatgctgtggatgagcttgggaaatcagccttacactgggctgcggctgtgaacaacgtggaagccactttggccctgctcaaaaatggagccaataaggacatgcaggatagcaaggaggagacccccctattcctggccgcccgcgagggcagctatgaggctgccaagctgctgttggaccactttgccaaccgtgagatcacc

SEQ ID NO: 14003 - DNA, 559 bp, Homo sapiens
  source 1..559: mol_type = unassigned DNA
tcagcttggggcacggactgaccgtactggcgagactgctttgcacctggctgcccgttatgcccgtgctgatgcagccaagcggctgctggatgctggggcagacaccaatgcccaggaccactcaggccgcactcccctgcacacagctgtcacagccgatgcccagggtgtcttccagattctcatccgaaaccgctctacagacttggatgcccgcatggcagatggctcaacggcactgatcctggcggcccgcctggcagtagagggcatggtggaagagctcatcgccagccatgctgatgtcaatgctgtggatgagcttgggaaatcagccttacactgggctgcggctgtgaacaacgtggaagccactttggccctgctcaaaaatggagccaataaggacatgcaggatagcaaggtgagccccagcccttggtccactgggtgtcagcagtggcacagtgccattgcaatccagcctgggcaacagagtgagactctctcaaaaaacaaaacaaaataaaaccccaaacattggattaaaatataa

SEQ ID NO: 14004 - DNA, 3858 bp, Homo sapiens
  source 1..3858: mol_type = unassigned DNA
gggccgggggcccgtggccgccgccgccgccgtcgcccgatgtcgccgccaccgccaccgccacccgtgcgggcgctgcccctgctgctgctgctagcggggccgggggctgcagcccccccttgcctggacggaagcccgtgtgcaaatggaggtcgttgcacccagctgccctcccgggaggctgcctgcctgtgcccgcctggctgggtgggtgagcggtgtcagctggaggacccctgtcactcaggcccctgtgctggccgtggtgtctgccagagttcagtggtggctggcaccgcccgattctcatgccggtgcccccgtggcttccgaggccctgactgctccctgccagatccctgcctcagcagcccttgtgcccacggtgcccgctgctcagtggggcccgatggacgcttcctctgctcctgcccacctggctaccagggccgcagctgccgaagcgacgtggatgagtgccgggtgggtgagccctgccgccatggtggcacctgcctcaacacacctggctccttccgctgccagtgtccagctggctacacagggccactatgtgagaaccccgcggtgccctgtgcaccctcaccatgccgtaacgggggcacctgcaggcagagtggcgacctcacttacgactgtgcctgtcttcctgggtttgagggtcagaattgtgaagtgaacgtggacgactgtccaggacaccgatgtctcaatggggggacatgcgtggatggcgtcaacacctataactgccagtgccctcctgagtggacaggccagttctgcacggaggacgtggatgagtgtcagctgcagcccaacgcctgccacaatgggggtacctgcttcaacacgctgggtggccacagctgcgtgtgtgtcaatggctggacaggcgagagctgcagtcagaatatcgatgactgtgccacagccgtgtgcttccatggggccacctgccatgaccgcgtggcttctttctactgtgcctgccccatgggcaagactggcctcctgtgtcacctggatgacgcctgtgtcagcaacccctgccacgaggatgctatctgtgacacaaatccggtgaacggccgggccatttgcacctgtcctcccggcttcacgggtggggcatgtgaccaggatgtggacgagtgctctatcggcgccaacccctgcgagcacttgggcaggtgcgtgaacacgcagggctccttcctgtgccagtgcggtcgtggctacactggacctcgctgtgagaccgatgtcaacgagtgtctgtcggggccctgccgaaaccaggccacgtgcctcgaccgcataggccagttcacctgtatctgtatggcaggcttcacaggaacctattgcgaggtggacattgacgagtgtcagagtagcccctgtgtcaacggtggggtctgcaaggaccgagtcaatggcttcagctgcacctgcccctcgggcttcagcggctccacgtgtcagctggacgtggacgaatgcgccagcacgccctgcaggaatggcgccaaatgcgtggaccagcccgatggctacgagtgccgctgtgccgagggctttgagggcacgctgtgtgatcgcaacgtggacgactgctcccctgacccatgccaccatggtcgctgcgtggatggcatcgccagcttctcatgtgcctgtgctcctggctacacgggcacacgctgcgagagccaggtggacgaatgccgcagccagccctgccgccatggcggcaaatgcctagacctggtggacaagtacctctgccgctgcccttctgggaccacaggtgtgaactgcgaagtgaacattgacgactgtgccagcaacccctgcacctttggagtctgccgtgatggcatcaaccgctacgactgtgtctgccaacctggcttcacagggcccctttgtaacgtggagatcaatgagtgtgcttccagcccatgcggcgagggaggttcctgtgtggatggggaaaatggcttccgctgcctctgcccgcctggctccttgcccccactctgcctccccccgagccatccctgtgcccatgagccctgcagtcacggcatctgctatgatgcacctggcgggttccgctgtgtgtgtgagcctggctggagtggcccccgctgcagccagagcctggcccgagacgcctgtgagtcccagccgtgcagggccggtgggacatgcagcagcgatggaatgggtttccactgcacctgcccgcctggtgtccagggacgtcagtgtgaactcctctccccctgcaccccgaacccctgtgagcatgggggccgctgcgagtctgcccctggccagctgcctgtctgctcctgcccccagggctggcaagacccatgcctgaacggtggctcgtgccaagacggcgtgggctccttttcctgctcctgcctccctggtttcgccggcccacgatgcgcccgcgatgtggatgagtgcctgagcaacccctgcggcccgggcacctgtaccgaccacgtggcctccttcacctgcacctgcccgccaggctacggaggcttccactgcgaacaggacctgcccgactgcagccccagctcctgcttcaatggcgggacctgtgtggacggcgtgaactcgttcagctgcctgtgccgtcccggctacacaggagcccactgccaacatgaggcagacccctgcctctcgcggccctgcctacacgggggcgtctgcagcgccgcccaccctggcttccgctgcacctgcctcgagagcttcacgggcccgcagtgccagacgctggtggattggtgcagccgccagccttgtcaaaacgggggtcgctgcgtccagactggggcctattgcctttgtccccctggatggagcggacgcctctgtgacatccgaagcttgccctgcagggaggccgcagcccagatcggggtgcggctggagcagctgtgtcaggcgggtgggcagtgtgtggatgaagacagctcccactactgcgtgtgcccagagggccgtactggtagccactgtgagcaggaggtggacccctgcttggcccagccctgccagcatggggggacctgccgtggctatatggggggctacatgtgtgagtgtcttcctggctacaatggtgataactgtgaggacgacgtggacgagtgtgcctcccagccctgccagcacgggggttcatgcattgacctcgtggcccgctatctctgctcctgtcccccaggaacgctgggggtgctctgcgagattaatgaggatgactgcggcccaggcccaccgctggactcagggccccggtgcctacacaatggcacctgcgtggacctggtgggtggtttccgctgcacctgtcccccaggatacactggtttgcgctgcgaggcagacatcaatgagtgtcgctcaggtgcctgccacgcggcacacacccgggactgcctgcaggacccaggcggaggtttccgttgcctttgtcatgctggcttctcaggtcctcgctgtcagactgtcctgtctccctgcgagtcccagccatgccagcatggaggccagtgccgtcctagcccgggtcctgggggtgggctgaccttcacctgtcactgtgcccagccgttctggggtccgcgttgcgagcgggtggcgcgctcctgccgggagctgcagtgcccggtgggcgtcccatgccagcagacgccccgcgggccgcgctgcgcctgccccccagggttgtcgggaccctcctgccgcagcttcccggggtcgccgccgggggccagcaacgccagctgc

SEQ ID NO: 14005 - DNA, 748 bp, Homo sapiens
  source 1..748: mol_type = unassigned DNA
cggtgcctacacaatggcacctgcgtggacctggtgggtggtttccgctgcacctgtcccccaggatacactggtttgcgctgcgaggcagacatcaatgagtgtcgctcaggtgcctgccacgcggcacacacccgggactgcctgcaggacccaggcggaggtttccgttgcctttgtcatgctggcttctcaggtcctcgctgtcagactgtcctgtctccctgcgagtcccagccatgccagcatggaggccagtgccgtcctagcccgggtcctgggggtgggctgaccttcacctgtcactgtgcccaggtaggtgtgggtggcggcctttggaggaggagtaggggcgtggcctctggagtagtaggggcgtggcgtctaggaggaggatgtggctttaggggagacatcgaagggaagggagtttctggaaaatgctgacatttccgccgggtgtggtagctcacacctgtaatcccagcacattgggaggccgaggcgggaggatcacttgaggccaggagttagagaccagcctgggcaacatggtgaaaccccgtctctactaaaaatataaaaattagccgggcgtagtggcagctgcctgtaatcccagctactcgggaggctgaggcaggagaatcacttgaacccgggaggcggaggttgcagtgagccatcacgccattgcactccagcctggcgactgagtgacactccgtctcaaaaaacaaagaaacaa

SEQ ID NO: 14006 - DNA, 558 bp, Homo sapiens
  source 1..558: mol_type = unassigned DNA
tctgcccacctcggcctcccaaagtgctgggattacctactggtagtgcgctgaacatctgtgtgtgtccttttgtgctggggttctttgcgtcttcatgggtatgtccaggtgggtctgtgtcccactaagctgagtgggtccctctcttaccccactgaagtgtcttcctggctacaatggtgataactgtgaggacgacgtggacgagtgtgcctcccagccctgccagcacgggggttcatgcattgacctcgtggcccgctatctctgctcctgtcccccaggaacgctgggggtgctctgcgagattaatgaggatgactgcggcccaggcccaccgctggactcagggccccggtgcctacacaatggcacctgcgtggacctggtgggtggtttccgctgcacctgtcccccaggatacactggtttgcgctgcgaggcagacatcaatgagtgtcgctcaggtgcctgccacgcggcacacacccgggactgcctgcaggacccaggcggaggtttccgttgcctttgtcatgctggcttctcaggtcc

SEQ ID NO: 14007 - DNA, 3303 bp, Homo sapiens
  source 1..3303: mol_type = unassigned DNA
gctatataaggcggcgtgaggcaggcgaggggggcagcgcagccgagcggagcccaggagagcagagagcgagcctgagcgagagacggggaagcacggaggaggaagccgccggtgcgtcgggacgggagcgcaggtgctcgggcacccgagctggagctccgcagccgccggtcatgtaccgctccaccaagggcgcctccaaggcgcgccgggaccagatcaacgccgagatccggaacctcaaggagctgctgccgctggccgaagcggacaaggtccggctgtcctacctgcacatcatgagcctcgcctgcatctacactcgcaagggcgtcttcttcgctggtggcactcctctggcgggccccacggggcttctctcagctcaagagcttgaggacatcgtagcggcactacccggctttctgcttgtgttcacagccgaggggaaattgctctacctgtctgagagtgtgagcgagcatctgggccactccatggtggacctggttgcccagggtgacagcatctacgacatcattgacccagctgaccacctcactgtgcgccagcaactcaccctgccctctgccctggacactgatcgcctcttccgctgccgcttcaacacctccaagtccctcaggcgccagagtgcaggcaacaaactcgtgcttattcgaggccgattccatgctcacccacctggagcctactgggcaggaaatcccgtgttcacagctttctgtgcccctctggagccgagaccccgcccaggtcctggccctggccctggccctgcctcgctcttcctggccatgttccagagccgccatgctaaagacctggctctactggacatctccgagagtgtcctaatctacctgggctttgagcgcagtgaactgctttgtaaatcatggtatggactgctgcaccccgaggacctggcccacgcttctgctcaacactaccgcctgttggctgagagtggagatattcaggcagagatggtggtgaggctacaggccaagactggaggctgggcatggatttactgcctgttatactcagaaggtccagagggacccattactgccaataactacccaatcagtgacatggaagcctggagcctccgccagcagttgaactctgaagacacccaggcagcttatgtcctgggcactccgaccatgctgccctcattccctgaaaacattctttcccaggaagagtgctccagcactaacccactcttcaccgcagcactgggggctcccagaagcaccagcttccccagtgctcctgaactgagtgttgtctctgcatcagaagagcttccccgaccctccaaagaactggacttcagttacctgacattcccttctgggcctgagccttctctccaagcagaactaagcaaggatcttgtgtgcactccaccttacacgccccatcagccaggaggctgtgccttcctcttcagcctccatgagcccttccagacccatttgcccaccccatccagcactcttcaagaacagctgactccaagcactgcgaccttctctgatcagttgacgcccagcagtgcaaccttcccagatccactaactagcccactgcaaggccagttgactgaaacctcggtcagaagctatgaagaccagttgactccctgcacctccaccttcccagaccagctgcttcccagcacagccaccttcccagagcctctgggcagccctgcccatgaacagctgactcctcccagcacagcattccaagcacacctggacagccccagccaaaccttcccagagcaactgagccccaaccctaccaagacttactttgcccaggagggatgcagttttctctatgagaagttgcccccaagtcctagcagccctggtaatggggactgcacgctcttggccctagcccagctccggggccccctctctgtggatgtccccctggtgcccgaaggcctgctcacacctgaggcctctccagtcaagcagagtttcttccactactctgaaaaggagcagaatgagatagaccgtctcatccagcagattagccaattggctcagggcatggacagacccttctcagctgaggctggcactggcggactagagccacttggaggactggagcccctggactccaacctgtccctgtcaggggcaggcccccctgtgctcagcctggacctgaaaccctggaaatgccaggagctggacttcctggctgaccctgataacatgttcctggaagagacgcccgtggaagacatcttcatggatctctctaccccagatcccagtgaggaatggggctcaggggatcctgaggcagagggcccaggaggggccccatcgccttgcaacaacctgtccccagaagaccacagcttcctggaggacctggccacatatgaaaccgcctttgagacaggtgtctcagcattcccctatgatgggtttactgatgagttgcatcaactccagagccaagttcaagacagcttccatgaagatggaagtggaggggaaccaacgttttgaataagtctgtgacttaacgtcgtcaagtatggcatattgtcatcaagacgtggagccgctctccacccccccgggactgttggggggattctgagggccagagggggatatatatgattccccaggccctgcaggattttggggggggggaggtgggagggcaagggaggggagcttctttttaaaatcaagagacttcgagcgatcccagtttccatttcaatctgtattcactcgtagtgagtttccttgaatgggatttcaagcggagaatgggggagtctcacttccccgccgccttgccccattggcctgggccagttctccactcctaggggccaagccacccctagccttggtgggggaaaggcagggcccacccgggccagcccgtgccctgaggggctcttgacacccacgtagaattctctacacaccagtaacgggatttcaattccgatggactctgccgccctggcggcccttcctgtgacttttgcgccccgcgcctggggtggggggtgcgaagagacgctacgttcctttccgatggaggaaggcagacctgccgtcacacgtgtgcttgcacgagtgcgtgtacctggtgcgggactcacccggccgccagactgcctgggcctgcccagatggccacctcgtggtgctgcggtgactttgtagccaactttataataaagtccagtttgcctttttggta

SEQ ID NO: 14008 - DNA, 2454 bp, Homo sapiens
  source 1..2454: mol_type = unassigned DNA
ggggaagcacggaggaggaagccgccggtgcgtcgggacgggagcgcaggtgctcgggcacccgagctggagctccgcagccgccggtcatgtaccgctccaccaagggcgcctccaaggcgcgccgggaccagatcaacgccgagatccggaacctcaaggagctgctgccgctggccgaagcggacaaggtccggctgtcctacctgcacatcatgagcctcgcctgcatctacactcgcaagggcgtcttcttcgctggtggcactcctctggcgggccccacggggcttctctcagctcaagagcttgaggacatcgtagcggcactacccggctttctgcttgtgttcacagccgaggggaaattgctctacctgtctgagagtgtgagcgagcatctgggccactccatggtggacctggttgcccagggtgacagcatctacgacatcattgacccagctgaccacctcactgtgcgccagcaactcaccctgccctctgccctggacactgatcgcctcttccgctgccgcttcaacacctccaagtccctcaggcgccagagtgcaggcaacaaactcgtgcttattcgaggccgattccatgctcacccacctggagcctactgggcaggaaatcccgtgttcacagctttctgtgcccctctggagccgagaccccgcccaggtcctggccctggccctggccctgcctcgctcttcctggccatgttccagagccgccatgctaaagacctggctctactggacatctccgagagtggctgagagtggagatattcaggcagagatggtggtgaggctacaggccaagactggaggctgggcatggatttactgcctgttatactcagaaggtccagagggacccattactgccaataactacccaatcagtgacatggaagcctggagcctccgccagcagttgaactctgaagacacccaggcagcttatgtcctgggcactccgaccatgctgccctcattccctgaaaacattctttcccaggaagagtgctccagcactaacccactcttcaccgcagcactgggggctcccagaagcaccagcttccccagtgctcctgaactgagtgttgtctctgcatcagaagagcttccccgaccctccaaagaactggacttcagttacctgacattcccttctgggcctgagccttctctccaagcagaactaagcaaggatcttgtgtgcactccaccttacacgccccatcagccaggaggctgtgccttcctcttcagcctccatgagcccttccagacccatttgcccaccccatccagcactcttcaagaacagctgactccaagcactgcgaccttctctgatcagttgacgcccagcagtgcaaccttcccagatccactaactagcccactgcaaggccagttgactgaaacctcggtcagaagctatgaagaccagttgactccctgcacctccaccttcccagaccagctgcttcccagcacagccaccttcccagagcctctgggcagccctgcccatgaacagctgactcctcccagcacagcattccaagcacacctggacagccccagccaaaccttcccagagcaactgagccccaaccctaccaagacttactttgcccaggagggatgcagttttctctatgagaagttgcccccaagtcctagcagccctggtaatggggactgcacgctcttggccctagcccagctccggggccccctctctgtggatgtccccctggtgcccgaaggcctgctcacacctgaggcctctccagtcaagcagagtttcttccactactctgaaaaggagcagaatgagatagaccgtctcatccagcagattagccaattggctcagggcatggacagacccttctcagctgaggctggcactggcggactagagccacttggaggactggagcccctggactccaacctgtccctgtcaggggcaggcccccctgtgctcagcctggacctgaaaccctggaaatgccaggagctggacttcctggctgaccctgataacatgttcctggaagagacgcccgtggaagacatcttcatggatctctctaccccagatcccagtgaggaatggggctcaggggatcctgaggcagagggcccaggaggggccccatcgccttgcaacaacctgtccccagaagaccacagcttcctggaggacctggccacatatgaaaccgcctttgagacaggtgtctcagcattcccctatgatgggtttactgatgagttgcatcaactccagagccaagttcaagacagcttccatgaagatggaagtggaggggaaccaacgttttgaataagtctgtgacttaacgtcgtcaagtatggcatattgtcatcaagacgtggagccgctctccac

SEQ ID NO: 14009 - DNA, 326 bp, Homo sapiens
  source 1..326: mol_type = unassigned DNA
tggccatgttccagagccgccatgctaaagacctggctctactggacatctccgagagtggctgagagtggagatattcaggcagagatggtggtgaggctacaggccaagactggaggctgggcatggatttactgcctgttatactcagaaggtccagagggacccattactgccaataactacccaatcaggtaagccacaagccaggggactagggggcagctgaggtcgtcatggaggagacacaaatcagggaactgctctggatatggacgtcggacccttaccagctgcctcttctctcctctccagtgacatggaag

SEQ ID NO: 14010 - DNA, 878 bp, Homo sapiens
  source 1..878: mol_type = unassigned DNA
gctatataaggcggcgtgaggcaggcgaggggggcagcgcagccgagcggagcccaggagagcagagagcgagcctgagcgagagacggggaagcacggaggaggaagccgccggtgcgtcgggacgggagcgcaggtgctcgggcacccgagctggagctccgcagccgccggtcatgtaccgctccaccaagggcgcctccaaggcgcgccgggaccagatcaacgccgagatccggaacctcaaggagctgctgccgctggccgaagcggacaaggtccggctgtcctacctgcacatcatgagcctcgcctgcatctacactcgcaagggcgtcttcttcgctggtggcactcctctggcgggccccacggggcttctctcagctcaagagcttgaggacatcgtagcggcactacccggctttctgcttgtgttcacagccgaggggaaattgctctacctgtctgagagtgtgagcgagcatctgggccactccatggtggacctggttgcccagggtgacagcatctacgacatcattgacccagctgaccacctcactgtgcgccagcaactcaccctgccctctgccctggacactgatcgcctcttccgctgccgcttcaacacctccaagtccctcaggcgccagagtgcaggcaacaaactcgtgcttattcgaggccgattccatgctcacccacctggagcctactgggcaggaaatcccgtgttcacagctttctgtgcccctctggagccgagaccccgcccaggtcctggccctggccctggccctgcctcgctcttcctggccatgttccagagccgccatgctaaagacctggctctactggacatctccgagagtgga

SEQ ID NO: 14011 - DNA, 2144 bp, Homo sapiens
  source 1..2144: mol_type = unassigned DNA
gggcagttgggattctccgtacgcctcggaaacagcagcccaaacctcacaacgcagaaccacgagatagtggggattgcagagccctgcgcaagagaaggaaaattaagacgcagcggagcccaggaggtgcccgcacgcgggaaggactggcgtgcagacgaggcagggggaggtttgcactcggcgtggcgcgggtgagccgcgtgctctcgggcacccggccgccagttcggatgcttccgatcctcggggagccggggcgctgcgccggagtcacttcagcccatgttgttcaggtgacacccggggaagagcagactccagtgtgcaaaacgtttcggggtttccgggccagcggttccgggcgcgcctcgcgggcggcggcgcagaactacaacccccaggctccctggcgtggcggcacgtgggcccgagccgggcggccgcggatataaagcgcggcggcggctgccgggcggagcggctgcacggacaagagcggaggcctggaaggggaaactgaagcagaaagaggttacttaatgggctcaaggtcacctacctgacctaccagcagctcaatggccttcccaaagaagaaacttcagggtcttgtggctgcaaccatcacgccaatgactgagaatggagaaatcaacttttcagtaattggtcagtatgtggattatcttgtgaaagaacagggagtgaagaacatttttgtgaatggcacaacaggagaaggcctgtccctgagcgtctcagagcgtcgccaggttgcagaggagtgggtgacaaaagggaaggacaagctggatcaggtgataattcacgtaggagcactgagcttgaaggagtcacaggaactggcccaacatgcagcagaaataggagctgatggcatcgctgtcattgcaccgttcttcctcaagccatggaccaaagatatcctgattaatttcctaaaggaagtggctgctgccgcccctgccctgccattttattactatcacattcctgccttgacaggggtaaagattcgtgctgaggagttgttggatgggattctggataagatccccaccttccaagggctgaaattcagtgatacagatctcttagacttcgggcaatgtgttgatcagaatcgccagcaacagtttgctttcctttttggggtggatgagcaactgttgagtgctctggtgatgggagcaactggagcagtgggcagtacctataactacctgggaaaaaagacaaaccagatgttggaggcttttgaacaaaaggacttctctttagccctgaactatcagttttgtatccagagatttatcaactttgttgtcaaactagaaaactcaaaactcaaagtttcaaagaaccaaaggactcttcctctgggcaccacaaacttccccttcctccactgagaagactgtctctcccgcaggaccctgaattattgaaatcgaaggctgacttcctttctgcagtgagcccaggggctaatgttattatcctgtcacacttgcaactagtgacttttgtttagtgatagaagatttggggaggacccaaaggactcagaactttctctccatacctccttttactcttttctttctgtgtaatgtatcaacaactgtttaatctcccttctaacaaaccttgatataagctttctgatatcaaagtatattgacagttaacccttactgattttaaacttgactatccagtctgttaattacctaagattttgttttcatttcatctctaattgttttgatcattggcagagaaagagtatttgaaattcatatcagttttgctccttattttaatctctttgaattaaaaataaaactttttcaaaatggaaatttgaaattataagtagacttcaattatctttgctaatcctctctttaattagtcagctagttaaaagttgttatattcatatatcctcaaccctctttttgcctttgtagcttttaatttcctgaaagaagaaaatgagttgttcgtttttggttctgaggatgtgatatccgtacttactgatactaaagccaaatttaaattctaaaattaattcttgggtatccaataaacaaagaactatttttcta

SEQ ID NO: 14012 - DNA, 804 bp, Homo sapiens
  source 1..804: mol_type = unassigned DNA
gcagacgaggcagggggaggtttgcactcggcgtggcgcgggtgagccgcgtgctctcgggcacccggccgccagttcggatgcttccgatcctcggggagccggggcgctgcgccggagtcacttcagcccatgttgttcaggtgacacccggggaagagcagactccagtgtgcaaaacgtttcggggtttccgggccagcggttccgggcgcgcctcgcgggcggcggcgcagaactacaacccccaggctccctggcgtggcggcacgtgggcccgagccgggcggccgcggatataaagcgcggcggcggctgccgggcggagcggctgcacggacaagagcggaggcctggaaggggaaactgaagcagaaagaggttacttaatgggctcaaggtcacctacctgacctaccagcagctcaatggccttcccaaagaagaaacttcagggtcttgtggctgcaaccatcacgccaatgactgagaatggttttaagaaagactggcatcagctgtttctcaatgcatcagtcacttgttcgcagatcaaacagaagacatgtgattgcatgaatcggcaggatttacttcctgttacagaagaaatcaacttttcagtaattggtcagtatgtggattatcttgtgaaagaacagggagtgaagaacatttttgtgaatggcacaacaggagaaggcctgtccctgagcgtctcagagcgtcgccaggttgcagaggagtgggtgacaaaagggaaggacaagctggatcaggtgataattcacgtaggagcactga

SEQ ID NO: 14013 - DNA, 2369 bp, Homo sapiens
  source 1..2369: mol_type = unassigned DNA
ggccgcggatataaagcgcggcggcggctgccgggcggagcggctgcacggacaagagcggaggcctggaaggggaaactgaagcagaaagaggttacttaatgggctcaaggtcacctacctgacctaccagcagctcaatggccttcccaaagaagaaacttcagggtcttgtggctgcaaccatcacgccaatgactgagaatggagaaatcaacttttcagtaattggtcagtatgtggattatcttgtgaaagaacagggagtgaagaacatttttgtgaatggcacaacaggagaaggcctgtccctgagcgtctcagagcgtcgccaggttgcagaggagtgggtgacaaaagggaaggacaagtcaaaccatcataagttggggaccatccgcacaacccaaagtagacggagtagctttagaagacagctgaaggcctggcacagtggctcacacctgtaatcccagcactttgggaggccaagtggtagctgtgcctagcagcccaggagaaagaggaagagcaaatggatgattggcttcacctaaaccaagagaaaggggtagtgaagggaggggtcgtgcaataaaactgctggtgagagttcaacaggctggatcaggtgataattcacgtaggagcactgagcttgaaggagtcacaggaactggcccaacatgcagcagaaataggagctgatggcatcgctgtcattgcaccgttcttcctcaagccatggaccaaagatatcctgattaatttcctaaaggaagtggctgctgccgcccctgccctgccattttattactatcacattcctgccttgacaggggtaaagattcgtgctgaggagttgttggatgggattctggataagatccccaccttccaagggctgaaattcagtgatacagatctcttagacttcgggcaatgtgttgatcagaatcgccagcaacagtttgctttcctttttggggtggatgagcaactgttgagtgctctggtgatgggagcaactggagcagtgggcagtacctataactacctgggaaaaaagacaaaccagatgttggaggcttttgaacaaaaggacttctctttagccctgaactatcagttttgtatccagagatttatcaactttgttgtcaaactaggtaagtgccacccatcttctgctttgtctgctgctggagactgtaaagaaaatggaataccatcactttctctgagggttcaacaagaacactttttaatggtctgttgcaagcagagttctgtttcccttattaaccctcggggccaaccatataaaactgtgaagtaaacctagttggaaaatctttggcaaccttctccattttagcacatgcctaccccattttccattctttctctcctaaaccatcagcactccctccctttacttgcttcagctcattaaaattctactactgcattgaggttgatttcagcctaagtgcttggaggaaggcagtctaaatacagattttactaaattgtgaatgactgacagctctcccaagagtatttacaatttaaacagagtttattaacacaagtaagcctaaatggatggaggtttggataatatgacaaagtaaaattggggagcagtcgtggggagaaatacagtgaatttgagtagagaaaccgctccagagtctcttaaatcttctataacaaatgacaaatgccactatccactcttctgcaagagattggcccttgggccaattgaatctgcgttaatgcaggaaaatttttaagtttatttttggtagacctccctgctccctgtcagagtcctgcataattctgacaactcctccctctcccccaagcacctcttctgtgttatgcccctcattcttgcagggttctcaacccactctcttactccttcaaggacgtttctgtttgtttttccactttcgtgatttttgcacatttgtgtgctgccagtgctatgaactacctattattgttccatttttctaagcaatggtttcacaaaattgtgggtttggtgtgataattattatgttcctaaaatacattaaaataggtattgaactgttaaaattttagacaaactaaaagcttgatgtgtgtagtagtccccccttatctcagggggatatgttccaagatgaccagtggatgcctgaaattgcagataatacgaaaccctatatatactatgttttttcctgtacatgcatacctatggtaaagtttaatttataaattaggcatagtaagagataaacagtaactaataataaaatagaacaattataacaatatactgcaataaaagttatataactatg

SEQ ID NO: 14014 - DNA, 1536 bp, Homo sapiens
  source 1..1536: mol_type = unassigned DNA
gggcggagcggctgcacggacaagagcggaggcctggaaggggaaactgaagcagaaagaggttacttaatgggctcaaggtcacctacctgacctaccagcagctcaatggccttcccaaagaagaaacttcagggtcttgtggctgcaaccatcacgccaatgactgagaatggagaaatcaacttttcagtaattggtcagtatgtggattatcttgtgaaagaacagggagtgaagaacatttttgtgaatggcacaacaggagaaggcctgtccctgagcgtctcagagcgtcgccaggttgcagaggagtgggtgacaaaagggaaggacaagctggatcaggtgataattcacgtaggagcactgagcttgaaggagtcacaggaactggcccaacatgcagcagaaataggagctgatggcatcgctgtcattgcaccgttcttcctcaagccatggaccaaagatatcctgattaatttcctaaaggaagtggctgctgccgcccctgccctgccattttattactatcacattcctgccttgacaggggtaaagattcgtgctgaggagttgttggatgggattctggataagatccccaccttccaagggctgaaattcagtgatacagatctcttagacttcgggcaatgtgttgatcagaatcgccagcaacagtttgctttcctttttggggtggatgagttttgtatccagagatttatcaactttgttgtcaaactagaaaactcaaaactcaaagtttcaaagaaccaaaggactcttcctctgggcaccacaaacttccccttcctccactgagaagactgtctctcccgcaggaccctgaattattgaaatcgaaggctgacttcctttctgcagtgagcccaggggctaatgttattatcctgtcacacttgcaactagtgacttttgtttagtgatagaagatttggggaggacccaaaggactcagaactttctctccatacctccttttactcttttctttctgtgtaatgtatcaacaactgtttaatctcccttctaacaaaccttgatataagctttctgatatcaaagtatattgacagttaacccttactgattttaaacttgactatccagtctgttaattacctaagattttgttttcatttcatctctaattgttttgatcattggcagagaaagagtatttgaaattcatatcagttttgctccttattttaatctctttgaattaaaaataaaactttttcaaaatggaaatttgaaattataagtagacttcaattatctttgctaatcctctctttaattagtcagctagttaaaagttgttatattcatatatcctcaaccctctttttgcctttgtagcttttaatttcctgaaagaagaaaatgagttgttcgtttttggttctgaggatgtgatatccgtacttactgatactaaagccaaatttaaattctaaaattaattcttgggtatccaataaacaaagaactatttttcta

SEQ ID NO: 14015 - DNA, 585 bp, Homo sapiens
  source 1..585: mol_type = unassigned DNA
ggagcggctgcacggacaagagcggaggcctggctatacctgctggaatggataaagtgagctttaaaagttgatcagaccgaagagattgaagtgagagaaccacaggaacaaagaaggggaaactgaagcagaaagaggttacttaatgggctcaaggtcacctacctgacctaccagcagctcaatggccttcccaaagaagaaacttcagggtcttgtggctgcaaccatcacgccaatgactgagaatggagaaatcaacttttcagtaattggtcagtatgtggattatcttgtgaaagaacagggagtgaagaacatttttgtgaatggcacaacaggagaaggcctgtccctgagcgtctcagagcgtcgccaggttgcagaggagtgggtgacaaaagggaaggacaagctggatcaggtgataattcacgtaggagcactgagcttgaaggagtcacaggaactggcccaacatgcagcagaaataggagctgatggcatcgctgtcattgcaccgttcttcctcaagccatggaccaaagatatcctgattaatttcctaaaggaagtggctgc

SEQ ID NO: 14016 - DNA, 518 bp, Homo sapiens
  source 1..518: mol_type = unassigned DNA
gaaggggaaactgaagcagaaagaggttacttaatgggctcaaggtcacctacctgagaaatcaacttttcagtaattggtcagtatgtggattatcttgtgaaagaacagggagtgaagaacatttttgtgaatggcacaacaggagaaggcctgtccctgagcgtctcagagcgtcgccaggttgcagaggagtgggtgacaaaagggaaggacaagtgagtggctgcatgaggataaaaatgccctttggcaacagctgtattcagtgagcctcttccccagaggatacgccctccctgcttcctggtcagagccggggcttgaggtcagctggtgggaagatgagcagggcccccgggatcctggcttcttggagaagagccccctccctttctgtgcagaagggcagccaaactgctagacacacctgccacccagaggttccgctgggaaactgcttcttacctgtctacaaggccagtcccctcacagttacccgtctttgggctgaaagg

SEQ ID NO: 14017 - DNA, 2231 bp, Homo sapiens
  source 1..2231: mol_type = unassigned DNA
acttaatgggctcaaggtcacctacctgacctaccagcagctcaatggccttcccaaagaagaaacttcagggtcttgtggctgcaaccatcacgccaatgactgagaatggagaaatcaacttttcagtaattggtcagtatgtggattatcttgtgaaagaacagggagtgaagaacatttttgtgaatggcacaacaggagaaggcctgtccctgagcgtctcagagcgtcgccaggttgcagaggagtgggtgacaaaagggaaggacaagctggatcaggtgataattcacgtaggagcactgagcttgaaggagtcacaggaactggcccaacatgcagcagaaataggagctgatggcatcgctgtcattgcaccgttcttcctcaagccatggaccaaagatatcctgattaatttcctaaaggaagtggctgctgccgcccctgccctgccattttattactatcacattcctgccttgacaggggtaaagattcgtgctgaggagttgttggatgggattctggataagatccccaccttccaagggctgaaattcagtgatacagatctcttagacttcgggcaatgtgttgatcagaatcgccagcaacagtttgctttcctttttggggtggatgagcaactgttgagtgctctggtgatgggagcaactggagcagtgggcagtacctataactacctgggaaaaaagacaaaccagatgttggaggcttttgaacaaaaggacttctctttagccctgaactatcagttttgtatccagagatttatcaactttgttgtcaaactaggttttggagtgtcacagaccaaagccatcatgactctggtctctgggattccaatgggcccaccccggcttccactgcagaaagcctccagggagtttactgatagtgctgaagctaaactgaagagcctggatttcctttctttcactgatttaaaggatggaaacttggaagctggtagctagtgcctctctatcaaatcagggtttgcaccttgagacataatctaccttaaatagtgcatttttttctcagggaattttagatgaacttgaataaactctcctagcaaatgaaatctcacaataagcattgaggtaccttttgtgagccttaaaaagtcttattttgtgaaggggcaaaaactctaggagtcacaactctcagtcattcatttcacagatttttttgtggagaaatttctgtttatatggatgaaatggaatcaagaggaaaattgtaattgattaattccatctgtctttaggagctctcattatctcggtctctggttcctaatcctattttaaagttgtctaattttaaaccactataatatgtcttcattttaataaatattcatttggaatctaggaaaactctgagctactgcatttaggcaggcactttaataccaaactgtaacatgtctcaactgtatacaactcaaaatacaccagctcatttggctgctcagtctaactctagaatggatgcttttgaattcatttcgatgtcaccacttttcgctctttaaaaacactgggtcaggtgaggacttgtttcagttcctataactaagtaaagggcggctttctcataacaaaggaaaaagtcttccccaaagatgaatttaagtctccacttttttctatacagaaaactcaaaactcaaagtttcaaagaaccaaaggactcttcctctgggcaccacaaacttccccttcctccactgagaagactgtctctcccgcaggaccctgaattattgaaatcgaaggctgacttcctttctgcagtgagcccaggggctaatgttattatcctgtcacacttgcaactagtgacttttgtttagtgatagaagatttggggaggacccaaaggactcagaactttctctccatacctccttttactcttttctttctgtgtaatgtatcaacaactgtttaatctcccttctaacaaaccttgatataagctttctgatatcaaagtatattgacagttaacccttactgattttaaacttgactatccagtctgttaattacctaagattttgttttcatttcatctctaattgttttgatcattggcagagaaagagtatttgaaattcatatcagttttgctccttattttaatctctttgaattaaaaataaaactttttcaaaatggaaa

SEQ ID NO: 14018 - DNA, 359 bp, Homo sapiens
  source 1..359: mol_type = unassigned DNA
tgttgatcagaatcgccagcaacagtttgctttcctttttggggtggatgagaaaactcaaaactcaaagtttcaaagaaccaaaggactcttcctctgggcaccacaaacttccccttcctccactgagaagactgtctctcccgcaggaccctgaattattgaaatcgaaggctgacttcctttctgcagtgagcccaggggctaatgttattatcctgtcacacttgcaactagtgacttttgtttagtgatagaagatttggggaggacccaaaggactcagaactttctctccatacctccttttactcttttctttctgtgtaatgtatcaacaactgtttaatctcccttct

SEQ ID NO: 14019 - DNA, 745 bp, Homo sapiens
  source 1..745: mol_type = unassigned DNA
ttccagacctaccagcagctcaatggccttcccaaagaagaaacttcagggtcttgtggctgcaaccatcacgccaatgactgagaatggagaaatcaacttttcagtaattggtcagtatgtggattatcttgtgaaagaacagggagtgaagaacatttttgtgaatggcacaacaggagaaggcctgtccctgagcgtctcagagcgtcgccaggttgcagaggagtgggtgacaaaagggaaggacaagctggatcaggtgataattcacgtaggagcactgagcttgaaggagtcacaggaactggcccaacatgcagcagaaataggagctgatggcatcgctgtcattgcaccgttcttcctcaagccatggaccaaagatatcctgattaatttcctaaaggaagtggctgctgccgcccctgccctgccattttattactatcacattcctgccttgacaggggtaaagattcgtgctgaggagttgttggatgggattctggataagatccccaccttccaagggctgaaattcagtgatacagatctcttagacttcgggcaatgtgttgatcagaatcgccagcaacagtttgctttcctttttggggtggatgagttttgtatccagagatttatcaactttgttgtcaaactagaaaactcaaaactcaaagtttcaaagaaccaaaggactcttcctctgggcaccacaaacttccccttcctccactga

SEQ ID NO: 14020 - DNA, 2461 bp, Homo sapiens
  source 1..2461: mol_type = unassigned DNA
ttccagacctaccagcagctcaatggccttcccaaagaagaaacttcagggtcttgtggctgcaaccatcacgccaatgactgagaatggagaaatcaacttttcagtaattggtcagtatgtggattatcttgtgaaagaacagggagtgaagaacatttttgtgaatggcacaacaggagaaggcctgtccctgagcgtctcagagcgtcgccaggttgcagaggagtgggtgacaaaagggaaggacaagctggatcaggtgataattcacgtaggagcactgagcttgaaggagtcacaggaactggcccaacatgcagcagaaataggagctgatggcatcgctgtcattgcaccgttcttcctcaagccatggaccaaagatatcctgattaatttcctaaaggaagtggctgctgccgcccctgccctgccattttattactatcacattcctgccttgacaggggtaaagattcgtgctgaggagttgttggatgggattctggataagatccccaccttccaagggctgaaattcagtgatacagatctcttagacttcgggcaatgtgttgatcagaatcgccagcaacagtttgctttcctttttggggtggatgagcaactgttgagtgctctggtgatgggagcaactggagcagtgggcagtacctataactacctgggaaaaaagacaaaccagatgttggaggcttttgaacaaaaggacttctctttagccctgaactatcagttttgtatccagagatttatcaactttgttgtcaaactaggttttggagtgtcacagaccaaagccatcatgactctggtctctgggattccaatgggcccaccccggcttccactgcagaaagcctccagggagtttactgatagtgctgaagctaaactgaagagcctggatttcctttctttcactgatttaaaggatggaaacttggaagctggtagctagtgcctctctatcaaatcagggtttgcaccttgagacataatctaccttaaatagtgcatttttttctcagggaattttagatgaacttgaataaactctcctagcaaatgaaatctcacaataagcattgaggtaccttttgtgagccttaaaaagtcttattttgtgaaggggcaaaaactctaggagtcacaactctcagtcattcatttcacagatttttttgtggagaaatttctgtttatatggatgaaatggaatcaagaggaaaattgtaattgattaattccatctgtctttaggagctctcattatctcggtctctggttcctaatcctattttaaagttgtctaattttaaaccactataatatgtcttcattttaataaatattcatttggaatctaggaaaactctgagctactgcatttaggcaggcactttaataccaaactgtaacatgtctcaactgtatacaactcaaaatacaccagctcatttggctgctcagtctaactctagaatggatgcttttgaattcatttcgatgtcaccacttttcgctctttaaaaacactgggtcaggtgaggacttgtttcagttcctataactaagtaaagggcggctttctcataacaaaggaaaaagtcttccccaaagatgaatttaagtctccacttttttctatacagaaaactcaaaactcaaagtttcaaagaaccaaaggactcttcctctgggcaccacaaacttccccttcctccactgagaagactgtctctcccgcaggaccctgaattattgaaatcgaaggctgacttcctttctgcagtgagcccaggggctaatgttattatcctgtcacacttgcaactagtgacttttgtttagtgatagaagatttggggaggacccaaaggactcagaactttctctccatacctccttttactcttttctttctgtgtaatgtatcaacaactgtttaatctcccttctaacaaaccttgatataagctttctgatatcaaagtatattgacagttaacccttactgattttaaacttgactatccagtctgttaattacctaagattttgttttcatttcatctctaattgttttgatcattggcagagaaagagtatttgaaattcatatcagttttgctccttattttaatctctttgaattaaaaataaaactttttcaaaatggaaatttgaaattataagtagacttcaattatctttgctaatcctctctttaattagtcagctagttaaaagttgttatattcatatatcctcaaccctctttttgcctttgtagcttttaatttcctgaaagaagaaaatgagttgttcgtttttggttctgaggatgtgatatccgtacttactgatactaaagccaaatttaaattctaaaattaattcttgggtatccaataaacaaagaactatttttcta

SEQ ID NO: 14021 - DNA, 3027 bp, Homo sapiens
  source 1..3027: mol_type = unassigned DNA
gcagacgaggcagggggaggtttgcactcggcgtggcgcgggtgagccgcgtgctctcgggcacccggccgccagttcggatgcttccgatcctcggggagccggggcgctgcgccggagtcacttcagcccatgttgttcaggtgacacccggggaagagcagactccagtgtgcaaaacgtttcggggtttccgggccagcggttccgggcgcgcctcgcgggcggcggcgcagaactacaacccccaggctccctggcgtggcggcacgtgggcccgagccgggcggccgcggatataaagcgcggcggcggctgccgggcggagcggctgcacggacaagagcggaggcctggagaaatcaacttttcagtaattggtcagtatgtggattatcttgtgaaagaacagggagtgaagaacatttttgtgaatggcacaacaggagaaggcctgtccctgagcgtctcagagcgtcgccaggttgcagaggagtgggtgacaaaagggaaggacaagtgagtggctgcatgaggataaaaatgccctttggcaacagctgtattcagtgagcctcttccccagaggatacgccctccctgcttcctggtcagagccggggcttgaggtcagctggtgggaagatgagcagggcccccgggatcctggcttcttggagaagagccccctccctttctgtgcagaagggcagccaaactgctagacacacctgccacccagaggttccgctgggaaactgcttcttacctgtctacaaggccagtcccctcacagttacccgtctttgggctgaaaggctggatcaggtgataattcacgtaggagcactgagcttgaaggagtcacaggaactggcccaacatgcagcagaaataggagctgatggcatcgctgtcattgcaccgttcttcctcaagccatggaccaaagatatcctgattaatttcctaaaggaagtggctgctgccgcccctgccctgccattttattactatcacattcctgccttgacaggggtaaagattcgtgctgaggagttgttggatgggattctggataagatccccaccttccaagggctgaaattcagtgatacagatctcttagacttcgggcaatgtgttgatcagaatcgccagcaacagtttgctttcctttttggggtggatgagcaactgttgagtgctctggtgatgggagcaactggagcagtgggcagtacctataactacctgggaaaaaagacaaaccagatgttggaggcttttgaacaaaaggacttctctttagccctgaactatcagttttgtatccagagatttatcaactttgttgtcaaactaggttttggagtgtcacagaccaaagccatcatgactctggtctctgggattccaatgggcccaccccggcttccactgcagaaagcctccagggagtttactgatagtgctgaagctaaactgaagagcctggatttcctttctttcactgatttaaaggatggaaacttggaagctggtagctagtgcctctctatcaaatcagggtttgcaccttgagacataatctaccttaaatagtgcatttttttctcagggaattttagatgaacttgaataaactctcctagcaaatgaaatctcacaataagcattgaggtaccttttgtgagccttaaaaagtcttattttgtgaaggggcaaaaactctaggagtcacaactctcagtcattcatttcacagatttttttgtggagaaatttctgtttatatggatgaaatggaatcaagaggaaaattgtaattgattaattccatctgtctttaggagctctcattatctcggtctctggttcctaatcctattttaaagttgtctaattttaaaccactataatatgtcttcattttaataaatattcatttggaatctaggaaaactctgagctactgcatttaggcaggcactttaataccaaactgtaacatgtctcaactgtatacaactcaaaatacaccagctcatttggctgctcagtctaactctagaatggatgcttttgaattcatttcgatgtcaccacttttcgctctttaaaaacactgggtcaggtgaggacttgtttcagttcctataactaagtaaagggcggctttctcataacaaaggaaaaagtcttccccaaagatgaatttaagtctccacttttttctatacagaaaactcaaaactcaaagtttcaaagaaccaaaggactcttcctctgggcaccacaaacttccccttcctccactgagaagactgtctctcccgcaggaccctgaattattgaaatcgaaggctgacttcctttctgcagtgagcccaggggctaatgttattatcctgtcacacttgcaactagtgacttttgtttagtgatagaagatttggggaggacccaaaggactcagaactttctctccatacctccttttactcttttctttctgtgtaatgtatcaacaactgtttaatctcccttctaacaaaccttgatataagctttctgatatcaaagtatattgacagttaacccttactgattttaaacttgactatccagtctgttaattacctaagattttgttttcatttcatctctaattgttttgatcattggcagagaaagagtatttgaaattcatatcagttttgctccttattttaatctctttgaattaaaaataaaactttttcaaaatggaaatttgaaattataagtagacttcaattatctttgctaatcctctctttaattagtcagctagttaaaagttgttatattcatatatcctcaaccctctttttgcctttgtagcttttaatttcctgaaagaagaaaatgagttgttcgtttttggttctgaggatgtgatatccgtacttactgatactaaagccaaatttaaattctaaaattaattcttgggtatccaataaacaaagaactatttttcta

SEQ ID NO: 14022 - DNA, 2376 bp, Homo sapiens
  source 1..2376: mol_type = unassigned DNA
ttccagacctaccagcagctcaatggccttcccaaagaagaaacttcagggtcttgtggctgcaaccatcacgccaatgactgagaatggagaaatcaacttttcagtaattggtcagtatgtggattatcttgtgaaagaacagggagtgaagaacatttttgtgaatggcacaacaggagaaggcctgtccctgagcgtctcagagcgtcgccaggttgcagaggagtgggtgacaaaagggaaggacaagctggatcaggtgataattcacgtaggagcactgagcttgaaggagtcacaggaactggcccaacatgcagcagaaataggagctgatggcatcgctgtcattgcaccgttcttcctcaagccatggaccaaagatatcctgattaatttcctaaaggaagtggctgctgccgcccctgccctgccattttattactatcacattcctgccttgacaggggtaaagattcgtgctgaggagttgttggatgggattctggataagatccccaccttccaagggctgaaattcagtgatacagatctcttagacttcgggcaatgtgttgatcagaatcgccagcaacagtttgctttcctttttggggtggatgagcaactgttgagtgctctggtgatgggagcaactggagcagtgggcagttttgtatccagagatttatcaactttgttgtcaaactaggttttggagtgtcacagaccaaagccatcatgactctggtctctgggattccaatgggcccaccccggcttccactgcagaaagcctccagggagtttactgatagtgctgaagctaaactgaagagcctggatttcctttctttcactgatttaaaggatggaaacttggaagctggtagctagtgcctctctatcaaatcagggtttgcaccttgagacataatctaccttaaatagtgcatttttttctcagggaattttagatgaacttgaataaactctcctagcaaatgaaatctcacaataagcattgaggtaccttttgtgagccttaaaaagtcttattttgtgaaggggcaaaaactctaggagtcacaactctcagtcattcatttcacagatttttttgtggagaaatttctgtttatatggatgaaatggaatcaagaggaaaattgtaattgattaattccatctgtctttaggagctctcattatctcggtctctggttcctaatcctattttaaagttgtctaattttaaaccactataatatgtcttcattttaataaatattcatttggaatctaggaaaactctgagctactgcatttaggcaggcactttaataccaaactgtaacatgtctcaactgtatacaactcaaaatacaccagctcatttggctgctcagtctaactctagaatggatgcttttgaattcatttcgatgtcaccacttttcgctctttaaaaacactgggtcaggtgaggacttgtttcagttcctataactaagtaaagggcggctttctcataacaaaggaaaaagtcttccccaaagatgaatttaagtctccacttttttctatacagaaaactcaaaactcaaagtttcaaagaaccaaaggactcttcctctgggcaccacaaacttccccttcctccactgagaagactgtctctcccgcaggaccctgaattattgaaatcgaaggctgacttcctttctgcagtgagcccaggggctaatgttattatcctgtcacacttgcaactagtgacttttgtttagtgatagaagatttggggaggacccaaaggactcagaactttctctccatacctccttttactcttttctttctgtgtaatgtatcaacaactgtttaatctcccttctaacaaaccttgatataagctttctgatatcaaagtatattgacagttaacccttactgattttaaacttgactatccagtctgttaattacctaagattttgttttcatttcatctctaattgttttgatcattggcagagaaagagtatttgaaattcatatcagttttgctccttattttaatctctttgaattaaaaataaaactttttcaaaatggaaatttgaaattataagtagacttcaattatctttgctaatcctctctttaattagtcagctagttaaaagttgttatattcatatatcctcaaccctctttttgcctttgtagcttttaatttcctgaaagaagaaaatgagttgttcgtttttggttctgaggatgtgatatccgtacttactgatactaaagccaaatttaaattctaaaattaattcttgggtatccaataaacaaagaactatttttcta

SEQ ID NO: 14023 - DNA, 4236 bp, Homo sapiens
  source 1..4236: mol_type = unassigned DNA
ggttccctccggatagccggagacttgggccggccggacgccccttctggcacactccctggggcaggcgctcacgcacgctacaaacacacactcctctttcctccctcgcgcgccctctctcatccttcttcacgaagcgctcactcgcaccctttctctctctctctctctctctctaacacgcacgcacactcccagttgttcacactcgggtcctctccagcccgacgttctcctggcacccacctgctccgcggcgccctgcgcgcccccctcggtcgcgccccttgcgctctcggcccagaccgtcgcagctacagggggcctcgagccccggggtgagcgtccccgtcccgctcctgctccttcccatagggacgcgcctgatgcctgggaccggccgctgagcccaaggggaccgaggaggccatggtaggagcgctcgcctgctgcggtgcccgctgaggccatgccggggccccggcgccccgctggctcccgcctgcgcctgctcctgctcctgctgctgccgccgctgctgctgctgctccggggcagccacgcgggcaacctgacggtagccgtggtactgccgctggccaatacctcgtacccctggtcgtgggcgcgcgtgggacccgccgtggagctggccctggcccaggtgaaggcgcgccccgacttgctgccgggctggacggtccgcacggtgctgggcagcagcgaaaacgcgctgggcgtctgctccgacaccgcagcgcccctggccgcggtggacctcaagtgggagcacaaccccgctgtgttcctgggccccggctgcgtgtacgccgccgccccagtggggcgcttcaccgcgcactggcgggtcccgctgctgaccgccggcgccccggcgctgggcttcggtgtcaaggacgagtatgcgctgaccacccgcgcggggcccagctacgccaagctgggggacttcgtggcggcgctgcaccgacggctgggctgggagcgccaagcgctcatgctctacgcctaccggccgggtgacgaagagcactgcttcttcctcgtggaggggctgttcatgcgggtccgcgaccgcctcaatattacggtggaccacctggagttcgccgaggacgacctcagccactacaccaggctgctgcggaccatgccgcgcaaaggccgagttatctacatctgcagctcccctgatgccttcagaaccctcatgctcctggccctggaagctggcttgtgtggggaggactacgttttcttccacctggatatctttgggcaaagcctgcaaggtggacagggccctgctccccgcaggccctgggagagaggggatgggcaggatgtcagtgcccgccaggcctttcaggctgccaaaatcattacatataaagacccagataatcccgagtacttggaattcctgaagcagttaaaacacctggcctatgagcagttcaacttcaccatggaggatggcctggtgaacaccatcccagcatccttccacgacgggctcctgctctatatccaggcagtgacggagactctggcacatgggggaactgttactgatggggagaacatcactcagcggatgtggaaccgaagctttcaaggtgtgacaggatacctgaaaattgatagcagtggcgatcgggaaacagacttctccctctgggatatggatcccgagaatggtgccttcagggttgtactgaactacaatgggacttcccaagagctggtggctgtgtcggggcgcaaactgaactggcccctggggtaccctcctcctgacatccccaaatgtggctttgacaacgaagacccagcatgcaaccaagatcacctttccaccctggaggtgctggctttggtgggcagcctctccttgctcggcattctgattgtctccttcttcatatacaggaagatgcagctggagaaggaactggcctcggagctgtggcgggtgcgctgggaggacgttgagcccagtagccttgagaggcacctgcggagtgcaggcagccggctgaccctgagcgggagaggctccaattacggctccctgctaaccacagagggccagttccaagtctttgccaagacagcatattataagggcaacctcgtggctgtgaaacgtgtgaaccgtaaacgcattgagctgacacgaaaagtcctgtttgaactgaagcatatgcgggatgtgcagaatgaacacctgaccaggtttgtgggagcctgcaccgacccccccaatatctgcatcctcacagagtactgtccccgtgggagcctgcaggacattctggagaatgagagcatcaccctggactggatgttccggtactcactcaccaatgacatcgtcaagggcatgctgtttctacacaatggggctatctgttcccatgggaacctcaagtcatccaactgcgtggtagatgggcgctttgtgctcaagatcaccgactatgggctggagagcttcagggacctggacccagagcaaggacacaccgtttatgccaaaaagctgtggacggcccctgagctcctgcgaatggcttcaccccctgtgcggggctcccaggctggtgacgtatacagctttgggatcatccttcaggagattgccctgaggagtggggtcttccacgtggaaggtttggacctgagccccaaagagatcatcgagcgggtgactcggggtgagcagccccccttccggccctccctggccctgcagagtcacctggaggagttggggctgctcatgcagcggtgctgggctgaggacccacaggagaggccaccattccagcagatccgcctgacgttgcgcaaatttaacagggagaacagcagcaacatcctggacaacctgctgtcccgcatggagcagtacgcgaacaatctggaggaactggtggaggagcggacccaggcatacctggaggagaagcgcaaggctgaggccctgctctaccagatcctgcctcactcagtggctgagcagctgaagcgtggggagacggtgcaggccgaagcctttgacagtgttaccatctacttcagtgacattgtgggtttcacagcgctgtcggcggagagcacacccatgcaggtggtgaccctgctcaatgacctgtacacttgctttgatgctgtcatagacaactttgatgtgtacaaggtggagacaattggcgatgcctacatggtggtgtcagggctccctgtgcggaacgggcggctacacgcctgcgaggtagcccgcatggccctggcactgctggatgctgtgcgctccttccgaatccgccaccggccccaggagcagctgcgcttgcgcattggcatccacacaggacctgtgtgtgctggagtggtgggactgaagatgccccgttactgtctctttggggatacagtcaacacagcctcaagaatggagtctaatggggaagccctgaagatccacttgtcttctgagaccaaggctgtcctggaggagtttggtggtttcgagctggagcttcgaggggatgtagaaatgaagggcaaaggcaaggttcggacctactggctccttggggagagggggagtagcacccgaggctgacctgcctcctctcctatccctccacacctccctaccctgtgccagaagcaacagaggtgccaggcctcagcctcacccacagcagccccatcgccaaaggatggaagtaatttgaatagctcaggtgtgctgaccccagtgaagacaccagataggacctctgagaggggactggcatggggggatctcagagcttacaggctgagccaagcccacggccatgcacagggacactcacacaggcacacgcacctgctctccacctggactcaggccgggctgggctgtggattcctgatcccctcccctccccatgctctcctccctcagccttgctaccctgtgacttactgggaggagaaagagtcacctgaaggggaacatgaaaagagactaggtgaagagagggcaggggagcccacatctggggctggcccacaatacctgctcccccgaccccctccacccagcagtagacacagtgcacaggggagaagaggggtggcgcagaagggttgggggcctgtatgccttgcttctaccatgagcagagacaattaaaatctttattccagtga

SEQ ID NO: 14024 - DNA, 473 bp, Homo sapiens
  source 1..473: mol_type = unassigned DNA
tttgtctgtttgtttctttatgcactcctggtaactcacagaacagaaaagaggttggtgatgctcactgggaattaggcaatgaagggcaggggactgcccaggggcgcttcgccaccagcaggctaaaaagataagaaaatgggcttgaggcgggaggaggataaagtcccacagcctggacaggacttggagaaggcatcccattggatcccctgctttggaatgggcatcgtttaaatagtaaaatctccctgtgatataggggtgttattttctcccatcctcttccaaaatcccagtgcctcttgttcccttccccacagctcccacctccatgcccttcatatgcccaccccagccgacctctgtttgcccctacaggtgaacaccatcccagcatccttccacgacgggctcctgctctatatccaggcagtgacggagactctggcacatgggggaactgttac

SEQ ID NO: 14025 - DNA, 1706 bp, Homo sapiens
  source 1..1706: mol_type = unassigned DNA
aaaatgtccatatgtctgaagcttcatacttgaccttggggtctcagaaaagaattgaactttcttccttctgttttcccctgctccccggtatcctgctatgccctcaaccctgagcgtctctagagacctcactgcagtctggagggggaagtgcctaggggcgggcgctcacggtaggctgtgctgctcctctcttaccacccccaccgccaccctctgcccccagggagaacagcagcaacatcctggacaacctgctgtcccgcatggagcagtacgcgaacaatctggaggaactggtggaggagcggacccaggcatacctggaggagaagcgcaaggctgaggccctgctctaccagatcctgcctcactcagtggctgagcagctgaagcgtggggagacggtgcaggccgaagcctttgacagtgttaccatctacttcagtgacattgtgggtttcacagcgctgtcggcggagagcacacccatgcaggtggtgaccctgctcaatgacctgtacacttgctttgatgctgtcatagacaactttgatgtgtacaaggtggagacaattggcgatgcctacatggtggtgtcagggctccctgtgcggaacgggcggctacacgcctgcgaggtagcccgcatggccctggcactgctggatgctgtgcgctccttccgaatccgccaccggccccaggagcagctgcgcttgcgcattggcatccacacaggacctgtgtgtgctggagtggtgggactgaagatgccccgttactgtctctttggggatacagtcaacacagcctcaagaatggagtctaatggggaagccctgaagatccacttgtcttctgagaccaaggctgtcctggaggagtttggtggtttcgagctggagcttcgaggggatgtagaaatgaaggtagagggagaagcctctgccctccccaccttttggggtcctagagggagttacccttctcaagcagccaatgccactcccatccctaaggctctcatctgactggggaaagggcatgtgccactccccagcccatcctcttttttccctccagggcaaaggcaaggttcggacctactggctccttggggagagggggagtagcacccgaggctgacctgcctcctctcctatccctccacacctccctaccctgtgccagaagcaacagaggtgccaggcctcagcctcacccacagcagccccatcgccaaaggatggaagtaatttgaatagctcaggtgtgctgaccccagtgaagacaccagataggacctctgagaggggactggcatggggggatctcagagcttacaggctgagccaagcccacggccatgcacagggacactcacacaggcacacgcacctgctctccacctggactcaggccgggctgggctgtggattcctgatcccctcccctccccatgctctcctccctcagccttgctaccctgtgacttactgggaggagaaagagtcacctgaaggggaacatgaaaagagactaggtgaagagagggcaggggagcccacatctggggctggcccacaatacctgctcccccgaccccctccacccagcagtagacacagtgcacaggggagaagaggggtggcgcagaagggttgggggcctgtatgccttgcttctaccatgagcagaga

SEQ ID NO: 14026 - DNA, 774 bp, Homo sapiens
  source 1..774: mol_type = unassigned DNA
cttctttgcgtggcagcatggcagagggatgtgctgtgtacggaacctggccctggggagggatgttccagctgttccggccttctgcccttgctggcctctgctccataggactggtggtgatcatgtgtgcgagcagtgacaccatccggagcatcatgctggtggcgcacaggcatggcatgaccagtggagactacgccttcttcaacattgagctcttcaacagctcttcctatggagatggctcatggaagagaggagacaaacacgactttgaagctaagcaagcatactcgtccctccagacagtcactctactgaggacagtgaaacctgagtttgagaagttttccatggaggtgaaaagttcagttgagaaacaagggctcaatatggaggattacgttaacatgtttgttgaaggattccacgatgccatcctcctctacgtcttggctctacatgaagtactcagagctggttacagcaaaaaggatggagggaaaattatacagcagacttggaacagaacatttgaaggtatcgccgggcaggtgtccatagatgccaacggagaccgatatggggatttctctgtgattgccatgactgatgtggaggcgggcacccaggaggttattggtgattattttggaaaagaaggtcgttttgaaatgcggccgaatgtcaaatatccttggggccctttaaaactgagaatagatgaaaaccgaattgtagagcatacaaacagctctccctgcaaatcat

SEQ ID NO: 14027 - DNA, 2715 bp, Homo sapiens
  source 1..2715: mol_type = unassigned DNA
ttctttttttttttttttaatctgtgctgccataaacgcctgcccttctgcaaattcaggaaagatttaattgctgtggagcactaaatctcaatttccagtgtgtgtggattaccctgtttgtggaattaaattttatacagatgtctcttttgctcctggttagtggctctaattaaataaatggaaattctcgcaggaattagaagctcctacttaacagtgaagatttcgggatcacagtgcataatctgaatataaatgacccagaagctgaaacattacccataatcacattgacggttccagaaagagcgataaggagagtgctgttaagggaggcgagcgctgacgccagaagttgccatatccccagaaaccccagtttgccttttcaccgtcgcaagtgagaaccagagcgcgttaaaggcctcggagtaaaaaacgcagcgtctgggactgcggcacccgggttgagtcgggtgcaagtttctgccgaaagagggcgtcggtctgagactaaaagaaatttgtggacacggacgcctagtcaaatgaaagaccattttaacacattttcaatgtatttaaatgtgcgggacttaattgtcagaattctcccgcccagtgtagcccgttcacattgcaaatgacttggctgcagtaggcacagaaggtccagttccattttgacccgccccgccgcgcggcggactcccgcgatgctcctctggtcacggacttctccagagccgcttccctccggtctccaccgctgctgtggctatggccagtgggaggactgggtctccgaggcaggacctttcttggagtcgcggaaccccagcacagtgcctcgagcgctccagagaaggagcggttggatctttgagcactcaggttggaggggagcgtgtgtcgtacccgggggacctaccgggaacgttttgggaaagacagtccctttatttaggtacctggtttagcaaacaaagccccgaggacgctttggggatgctttccaagctttgtgacacctccagaagttgaaccattccctcgcctttgggagcaacaagtttcactttcctgctctcagtgcgctgacagagggtccgtgagctgggacactgtgacctcggcaccgctgcgattccagcgcaaacctgcgtggcccagggggagggggctggcgcggggctgaggaaggcggggtgtaggtgacgcccgggccagccgggcacaccaggtccgcgatggagccatctgcactgggaccttggtccttgttccctgaccttgcgccgagggaccaggaaggtcaggtgctcgccccgcgtcggtgcttcaggagggaatgtggccagaacgagaaagtggtgatcatgtgtgcgagcagtgacaccatccggagcatcatgctggtggcgcacaggcatggcatgaccagtggagactacgccttcttcaacattgagctcttcaacagctcttcctatggagatggctcatggaagagaggagacaaacacgactttgaagctaagcaagcatactcgtccctccagacagtcactctactgaggacagtgaaacctgagtttgagaagttttccatggaggtgaaaagttcagttgagaaacaagggctcaatatggaggattacgttaacatgtttgttgaaggattccacgatgccatcctcctctacgtcttggctctacatgaagtactcagagctggttacagcaaaaaggatggagggaaaattatacagcagacttggaacagaacatttgaaggtatcgccgggcaggtgtccatagatgccaacggagaccgatatggggatttctctgtgattgccatgactgatgtggaggcgggcacccaggaggttattggtgattattttggaaaagaaggtcgttttgaaatgcggccgaatgtcaaatatccttggggccctttaaaactgagaatagatgaaaaccgaattgtagagcatacaaacagctctccctgcaaatcatcaggtggcctagaagaatcggcagtgacaggaattgtcgtgggggctttactaggagctggcttgctaatggccttctactttttcaggaagaaatacagaataaccattgagaggcgaacccagcaagaagaaagtaaccttggaaaacatcgggaattacgggaagattccatcagatcccatttttcagtagcttaaaggaagccccccactttttttttttctgcctgagattctttaaggagatagacgggttgaaagacatcaatgaaacagaaggggcgttcttgaagaattcataattttaagcagttagtaatttcattttaaaatttctgtagaagctcaggaattatgattaatcaccatctgcctccaggcctttcatctcatgacaaacaaatataataatgatatcgtgtcactctgttaaatgttcatactgtttcaagcccatatgattagatttatgtttttaaaatctgttgtctccatatcttgatggcttttgggagcatttcacacaaggatataaaatgcggttttcttaaatgaaatgttttgtagctagaataaaatcatttttacaagtacagcattcttggaaagaatttaacacccaaaaaggggaaaatgtaatgaaaaatctcaaggttggaaatacagccttactctctct

SEQ ID NO: 14028 - DNA, 1366 bp, Homo sapiens
  source 1..1366: mol_type = unassigned DNA
aggtccgcgatggagccatctgcactgggaccttggtccttgttccctgaccttgcgccgagggaccaggaaggtcaggtgctcgccccgcgtcggtgcttcaggagggaatgtggccagaacgagaaagtggtgatcatgtgtgcgagcagtgacaccatccggagcatcatgctggtggcgcacaggcatggcatgaccagtggagactacgccttcttcaacattgagctcttcaacagctcttcctatggagatggctcatggaagagaggagacaaacacgactttgaagctaagcaagcatactcgtccctccagacagtcactctactgaggacagtgaaacctgagtttgagaagttttccatggaggtgaaaagttcagttgagaaacaagggctcaatatggaggattacgttaacatgtttgttgaaggattccacgatgccatcctcctctacgtcttggctctacatgaagtactcagagctggttacagcaaaaaggatggagggaaaattatacagcagacttggaacagaacatttgaaggtatcgccgggcaggtgtccatagatgccaacggagaccgatatggggatttctctgtgattgccatgactgatgtggaggcgggcacccaggaggttattggtgattattttggaaaagaaggtcgttttgaaatgcggccgaatgtcaaatatccttggggccctttaaaactgagaatagatgaaaaccgaattgtagagcatacaaacagctctccctgcaaatcatgtaagtctggagacttaatttgctatgtatgtcatcacctctaacctcagtgtaatgtaagtttaaaacccaagtgtttctagggccttacattttggaattttacatttctttctctgatgtggtaaaacgcatgggaacagttcacaaactggcatctttcaggtcttccttcccttccagtcttctcttccacaatggtagaatgtttcttcctatttttacatctcttactataatctcttggctaggtcatgtttccacttttagagaaaatcaaaatatcaattagtaaatatcactcccttattcatctgtcacagcaagtctcgttctgatttttcaagtttgtggttactttccagctcctcagaaccaaagagataacatcctttaaacatctgaacatttacacattggcaaataagtgtaagatgtattacttatgagcagctttgtatataagtagagaagcaattggatgttctcataagtagcttacaaataggaaagctgttagaaataattgttttagagaataaggtagtgagggagaacaaagtgaatataggtccttca

SEQ ID NO: 14029 - DNA, 7344 bp, Homo sapiens
  source 1..7344: mol_type = unassigned DNA
acgcccaaataagaagccacctctaagcaaaatagtatatgtataaacggagggcgaatatatacaagtatatatatatgtatattacagacgcacaggtttacacccggtgaactttttctttttctttttcttttttttttaagaaaaactagtgacattgcagagaaggacgcttcctctctatcttttggcgcattagtgaagggggtattctattttgttaaagcgcccaagggggcgcagggaccttggagagaagagtggggaggaaagaggaagggtgggtggggggcagagggcgagtcggcggcggcgagggcaagctctttcttgcggcacgatgccgtctctgctggtgctcactttctccccgtgcgtactactcggctgggcgttgctggccggcggcaccggtggcggtggcgttggcggcggcggcggtggcgcgggcataggcggcggacgccaggagagagaggcgctgccgccacagaagatcgaggtgctggtgttactgccccaggatgactcgtacttgttttcactcacccgggtgcggccggccatcgagtatgctctgcgcagcgtggagggcaacgggactgggaggcggcttctgccgccgggcactcgcttccaggtggcttacgaggattcagactgtgggaaccgtgcgctcttcagcttggtggaccgcgtggcggcggcgcggggcgccaagccagaccttatcctggggccagtgtgcgagtatgcagcagcgccagtggcccggcttgcatcgcactgggacctgcccatgctgtcggctggggcgctggccgctggcttccagcacaaggactctgagtactcgcacctcacgcgcgtggcgcccgcctacgccaagatgggcgagatgatgctcgccctgttccgccaccaccactggagccgcgctgcactggtctacagcgacgacaagctggagcggaactgctacttcaccctcgagggggtccacgaggtcttccaggaggagggtttgcacacgtccatctacagtttcgacgagaccaaagacttggatctggaagacatcgtgcgcaatatccaggccagtgagagagtggtgatcatgtgtgcgagcagtgacaccatccggagcatcatgctggtggcgcacaggcatggcatgaccagtggagactacgccttcttcaacattgagctcttcaacagctcttcctatggagatggctcatggaagagaggagacaaacacgactttgaagctaagcaagcatactcgtccctccagacagtcactctactgaggacagtgaaacctgagtttgagaagttttccatggaggtgaaaagttcagttgagaaacaagggctcaatatggaggattacgttaacatgtttgttgaaggattccacgatgccatcctcctctacgtcttggctctacatgaagtactcagagctggttacagcaaaaaggatggagggaaaattatacagcagacttggaacagaacatttgaaggtatcgccgggcaggtgtccatagatgccaacggagaccgatatggggatttctctgtgattgccatgactgatgtggaggcgggcacccaggaggttattggtgattattttggaaaagaaggtcgttttgaaatgcggccgaatgtcaaatatccttggggccctttaaaactgagaatagatgaaaaccgaattgtagagcatacaaacagctctccctgcaaatcatcaggtggcctagaagaatcggcagtgacaggaattgtcgtgggggctttactaggagctggcttgctaatggccttctactttttcaggaagaaatacagaataaccattgagaggcgaacccagcaagaagaaagtaaccttggaaaacatcgggaattacgggaagattccatcagatcccatttttcagtagcttaaaggaagccccccactttttttttttctgcctgagattctttaaggagatagacgggttgaaagacatcaatgaaacagaaggggcgttcttgaagaattcataattttaagcagttagtaatttcattttaaaatttctgtagaagctcaggaattatgattaatcaccatctgcctccaggcctttcatctcatgacaaacaaatataataatgatatcgtgtcactctgttaaatgttcatactgtttcaagcccatatgattagatttatgtttttaaaatctgttgtctccatatcttgatggcttttgggagcatttcacacaaggatataaaatgcggttttcttaaatgaaatgttttgtagctagaataaaatcatttttacaagtacagcattcttggaaagaatttaacacccaaaaaggggaaaatgtaatgaaaaatctcaaggttggaaatacagccttactctctctagagctggaggacaggtttgtggttgaggacttctctgtccgatgtctacattcaggttctgacttcatatcttgaaaaaggatttcctccctgtctttttcagtgtctcataaacgctactctggattgttgtaaatattagtgagatgggaggatttacagaagaaaagcaagtcaaaaatatttcctttttgatgtaaaaaaaaaaagccctatttcgcactaacattttattttacaagtattttaatcttatattttggtattagaaaaatttgtctattttttcattttgaagattaaatgttgcttacattttaaaagcatgggtgaagtgtacaacaaaccaataatgataaaaaatacttctctttttctccctgtttccctttttcccttggccacagccaaatgctaattgctgctttaattacagagatgtgtaaatgtattcagattacaaactctacaggaatacatcaacattttaactcttttgcgtttttactgtttaactgttttaaatgcaagttattttagggtgacactccttccagttctggccagatcatgagtttcaagatcaagagtaaaaagttattagaattaaacagttttataaagggaggcagcccttttccctcaagaacaactttgttgagagttactacttgacagcaagcacagaaatgacaaatttaaaacttttacacatggcatttaccaaaattcccagtgattattttgtttaaaagagggaacctaaatatctactctattccctttcagttaactccacagaactttgtaggcatccatgaatacctgtaatagtgggttaggtgtggagataaggaatttggacaaagttgagtaagtttttactgggtatctgctttgcacccagtagtctgcaacatgagtttaaactcaggttactactttcacttatactttatggagaagatagacagtgagggaggaatgggaagctgtcatgagagtgcaccgtcttggaattacataactggggtctttcctcaataacattttgagcatctgaaaaatagtttaaaaaattgtcttaatatctattaaaaggcatgtctagtgaggaaacaggagagtctgagcaatcccttggtggcgatgaaggtggtagttcacacaagtaacagtggaggcaaaggtaagcgcaagctgcctgtcccagatgctggcccatgtgtgagtgcttccctggagaagtccgcttctgttgctcccacctgagtcacagttaacagattatttctgtgtgaggcacatttcccttctgttgtttaagaaatgggagctgggaggcagctgagagggcgtgataaaagaattaagtgtgatcaactgaaacaactatgttgtagttctccatgctggatgcaaaggaaaaagtgtcgaattccaaaaaggatggaagaagaaggcaagaagggcaaactccagaagttctagtgcaggaagagagtttgagaagtaaaatccaggcaagcaaagcgttgtaccacttgggactccccaaagtgaaacagcaaggaaggattgtgtccatcttacttacttgaattggagagcttgtttctctctcatttttatttttcaatgatgttttctttatattttagagatattcattttctcttatcttgtgcttgtaaaaagcatttacatttcaagtctatgtgcttattacaggggaaaaataatctacctggttgcagtctttgagtataaacatttctaacctttttaaaacttctatagcagcccattaacactaacatttttagagcaaatatattctattttaacttcaggtagaggaatagtcctaaacttaatatgatagctctagataagatcttagagataagtgagcatttagtattctaaaagtggcagaacaaatcatgaggtttctggatgctataccaatttaaaatcaattcttatgttaatattgattgcttatttacatgtcagtcatctactttttttctttgaaatctgcatatgggttacaaaaactctgttaggttttgaaaattccattaagttggaaaccttggttaaaaatgtaggtgcctggcccatggttaccctggattcaggtctctcatgattatatttggggatttacgttcctaactgctaagcaacatctttgacaactagtaattcatactctactagtagtcacatgtcatatagtaaaataaatagggctttagttcttaagtaattctataggattttaccctgaaatccagggtgttcagatttcaaaaaggataatttatcagtattttctcatccagtcaaacttcagctgacattgatacaggtcaaaatgcgtagatgctttttggtgttggaaataagtgtctgtcttatggtcatcattgtcttcttagatttttgggtaggggggccaggtagggggagactcagaaataaaagcgttccccagataacttcaatctggaaagaattttttgtatagagtccatctctccctcaagactgaccacaggtttcatgagaaggtccctgaaaacatcacatttctctgaagaaccatcaacttgtcttttcttgaaccacaggaatggttctacagaccctactataattcttcacatttcagaacccatgtttaatggagggaagagagaaatgcatgggaaaagaacacctccttttctcctttctcttaaattcaaagacgtttgctttggaatgccctcacttctccctattcacaggcttctaaaatcattaatttactcaaggcacatgtgccttctttgccccaaatgcatcactttccttttagttatggctgattttgggtgtgtgtgtgtaagacatgcagtcaacaatgagatgaaggccattgcatagatctcatgcagatagtgatggattcagaaagtaggttccagtggcgtcactaccttcttgtaagccagtatacactggctatttgtggaaatctctttgggagatcaaatagagtattatgccactgtgagtgtttataaactggaaggaacaagtacctgtgtttcttgggacacaaagcactcagatcctgagtggatgcagacatgagagtaaatgtcagcccaaattaggcccctcgacctacagacatttcatgggttttatttaatcacaccccatggtttggggctacatgaggaagttggtaatgagctgaatttcttattcagtggaaaaaactgaaactgtctaaaaacacgggatatattttagaggcaattgtggaagcggagagaatgagatgatggtgttcagagggaccagcttctttttcagttgtctttagaactcaagaataatcaataatttagtgccccttcaacagccatactcagcaagaagaatcagaagcttgatcctctaacagaaatagaagagggtagctttgcccattgccactgtctttactgccccttctgcccctccacccacatccacattcagcatcactccaaggatgtgtcagcatcttgcccatgcaggtagaaatttgtgagtaggcctccatacttcctcgggggaagaaagagaaactagtgctggttttaagaatgtagctggcttttcatcagaacccttatgctaacctgaccacacttgctctcggggaagttcaagcctgtgatgtgcataaactccaacaagcctggctttggtgttcagcatgcacattccataaatatctcttgcaggcataccccacagctagactgcaggattaaaataacttccaaaaggtgctggattggagtttgttcaaatttctcattaaccactaatgttaattcataccaaatgcaaagtattctaaaccagctgatgctgtcagtgttcaagttttaagtgacttcaaacacaatggaagtgtttcaatgggagccagatctcatgagtaaaaatccattttataatagctctgtgatatatcagtgggagatgattcataggggagagatttgaacaagcagaattaagtgttagcaaaaatgctgcattgctttgattcatgtttaaagacctaaatttctatgcacaaggaataaagggcctacttaccaagtgtaaatcacaacataggctaccaaaatatttcttatttgctaggagaacaaagctgtcacggtgcatgatagttggacagagatggctaaaaaagaggcaaattcagatttggaaacagggtggcctcttcattatttattgccaagatctgaaaatcttcaacatcttataagacaacaatgaagtagcccctgaacagcatggagttgctgtgagtttgttcgttgcagacctttgtgttgggtcctgggaatctgagctttgttccctgtgcatggtggataattgaaaccaagaggacatgggatagaccttgtgacagaccaattctgtgacccctgtcttctgggtcacattattcattgttgatttaaatacaggactaccaaacagtacaaatctatcatgagtctggtagaaaagtaaaagtaaaagctgcacacgttacatactgtttattgttctaatgtacaactaactatttgcatataatgtgatttaatttattgctgttttgtgtagaaaaggagaactaatgactgtggatataacccatgttttgtataatatattttatttcttgtgcgaactggtcatttaaaatatctacttcatttgatgtttggatataaatgtgtatgtgtccttgtaaatgtttctatcaagcaagaatgccacgtactcagagtataacaatgtgttctcattaaaaaatacatcccacggaaa

SEQ ID NO: 14030 - DNA, 1753 bp, Homo sapiens
  source 1..1753: mol_type = unassigned DNA
ggggggcagagggcgagtcggcggcggcgagggcaagctctttcttgcggcacgatgccgtctctgctggtgctcactttctccccgtgcgtactactcggctgggcgttgctggccggcggcaccggtggcggtggcgttggcggcggcggcggtggcgcgggcataggcggcggacgccaggagagagaggcgctgccgccacagaagatcgaggtgctggtgttactgccccaggatgactcgtacttgttttcactcacccgggtgcggccggccatcgagtatgctctgcgcagcgtggagggcaacgggactgggaggcggcttctgccgccgggcactcgcttccaggtggcttacgaggattcagactgtgggaaccgtgcgctcttcagcttggtggaccgcgtggcggcggcgcggggcgccaagccagaccttatcctggggccagtgtgcgagtatgcagcagcgccagtggcccggcttgcatcgcactgggacctgcccatgctgtcggctggggcgctggccgctggcttccagcacaaggactctgagtactcgcacctcacgcgcgtggcgcccgcctacgccaagatgggcgagatgatgctcgccctgttccgccaccaccactggagccgcgctgcactggtctacagcgacgacaagctggagcggaactgctacttcaccctcgagggggtccacgaggtcttccaggaggagggtttgcacacgtccatctacagtttcgacgagaccaaagacttggatctggaagacatcgtgcgcaatatccaggccagtgagagagtggtgatcatgtgtgcgagcagtgacaccatccggagcatcatgctggtggcgcacaggcatggcatgaccagtggagactacgccttcttcaacattgagctcttcaacagctcttcctatggagatggctcatggaagagaggagacaaacacgactttgaagctaagcaagcatactcgtccctccagacagtcactctactgaggacagtgaaacctgagtttgagaagttttccatggaggtgaaaagttcagttgagaaacaagggctcaatatggaggattacgttaacatgtttgttgaaggattccacgatgccatcctcctctacgtcttggctctacatgaagtactcagagctggttacagcaaaaaggatggagggaaaattatacagcagacttggaacagaacatttgaaggtatcgccgggcaggtgtccatagatgccaacggagaccgatatggggatttctctgtgattgccatgactgatgtggaggcgggcacccaggaggttattggtgattattttggaaaagaaggtcgttttgaaatgcggccgaatgtcaaatatccttggggccctttaaaactgagaatagatgaaaaccgaattgtagagcatacaaacagctctccctgcaaatcatgtggcctagaagaatcggcagtgacaggaattgtcgtgggggctttactaggagctggcttgctaatggccttctactttttcaggaagaaatacagaataaccattgagaggcgaacccagcaagaagaaagtaaccttggaaaacatcgggaattacgggaagattccatcagatcccatttttcagtagcttaaaggaagccccccactttttttttttctgcctgagattctttaaggagatagacgggttgaaagacatcaatgaaac

SEQ ID NO: 14031 - DNA, 660 bp, Homo sapiens
  source 1..660: mol_type = unassigned DNA
cgagatgatgctcgccctgttccgccaccaccactggagccgcgctgcactggtctacagcgacgacaagctggagcggaactgctacttcaccctcgagggggtccacgaggtcttccaggaggagggtttgcacacgtccatctacagtttcgacgagaccaaagacttggatctggaagacatcgtgcgcaatatccaggccagtgagagagttttaggtcttatctgttggaatcccagtggaagaaaattctcttcttgatcattctactgcctgttaaccacacatgcaagctttctttccagtcatctttccaatatggttgtgccaaaatttttctcagtaggctgaggcaggaggattgcttgagtccaagagtttgaggctatggattgccctatttgaatagccactgcattccagcctgggcaacatagctagaccccatctcttacacaatattttttagttagttcagtattcagtataaatattatcattactttctaaatgatatttaaggttaagtcacataggcttctatgttgacatttccttttttccccctacctattttccttggagttaaaacagtctgtttttgtttatttgcttaatttcctatggatttataattaaataatcttctaattctt

SEQ ID NO: 14032 - DNA, 6380 bp, Homo sapiens
  source 1..6380: mol_type = unassigned DNA
ggccagccgggcacaccaggtccgcgatggagccatctgcactgggaccttggtccttgttccctgaccttgcgccgagggaccaggaaggtcaggtgctcgccccgcgtcggtgcttcaggagggaatgtggccagaacgagaaagtggtgatcatgtgtgcgagcagtgacaccatccggagcatcatgctggtggcgcacaggcatggcatgaccagtggagactacgccttcttcaacattgagctcttcaacagctcttcctatggagatggctcatggaagagaggagacaaacacgactttgaagctaagcaagcatactcgtccctccagacagtcactctactgaggacagtgaaacctgagtttgagaagttttccatggaggtgaaaagttcagttgagaaacaagggctcaatatggaggattacgttaacatgtttgttgaaggattccacgatgccatcctcctctacgtcttggctctacatgaagtactcagagctggttacagcaaaaaggatggagggaaaattatacagcagacttggaacagaacatttgaaggtatcgccgggcaggtgtccatagatgccaacggagaccgatatggggatttctctgtgattgccatgactgatgtggaggcgggcacccaggaggttattggtgattattttggaaaagaaggtcgttttgaaatgcggccgaatgtcaaatatccttggggccctttaaaactgagaatagatgaaaaccgaattgtagagcatacaaacagctctccctgcaaatcatgtggcctagaagaatcggcagtgacaggaattgtcgtgggggctttactaggagctggcttgctaatggccttctactttttcaggaagaaatacagaataaccattgagaggcgaacccagcaagaagaaagtaaccttggaaaacatcgggaattacgggaagattccatcagatcccatttttcagtagcttaaaggaagccccccactttttttttttctgcctgagattctttaaggagatagacgggttgaaagacatcaatgaaacagaaggggcgttcttgaagaattcataattttaagcagttagtaatttcattttaaaatttctgtagaagctcaggaattatgattaatcaccatctgcctccaggcctttcatctcatgacaaacaaatataataatgatatcgtgtcactctgttaaatgttcatactgtttcaagcccatatgattagatttatgtttttaaaatctgttgtctccatatcttgatggcttttgggagcatttcacacaaggatataaaatgcggttttcttaaatgaaatgttttgtagctagaataaaatcatttttacaagtacagcattcttggaaagaatttaacacccaaaaaggggaaaatgtaatgaaaaatctcaaggttggaaatacagccttactctctctagagctggaggacaggtttgtggttgaggacttctctgtccgatgtctacattcaggttctgacttcatatcttgaaaaaggatttcctccctgtctttttcagtgtctcataaacgctactctggattgttgtaaatattagtgagatgggaggatttacagaagaaaagcaagtcaaaaatatttcctttttgatgtaaaaaaaaaaagccctatttcgcactaacattttattttacaagtattttaatcttatattttggtattagaaaaatttgtctattttttcattttgaagattaaatgttgcttacattttaaaagcatgggtgaagtgtacaacaaaccaataatgataaaaaatacttctctttttctccctgtttccctttttcccttggccacagccaaatgctaattgctgctttaattacagagatgtgtaaatgtattcagattacaaactctacaggaatacatcaacattttaactcttttgcgtttttactgtttaactgttttaaatgcaagttattttagggtgacactccttccagttctggccagatcatgagtttcaagatcaagagtaaaaagttattagaattaaacagttttataaagggaggcagcccttttccctcaagaacaactttgttgagagttactacttgacagcaagcacagaaatgacaaatttaaaacttttacacatggcatttaccaaaattcccagtgattattttgtttaaaagagggaacctaaatatctactctattccctttcagttaactccacagaactttgtaggcatccatgaatacctgtaatagtgggttaggtgtggagataaggaatttggacaaagttgagtaagtttttactgggtatctgctttgcacccagtagtctgcaacatgagtttaaactcaggttactactttcacttatactttatggagaagatagacagtgagggaggaatgggaagctgtcatgagagtgcaccgtcttggaattacataactggggtctttcctcaataacattttgagcatctgaaaaatagtttaaaaaattgtcttaatatctattaaaaggcatgtctagtgaggaaacaggagagtctgagcaatcccttggtggcgatgaaggtggtagttcacacaagtaacagtggaggcaaaggtaagcgcaagctgcctgtcccagatgctggcccatgtgtgagtgcttccctggagaagtccgcttctgttgctcccacctgagtcacagttaacagattatttctgtgtgaggcacatttcccttctgttgtttaagaaatgggagctgggaggcagctgagagggcgtgataaaagaattaagtgtgatcaactgaaacaactatgttgtagttctccatgctggatgcaaaggaaaaagtgtcgaattccaaaaaggatggaagaagaaggcaagaagggcaaactccagaagttctagtgcaggaagagagtttgagaagtaaaatccaggcaagcaaagcgttgtaccacttgggactccccaaagtgaaacagcaaggaaggattgtgtccatcttacttacttgaattggagagcttgtttctctctcatttttatttttcaatgatgttttctttatattttagagatattcattttctcttatcttgtgcttgtaaaaagcatttacatttcaagtctatgtgcttattacaggggaaaaataatctacctggttgcagtctttgagtataaacatttctaacctttttaaaacttctatagcagcccattaacactaacatttttagagcaaatatattctattttaacttcaggtagaggaatagtcctaaacttaatatgatagctctagataagatcttagagataagtgagcatttagtattctaaaagtggcagaacaaatcatgaggtttctggatgctataccaatttaaaatcaattcttatgttaatattgattgcttatttacatgtcagtcatctactttttttctttgaaatctgcatatgggttacaaaaactctgttaggttttgaaaattccattaagttggaaaccttggttaaaaatgtaggtgcctggcccatggttaccctggattcaggtctctcatgattatatttggggatttacgttcctaactgctaagcaacatctttgacaactagtaattcatactctactagtagtcacatgtcatatagtaaaataaatagggctttagttcttaagtaattctataggattttaccctgaaatccagggtgttcagatttcaaaaaggataatttatcagtattttctcatccagtcaaacttcagctgacattgatacaggtcaaaatgcgtagatgctttttggtgttggaaataagtgtctgtcttatggtcatcattgtcttcttagatttttgggtaggggggccaggtagggggagactcagaaataaaagcgttccccagataacttcaatctggaaagaattttttgtatagagtccatctctccctcaagactgaccacaggtttcatgagaaggtccctgaaaacatcacatttctctgaagaaccatcaacttgtcttttcttgaaccacaggaatggttctacagaccctactataattcttcacatttcagaacccatgtttaatggagggaagagagaaatgcatgggaaaagaacacctccttttctcctttctcttaaattcaaagacgtttgctttggaatgccctcacttctccctattcacaggcttctaaaatcattaatttactcaaggcacatgtgccttctttgccccaaatgcatcactttccttttagttatggctgattttgggtgtgtgtgtgtaagacatgcagtcaacaatgagatgaaggccattgcatagatctcatgcagatagtgatggattcagaaagtaggttccagtggcgtcactaccttcttgtaagccagtatacactggctatttgtggaaatctctttgggagatcaaatagagtattatgccactgtgagtgtttataaactggaaggaacaagtacctgtgtttcttgggacacaaagcactcagatcctgagtggatgcagacatgagagtaaatgtcagcccaaattaggcccctcgacctacagacatttcatgggttttatttaatcacaccccatggtttggggctacatgaggaagttggtaatgagctgaatttcttattcagtggaaaaaactgaaactgtctaaaaacacgggatatattttagaggcaattgtggaagcggagagaatgagatgatggtgttcagagggaccagcttctttttcagttgtctttagaactcaagaataatcaataatttagtgccccttcaacagccatactcagcaagaagaatcagaagcttgatcctctaacagaaatagaagagggtagctttgcccattgccactgtctttactgccccttctgcccctccacccacatccacattcagcatcactccaaggatgtgtcagcatcttgcccatgcaggtagaaatttgtgagtaggcctccatacttcctcgggggaagaaagagaaactagtgctggttttaagaatgtagctggcttttcatcagaacccttatgctaacctgaccacacttgctctcggggaagttcaagcctgtgatgtgcataaactccaacaagcctggctttggtgttcagcatgcacattccataaatatctcttgcaggcataccccacagctagactgcaggattaaaataacttccaaaaggtgctggattggagtttgttcaaatttctcattaaccactaatgttaattcataccaaatgcaaagtattctaaaccagctgatgctgtcagtgttcaagttttaagtgacttcaaacacaatggaagtgtttcaatgggagccagatctcatgagtaaaaatccattttataatagctctgtgatatatcagtgggagatgattcataggggagagatttgaacaagcagaattaagtgttagcaaaaatgctgcattgctttgattcatgtttaaagacctaaatttctatgcacaaggaataaagggcctacttaccaagtgtaaatcacaacataggctaccaaaatatttcttatttgctaggagaacaaagctgtcacggtgcatgatagttggacagagatggctaaaaaagaggcaaattcagatttggaaacagggtggcctcttcattatttattgccaagatctgaaaatcttcaacatcttataagacaacaatgaagtagcccctgaacagcatggagttgctgtgagtttgttcgttgcagacctttgtgttgggtcctgggaatctgagctttgttccctgtgcatggtggataattgaaaccaagaggacatgggatagaccttgtgacagaccaattctgtgacccctgtcttctgggtcacattattcattgttgatttaaatacaggactaccaaacagtacaaatctatcatgagtctggtagaaaagtaaaagtaaaagctgcacacgttacatactgtttattgttctaatgtacaactaactatttgcatataatgtgatttaatttattgctgttttgtgtagaaaaggagaactaatgactgtggatataacccatgttttgtataatatattttatttcttgtgcgaactggtcatttaaaatatctacttcatttgatgtttggatataaatgtgtatgtgtccttgtaaatgtttctatcaagcaagaatgccacgtactcagagtataacaatgtgttctcattaaaaaatacatcccacggaaacctc

SEQ ID NO: 14033 - DNA, 3029 bp, Homo sapiens
  source 1..3029: mol_type = unassigned DNA
aaactgccctgccttccccggagtcgaggactgtggggattagggcttcctttcccctgcgcgggaggtctgtgtcgaataatgtgtggcttctgttggattgcttttctttccaaaattcctaggcaatgcttccccgaggtgtgcacctttgtgaggtgtttgtggggttgggggagcttcaggcgctactcgcgggacgccgtcacgtgatccgggatgaggtggagttcggctttaaggaggcgtctcttcctagcttcatcaatctttaggatctgagcaggagaaataccagcggatcttccccactctgctcccttccattcccacccttccttctttaataagcaggagcgaaaaagacaaattccaaagaggattgttcagttcaagggaatgaagaattcagaataattttggtaaatggattccaatatggggaataagaataagctgaacagttgacctgctttgaagaaacatactgtccatttgtctaaaataatctataacaaccaaaccaatcaaaatgaattcaacattattttcccaggttgaaaatcattcagtccactctaatttctcagagaagaatgcccagcttctggcttttgaaaatgatgattgtcatctgcccttggccatgatatttaccttagctcttgcttatggagctgtgatcattcttggtgtctctggaaacctggccttgatcataatcatcttgaaacaaaaggagatgagaaatgttaccaacatcctgattgtgaacctttccttctcagacttgcttgttgccatcatgtgtctcccctttacatttgtctacacattaatggaccactgggtctttggtgaggcgatgtgtaagttgaatccttttgtgcaatgtgtttcaatcactgtgtccattttctctctggttctcattgctgtggaacgacatcagctgataatcaaccctcgagggtggagaccaaataatagacatgcttatgtaggtattgctgtgatttgggtccttgctgtggcttcttctttgcctttcctgatctaccaagtaatgactgatgagccgttccaaaatgtaacacttgatgcgtacaaagacaaatacgtgtgctttgatcaatttccatcggactctcataggttgtcttataccactctcctcttggtgctgcagtattttggtccactttgttttatatttatttgctacttcaagatatatatacgcctaaaaaggagaaacaacatgatggacaagatgagagacaataagtacaggtccagtgaaaccaaaagaatcaatatcatgctgctctccattgtggtagcatttgcagtctgctggctccctcttaccatctttaacactgtgtttgattggaatcatcagatcattgctacctgcaaccacaatctgttattcctgctctgccacctcacagcaatgatatccacttgtgtcaaccccatattttatgggttcctgaacaaaaacttccagagagacttgcagttcttcttcaacttttgtgatttccggtctcgggatgatgattatgaaacaatagccatgtccacgatgcacacagatgtttccaaaacttctttgaagcaagcaagcccagtcgcatttaaaaaaatcaacaacaatgatgataatgaaaaaatctgaaactacttatagcctatggtcccggatgacatctgtttaaaaacaagcacaacctgcaacatactttgattacctgttctcccaaggaatggggttgaaatcatttgaaaatgactaagattttcttgtcttgctttttactgcttttgttgtagttgtcataattacatttggaacaaaaggtgtgggctttggggtcttctggaaatagttttgaccagacatctttgaagtgctttttgtgaatttatgcatataatataaagacttttatactgtacttattggaatgaaatttctttaaagtattactattaactgacttcagaagtacctgccatccaatacggtcattagattgggtcatcttgattagattagattagattagattgtcaacagattgggccatccttactttatgataggcatcattttagtgtgttacaatagtaacagtatgcaaaagcagcattcaggagccgaaagatagtctgaagtcattcagaagtggtttgaggtttctgttttttggtggtttttgtttgttttttttttttttcaccttaagggaggatttaatttgctcccaactgattgtcacttaaatgaaaatttaaaaatgaataaaaagacatacttctcagctgcaaatattatggagaattggggcacccacaggaatgaagagagaaagcagctccctaacttcaaaaccattttggtacctgacaacaagagcattttagagtaattaatttaataaagtaaattagtattgctgcaaatagttaaattatatttatttgaattgatggtcaagagattttccattttttttacagactgttcagtgtttgtcaagctttctggcataaatatgtactcaaaaggcatttccgcttacaatttgtagaaacacaaaatgcgttttccatacagcagtgcctatatagtgactgatttttaactttcaatgtccatctttcaaaggaagtaacaccaaggtacaatgttaaaggaatattcactttacctagcagggaaaaatacacaaaaactgcagatacttcatatagcccattttaacttgtataaactgtgtgacttgtggcgtcttataaataatgcactgtaaagattactgaatagttgtgtcatgttaatgtgcctaatttcatgtatcttgtaatcatgattgagcctcagaatcatttggagaaactatattttaaagaacaagacatacttcaatgtattatacagataaagtattacatgtgtttgattttaaaagggcggacattttattaaaatcaatattgtttttgctttttctgag

SEQ ID NO: 14034 - DNA, 1017 bp, Homo sapiens
  source 1..1017: mol_type = unassigned DNA
aatctttaggatctgagcaggagaaataccagcggatcttccccactctgctcccttccattcccacccttccttctttaataagcaggagcgaaaaagacaaattccaaagaggattgttcagttcaagggaatgaagaattcagaataattttggttgtcttataccactctcctcttggtgctgcagtattttggtccactttgttttatatttatttgctacttcaagatatatatacgcctaaaaaggagaaacaacatgatggacaagatgagagacaataagtacaggtccagtgaaaccaaaagaatcaatatcatgctgctctccattgtggtagcatttgcagtctgctggctccctcttaccatctttaacactgtgtttgattggaatcatcagatcattgctacctgcaaccacaatctgttattcctgctctgccacctcacagcaatgatatccacttgtgtcaaccccatattttatgggttcctgaacaaaaacttccagagagacttgcagttcttcttcaacttttgtgatttccggtctcgggatgatgattatgaaacaatagccatgtccacgatgcacacagatgtttccaaaacttctttgaagcaagcaagcccagtcgcatttaaaaaaatcaacaacaatgatgataatgaaaaaatctgaaactacttatagcctatggtcccggatgacatctgtttaaaaacaagcacaacctgcaacatactttgattacctgttctcccaaggaatggggttgaaatcatttgaaaatgactaagattttcttgtcttgctttttactgcttttgttgtagttgtcataattacatttggaacaaaaggtgtgggctttggggtcttctggaaatagttttgaccagacatctttgaagtgctttttgtgaatttatgcatataatataaagacttttatactgtacttattggaatgaaatttctttaaagtattactattaactgacttcaga

SEQ ID NO: 14035 - DNA, 536 bp, Homo sapiens
  source 1..536: mol_type = unassigned DNA
aatctttaggatctgagcaggagaaataccagcggatcttccccactctgctcccttccattcccacccttccttctttaataagcaggagcgaaaaagacaaattccaaagaggattgttcagttcaagggaatgaagaattcagaataattttgacttgcttgttgccatcatgtgtctcccctttacatttgtctacacattaatggaccactgggtctttggtgaggcgatgtgttgtcttataccactctcctcttggtgctgcagtattttggtccactttgttttatatttatttgctacttcaagatatatatacgcctaaaaaggagaaacaacatgatggacaagatgagagacaataagtacaggtccagtgaaaccaaaagaatcaatatcatgctgctctccattgtggtagcatttgcagtctgctggctccctcttaccatctttaacactgtgtttgattggaatcatcagatcattgctacctgcaaccacaatctgttattcctgctctgccacctca

SEQ ID NO: 14036 - DNA, 568 bp, Homo sapiens
  source 1..568: mol_type = unassigned DNA
aatctttaggatctgagcaggagaaataccagcggatcttccccactctgctcccttccattcccacccttccttctttaataagcaggagcgaaaaagacaaattccaaagaggattgttcagttcaagggaatgaagaattcagaataattttgctgataatcaaccctcgagggtggagaccaaataatagacatgcttatgtaggtattgctgtgatttgggtccttgctgtggcttcttctttgcctttcctgatctaccaagtaatgactgatgagccgttccaaaatgtaacacttgatgcgtacaaagacaaatacgtgtgctttgatcaatttccatcggactctcataggttgtcttataccactctcctcttggtgctgcagtattttggtccactttgttttatatttatttgctacttcaagatatatatacgcctaaaaaggagaaacaacatgatggacaagatgagagacaataagtacaggtccagtgaaaccaaaagaatcaatatcatgctgctctccattgtggtagcatttgcagtctgctggctcc

SEQ ID NO: 14037 - DNA, 559 bp, Homo sapiens
  source 1..559: mol_type = unassigned DNA
attattgtggcgaatttcatgtttcccagcgagccctttgattcctggtttgggctggcgctcgagctctccagccgggtatgacttcggccacaagatggcactgacctgcaaacaaagaaaagcacagtggcaccgactttttcaagcctcgggaaactgccctgccttccccggagtcgaggactgtggggattagggcttcctttcccctgcgcgggagattgttcagttcaagggaatgaagaattcagaataattttggtaaatggattccaatatggggaataagaataagctgaacagttgacctgctttgaagaaacatactgtccatttgtctaaaataatctataacaaccaaaccaatcaaaatgaattcaacattattttcccaggttgaaaatcattcagtccactctaatttctcagagaagaatgcccagcttctggcttttgaaaatgatgattgtcatctgcccttggccatgatatttaccttagctcttgcttatggagctgtgatcattcttggtgtctctggaaacctggccttgat

SEQ ID NO: 14038 - DNA, 799 bp, Homo sapiens
  source 1..799: mol_type = unassigned DNA
gaaaagcagtagctgtttgttctcgaccctgggccggctctctggcgaagcaagcgagggagcagaaagctaacccgaccaggttccccacccaggactagaccgagtgctcttccgtgactactactttattagtctttattgtcttaaggcagcagtctgttgaacaagccctccccagcaaggaaggagcagagaattatgtaattcatttagataagctagcagtaactttgggaggctgtatgtaacaaggctgacatttcttttccaacacaagtgaggtgaacagccagccaatcctgagtatttgaaaaaatgtatctgcagcaggttatgatcagggagctgtattttcaagtagtaacagcactgcgaagagcaagcaatgaaaggccagcattctaattggaaagaaagaagaggaaatttccctctgcaagggggctaatttgccaactggtgatattgttcagttcaagggaatgaagaattcagaataattttggtaaatggattccaatatggggaataagaataagctgaacagttgacctgctttgaagaaacatactgtccatttgtctaaaataatctataacaaccaaaccaatcaaaatgaattcaacattattttcccaggttgaaaatcattcagtccactctaatttctcagagaagaatgcccagcttctggcttttgaaaatgatgattgtcatctgcccttggccatgatatttaccttagctcttgcttatggagctgtgatcattcttggtgtctctggaaacctggcct

SEQ ID NO: 14039 - DNA, 753 bp, Homo sapiens
  source 1..753: mol_type = unassigned DNA
ttgcattcggactgcaaaattctgctgaaagagccttaggctattttccatggtctaaggtaaaatcgttttggctttggtccaacacaacgcctcagttcctttaaaagattaactaaaggtctgtgaacttggaaaaaagaattcccgtttctggaattcgagttctatggatgtttgttattgctcgcatttgttatatgaagacacctcgcaaacaggagcgcaaaccttagagcgcagctgcctcccgggctcgggtcagcgctggaccgcgcggcagctggacggcctgagtggcgccccgcgggctgcgcccccggcctcgccagagacccgctagggttgagccctgacccgggcaccccgcgggctgctgttcccagctccggatgccagccgggctgcagccagagcgcgtccagccgggggcagcgctttgtccatcccccgccccatccccaggaggctccttcgcggatccccgacactctcctcccgggttcggcccgcgcctgctccacccggattgttcagttcaagggaatgaagaattcagaataattttggtaaatggattccaatatggggaataagaataagctgaacagttgacctgctttgaagaaacatactgtccatttgtctaaaataatctataacaaccaaaccaatcaaaatgaattcaacattattttcccaggttgaaaatcattcagtccactctaatttctcagagaagaatgcccagct

SEQ ID NO: 14040 - DNA, 2988 bp, Homo sapiens
  source 1..2988: mol_type = unassigned DNA
agtgaccttcagtgcccactggattccaaagctcaatcctctgtgcaatgattccaactccagggatcagtgtctgaagtgaagctacagattgtctggtggataaataatccaagaaggaacgggggatgttatgactttttgagagaaggctaacatgtcatccttgacagataaactttaaaaaattataataatggaaatgaagaaagaaaacaacagaagatgagaatagcaaaagagctagacatttccgacagggtctcaagagcacgctcaagtcattcacatgtttccatcaaatacagacacagatcagggaagattaaaccctactaatttctcgtcggatgcctcacaacaaggtgccttccaagaactaatggccaaaatatccacccacaacacaaataagcttagaaaatctcttcttacaatcctgacacaatggaagtttccctaaaccacccagcatctaatacaaccagcacaaagaacaacaactcggcatttttttactttgagtcctgtcaacccccttctccagctttactcctattatgcatagcctatactgtggtcttaattgtgggcctttttggaaacctctctctcatcatcatcatctttaagaagcagagaaaagctcagaatttcaccagcatactgattgccaatctctccctctctgataccttggtgtgtgtcatgtgcatccattttactatcatctacactctgatggaccactggatatttggggataccatgtgcagactcacatcctatgtgcagagtgtctcaatctctgtgtccatattctcacttgtattcactgctgtcgaaagatatcagctaattgtgaacccccgtggctggaagcccagtgtgactcatgcctactggggcatcacactgatttggctgttttcccttctgctgtctattcccttcttcctgtcctaccacctcactgatgagcccttccgcaacctctctctccccactgacctctacacccaccaggtggcctgtgtggagaactggccctccaaaaaggaccggctgctcttcaccacctccctttttctgctgcagtattttgttcctctaggcttcatcctcatctgctacttgaagattgttatctgcctccgcaggagaaatgcaaaggtagataagaagaaggaaaatgagggccggctcaatgagaacaagaggatcaacacaatgttgatttccatcgtggtgacctttggagcctgctggctgccccgaatatcttcaatgtcatctttgactggtatcatgaggtgctgatgagctgccaccacgacctggtatttgtagtttgccacttggttgctatggtttccacatgtataaaccctctcttttatggctttctcaacaaaaatttccaaaaggacctggtagtgcttattcaccactgctggtgcttcacacctcaggaaagatgtgaaaatattgccatctccactatgcacacagactccaagaggtctttaagattggctcgtataacaacaggtatatgaaaattgataatgctgaagctcttcttgaatgggagctggacaggtaatggtgggaatagggcaagatgcagaaagaagaaaccagaaccaaaaatagcaactttatacccacttttcctttaggctaagactgcctgtctcatatgtctatccaacacaccctccaacatacacgaacacacataccaccccttttctcttaagaaaataactctaataattcaaacaacctgcccgccatcatttgtggcaaagaatgagaatgagaaagcagagagagaggcaaacagcagtgatggctggggaacaatgttcacagatacttttattcaatggaatatctacaaaagttatgactaatgatatgcctagtaaaaacactgctatacctccttagcactgaagcaagtctattctcagatatgaaaactgtaactttcaatcatataactattcaattaattagccaagtcagaaaatccccccttaaaattcattaattaattaacaaactaagtttggactaaagttgaagggctggttttaacttaacatttaaacgaagtgttgtaattacaattaattcccatgcttgaatcatatctccagtttatgataacagtacattttattcactaacaatgctattagaactggccacaaattctttagcatagcaattatgctagaaattgctctaacaaacttattaatggccaatgtagatacagctttcctcacaaagtggcttttaatccctaattctttatgtatattaaaaagaggtcattatgactctattactggatctcagagactttgtcagtagcatttttataattagcgccagatttttaaaaccttctcatatatcttgtggcttaaacatttttaaaagagccctcatccccacagagttgcttacacaggggaatcaactagactgttctcaaaagacactaagctactgttcaaattgctattaactgaagtcacttttattaaattgtgaccagctttaccacttcttagaacaaacctcccctatatctatcaaagttgaactgcagcttatttgtatgttaaaaatgtaactgtaggctggactcagcaacttacacctgtaatcccagccctttgggaggccaaggtggaggatcacttttgcccaggagttgaagaccagcctgagcaacacagtgagactccatctctactaaaaatacaaaaaattagccaggtgtggtcatgcatacctgcagtcccagctacttagatgagaggaaggatcacctgagcctgggagatcaagtgagtcatgatcacaccactgcactccaacctggatgaaagagtgagaccctgtctcaaaaaaaaattttaaaagtaactatattttcttttgaataaaaagtaatgtttctggaaa

SEQ ID NO: 14041 - DNA, 1112 bp, Homo sapiens
  source 1..1112: mol_type = unassigned DNA
atggaagtttccctaaaccacccagcatctaatacaaccagcacaaagaacaacaactcggcatttttttactttgagtcctgtcaacccccttctccagctttactcctattatgcatagcctatactgtggtcttaattgtgggcctttttggaaacctctctctcatcatcatcatctttaagaagcagagaaaagctcagaatttcaccagcatactgattgccaatctctccctctctgataccttggtgtgtgtcatgtgcatccattttactatcatctacactctgatggaccactggatatttggggataccatgtgcagactcacatcctatgtgcagagtgtctcaatctctgtgtccatattctcacttgtattcactgctgtcgaaagatatcagctaattgtgaacccccgtggctggaagcccagtgtgactcatgcctactggggcatcacactgatttggctgttttcccttctgctgtctattcccttcttcctgtcctaccacctcactgatgagcccttccgcaacctctctctccccactgacctctacacccaccaggtggcctgtgtggagaactggccctccaaaaaggaccggctgctcttcaccacctccctttttctgctgcagtattttgttcctctaggcttcatcctcatctgctacttgaagattgttatctgcctccgcaggagaaatgcaaaggtagataagaagaaggaaaatgagggccggctcaatgagaacaagaggatcaacacaatgttgatttccatcgtggtgacctttggagcctgctggctgccccgaatatcttcaatgtcatctttgactggtatcatgaggtgctgatgagctgccaccacgacctggtatttgtagtttgccacttggttgctatggtttccacatgtataaaccctctcttttatggctttctcaacaaaaatttccaaaaggacctggtagtgcttattcaccactgctggtgcttcacacctcaggaaagatgtgaaaatattgccatctccactatgcacacagactccaagaggtctttaagattggctcgtataacaacaggtatatga

SEQ ID NO: 14042 - DNA, 5712 bp, Homo sapiens
  source 1..5712: mol_type = unassigned DNA
attgctctacccaccgtcagcagggcgactgccactgccgggattatcatcctctccatcctcaccgccgatcagccaatattggacttgctggtggcggcggcagcagcggcggcgggagtctagccgttccccttcccccgccccagcctccccaccatgtcctagaaaagcgatggagaccaaaggctaccacagtctccctgaaggtctagatatggaaagacggtggggtcaagtttctcaggctgtggagcgttcttccctgggacctacagagaggaccgatgagaataactacatggagattgtcaacgtaagctgtgtttccggtgctattccaaacaacagtactcaaggaagcagcaaagaaaaacaagaactactcccttgccttcagcaagacaataatcggcctgggattttaacatctgatattaaaactgagctggaatctaaggaactttcagcaactgtagctgagtccatgggtttatatatggattctgtaagagatgctgactattcctatgagcagcagaaccaacaaggaagcatgagtccagctaagatttatcagaatgttgaacagctggtgaaattttacaaaggaaatggccatcgtccttccactctaagttgtgtgaacacgcccttgagatcatttatgtctgactctgggagctccgtgaatggtggcgtcatgcgcgccgttgttaaaagccctatcatgtgtcatgagaaaagcccgtctgtttgcagccctctgaacatgacatcttcggtttgcagccctgctggaatcaactctgtgtcctccaccacagccagctttggcagttttccagtgcacagcccaatcacccagggaactcctctgacatgctcccctaatgttgaaaatcgaggctccaggtcgcacagccctgcacatgctagcaatgtgggctctcctctctcaagtccgttaagtagcatgaaatcctcaatttccagccctccaagtcactgcagtgtaaaatctccagtctccagtcccaataatgtcactctgagatcctctgtgtctagccctgcaaatattaacaactcaaggtgctctgtttccagcccttcgaacactaataacagatccacgctttccagtccggcagccagtactgtgggatctatctgtagccctgtaaacaatgccttcagctacactgcttctggcacctctgctggatccagtacattgcgggatgtggttcccagtccagacacgcaggagaaaggtgctcaagaggtcccttttcctaagactgaggaagtagagagtgccatctcaaatggtgtgactggccagcttaatattgtccagtacataaaaccagaaccagatggagcttttagcagctcatgtctaggaggaaatagcaaaataaattcggattcttcattctcagtaccaataaagcaagaatcaaccaagcattcatgttcaggcacctcttttaaagggaatccaacagtaaacccgtttccatttatggatggctcgtatttttcctttatggatgataaagactattattccctatcaggaattttaggaccacctgtgcccggctttgatggtaactgtgaaggcagcggattcccagtgggtattaaacaagaaccagatgatgggagctattacccagaggccagcatcccttcctctgctattgttggggtgaattcaggtggacagtccttccactacaggattggtgctcaaggtacaatatctttatcacgatcggctagagaccaatctttccaacacctgagttcctttcctcctgtcaatactttagtggagtcatggaaatcacacggcgacctgtcgtctagaagaagtgatgggtatccggtcttagaatacattccagaaaatgtatcaagctctactttacgaagtgtttctactggatcttcaagaccttcaaaaatatgtttggtgtgtggggatgaggcttcaggatgccattatggggtagtcacctgtggcagctgcaaagttttcttcaaaagagcagtggaagggcaacacaactatttatgtgctggaagaaatgattgcatcattgataagattcgacgaaagaattgtcctgcttgcagacttcagaaatgtcttcaagctggaatgaatttaggagcacgaaagtcaaagaagttgggaaagttaaaagggattcacgaggagcagccacagcagcagcagcccccacccccacccccacccccgcaaagcccagaggaagggacaacgtacatcgctcctgcaaaagaaccctcggtcaacacagcactggttcctcagctctccacaatctcacgagcgctcacaccttcccccgttatggtccttgaaaacattgaacctgaaattgtatatgcaggctatgacagctcaaaaccagatacagccgaaaatctgctctccacgctcaaccgcttagcaggcaaacagatgatccaagtcgtgaagtgggcaaaggtacttccaggatttaaaaacttgcctcttgaggaccaaattaccctaatccagtattcttggatgtgtctatcatcatttgccttgagctggagatcgtacaaacatacgaacagccaatttctctattttgcaccagacctagtctttaatgaagagaagatgcatcagtctgccatgtatgaactatgccaggggatgcaccaaatcagccttcagttcgttcgactgcagctcacctttgaagaatacaccatcatgaaagttttgctgctactaagcacaattccaaaggatggcctcaaaagccaggctgcatttgaagaaatgaggacaaattacatcaaagaactgaggaagatggtaactaagtgtcccaacaattctgggcagagctggcagaggttctaccaactgaccaagctgctggactccatgcatgacctggtgagcgacctgctggaattctgcttctacaccttccgagagtcccatgcgctgaaggtagagttccccgcaatgctggtggagatcatcagcgaccagctgcccaaggtggagtcggggaacgccaagccgctctacttccaccggaagtgactgcccgctgcccagaagaactttgccttaagtttccctgtgttgttccacacccagaaggacccaagaaaacctgtttttaacatgtgatggttgattcacacttgttcaacagtttctcaagtttaaagtcatgtcagaggtttggagccgggaaagctgtttttccgtggatttggcgagaccagagcagtctgaaggattccccacctccaatcccccagcgcttagaaacatgttcctgttcctcgggatgaaaagccatatctagtcaataactctgattttgatattttcacagatggaagaagttttaactatgccgtgtagtttctggtatcgttcgcttgttttaaaagggttcaaggactaacgaacgttttaaagcttacccttggtttgcacataaaacgtatagtcaatatggggcattaatattcttttgttattaaaaaaacacaaaaaaataataaaaaaatatatacagattcctgttgtgtaataacagaactcgtggcgtggggcagcagctgcctctgagccctcgctcgtccacggtcttctgcatcactggtatacacactcgttagcgtccatttcttatttaattagaatggataagatgatgttaaatgccttggtttgatttctagtatctattgtgttggctttacaaataattttttgcagtcttttgctgtgctgtacattactgtatgtataaattatgaaggacctgaaataaggtataaggatcttttgtaaatgagacacatacaaaaaaaatctttaatggttaataggatgaatgggaaagtatttttgaaagaattctattttgctggagactatttaagtactatctttgtctaaacaaggtaatttttttttgtaaagtgcaatgtcctgcatgcataatgaaccgtttacagtgtatttaagaaagggaaagctgtgccttttttagcttcatatctaatttaccattattttacagtctctgttgtaaataaccacactgaaacctcttcggttgtcttgaaacctttctactttttctgtactttttgttttgttcttggtctcccgcttggggcatttgtgggactccagcacgttttctggcttctgcttcatcctgctccatcggggaatgacacactgcggtgtctgcagctcctggaaggtgtcatttgacaacacatgtgggagaggaggtccttggagtgctgcagctttgggaaagctgcctcgtttcccttttcctctagaagcagaaccagctctacgagagtgagactgggaacttgatggctcagagagcatcttttcctcccattttagaaaatcagattttctcctgtgggaaaaaaaaattccatgcactctctctctgttaaagatcagctattcccttctgatcttggaaagaggttctgcactcctggaaccggtcacaggaacgcacagatcatggcaggatgcgctgggacggcccatcttggcaaggttcagtctgaatggcatggagaccgggagatagaggggttttagatttttaaaaggtaggttttaaaaataagttttatacataaacagttttggagaaaaattacagatcatataagcaagacagtggcactaaaatgtttaattcattaatctgtttgtttggcactgatgcaatgtatggcttttctcttgccccaaatcacaaacatatgtatctttggggaaactaacaatatgattgcactaaataaactactttgaatagaggccaaattaatcttttaaaaatgatgataatcatcaggtttactcagtgaaatcatattaattattttccaaaatctaaaagctgtagctggagaagcccatggccacgaggaagcagcaattaattagatcaacacttttctccagggttcaccatgcaggcaacattaccttgtctttcaaaagacacctgccttatgcaaggggaaacctgtgaaagctgcactcagagggaggagtttttcttacataatttgcaatttcaggaatttaatttataggcagatctttaaatacagtcaacttacggtgcacagtaatatgaaagccacactttgaaggtaataaatacacagcatgcagactgggagttgctagcaaacaaatggcttacttacaaaagcagcttttagttcagacttagtttttataaaatgggaattctgacttacttaaccaggtttgggatggagatggtctgcatcagctttttgtattaacaaagttactggctctttgtgtgtctccaggtaactttgcttgattaaacagcaaagccatattctaaattcactgttgaatgcctgtcccagtccaaattgtctgtctgctcttatttttgtaccatattgctcttaaaaatcttggtttggtacagttcataattcaccaaaagttcatataatttaaagaaacactaaattagtttaaaatgaagcaatttatatctttatgcaaaaacatatgtctgtctttgcaaaggactgtaagcagattacaataaatcctttactttaatcacc

SEQ ID NO: 14043 - DNA, 5893 bp, Homo sapiens
  source 1..5893: mol_type = unassigned DNA
aaaagggccagccctccagctggcccactccccctccgggctttcgcccgccctctctccctcccttttttgcccgccctggccctgcccctgcccctgccccctcctctcagcccctccgcgcccggggtgtcattgggcccgggagacgggagccaacttcaggctgctcagaggaagcccgtgcagtcagtcacctgggtgcaagagcgttgctgcctcgggctctcccgctgcagggagagcggcactcgctggcctggatgtggttggatttaggggggctccgcagcaggggtttcgtggcggtggcaagcgctgcaacaggtagacggcgagagacggaccccggccgaggcagcgatggagaccaaaggctaccacagtctccctgaaggtctagatatggaaagacggtggggtcaagtttctcaggctgtggagcgttcttccctgggacctacagagaggaccgatgagaataactacatggagattgtcaacgtaagctgtgtttccggtgctattccaaacaacagtactcaaggaagcagcaaagaaaaacaagaactactcccttgccttcagcaagacaataatcggcctgggattttaacatctgatattaaaactgagctggaatctaaggaactttcagcaactgtagctgagtccatgggtttatatatggattctgtaagagatgctgactattcctatgagcagcagaaccaacaaggaagcatgagtccagctaagatttatcagaatgttgaacagctggtgaaattttacaaaggaaatggccatcgtccttccactctaagttgtgtgaacacgcccttgagatcatttatgtctgactctgggagctccgtgaatggtggcgtcatgcgcgccgttgttaaaagccctatcatgtgtcatgagaaaagcccgtctgtttgcagccctctgaacatgacatcttcggtttgcagccctgctggaatcaactctgtgtcctccaccacagccagctttggcagttttccagtgcacagcccaatcacccagggaactcctctgacatgctcccctaatgttgaaaatcgaggctccaggtcgcacagccctgcacatgctagcaatgtgggctctcctctctcaagtccgttaagtagcatgaaatcctcaatttccagccctccaagtcactgcagtgtaaaatctccagtctccagtcccaataatgtcactctgagatcctctgtgtctagccctgcaaatattaacaactcaaggtgctctgtttccagcccttcgaacactaataacagatccacgctttccagtccggcagccagtactgtgggatctatctgtagccctgtaaacaatgccttcagctacactgcttctggcacctctgctggatccagtacattgcgggatgtggttcccagtccagacacgcaggagaaaggtgctcaagaggtcccttttcctaagactgaggaagtagagagtgccatctcaaatggtgtgactggccagcttaatattgtccagtacataaaaccagaaccagatggagcttttagcagctcatgtctaggaggaaatagcaaaataaattcggattcttcattctcagtaccaataaagcaagaatcaaccaagcattcatgttcaggcacctcttttaaagggaatccaacagtaaacccgtttccatttatggatggctcgtatttttcctttatggatgataaagactattattccctatcaggaattttaggaccacctgtgcccggctttgatggtaactgtgaaggcagcggattcccagtgggtattaaacaagaaccagatgatgggagctattacccagaggccagcatcccttcctctgctattgttggggtgaattcaggtggacagtccttccactacaggattggtgctcaaggtacaatatctttatcacgatcggctagagaccaatctttccaacacctgagttcctttcctcctgtcaatactttagtggagtcatggaaatcacacggcgacctgtcgtctagaagaagtgatgggtatccggtcttagaatacattccagaaaatgtatcaagctctactttacgaagtgtttctactggatcttcaagaccttcaaaaatatgtttggtgtgtggggatgaggcttcaggatgccattatggggtagtcacctgtggcagctgcaaagttttcttcaaaagagcagtggaagggcaacacaactatttatgtgctggaagaaatgattgcatcattgataagattcgacgaaagaattgtcctgcttgcagacttcagaaatgtcttcaagctggaatgaatttaggagcacgaaagtcaaagaagttgggaaagttaaaagggattcacgaggagcagccacagcagcagcagcccccacccccacccccacccccgcaaagcccagaggaagggacaacgtacatcgctcctgcaaaagaaccctcggtcaacacagcactggttcctcagctctccacaatctcacgagcgctcacaccttcccccgttatggtccttgaaaacattgaacctgaaattgtatatgcaggctatgacagctcaaaaccagatacagccgaaaatctgctctccacgctcaaccgcttagcaggcaaacagatgatccaagtcgtgaagtgggcaaaggtacttccaggatttaaaaacttgcctcttgaggaccaaattaccctaatccagtattcttggatgtgtctatcatcatttgccttgagctggagatcgtacaaacatacgaacagccaatttctctattttgcaccagacctagtctttaatgaagagaagatgcatcagtctgccatgtatgaactatgccaggggatgcaccaaatcagccttcagttcgttcgactgcagctcacctttgaagaatacaccatcatgaaagttttgctgctactaagcacaattccaaaggatggcctcaaaagccaggctgcatttgaagaaatgaggacaaattacatcaaagaactgaggaagatggtaactaagtgtcccaacaattctgggcagagctggcagaggttctaccaactgaccaagctgctggactccatgcatgacctggtgagcgacctgctggaattctgcttctacaccttccgagagtcccatgcgctgaaggtagagttccccgcaatgctggtggagatcatcagcgaccagctgcccaaggtggagtcggggaacgccaagccgctctacttccaccggaagtgactgcccgctgcccagaagaactttgccttaagtttccctgtgttgttccacacccagaaggacccaagaaaacctgtttttaacatgtgatggttgattcacacttgttcaacagtttctcaagtttaaagtcatgtcagaggtttggagccgggaaagctgtttttccgtggatttggcgagaccagagcagtctgaaggattccccacctccaatcccccagcgcttagaaacatgttcctgttcctcgggatgaaaagccatatctagtcaataactctgattttgatattttcacagatggaagaagttttaactatgccgtgtagtttctggtatcgttcgcttgttttaaaagggttcaaggactaacgaacgttttaaagcttacccttggtttgcacataaaacgtatagtcaatatggggcattaatattcttttgttattaaaaaaacacaaaaaaataataaaaaaatatatacagattcctgttgtgtaataacagaactcgtggcgtggggcagcagctgcctctgagccctcgctcgtccacggtcttctgcatcactggtatacacactcgttagcgtccatttcttatttaattagaatggataagatgatgttaaatgccttggtttgatttctagtatctattgtgttggctttacaaataattttttgcagtcttttgctgtgctgtacattactgtatgtataaattatgaaggacctgaaataaggtataaggatcttttgtaaatgagacacatacaaaaaaaatctttaatggttaataggatgaatgggaaagtatttttgaaagaattctattttgctggagactatttaagtactatctttgtctaaacaaggtaatttttttttgtaaagtgcaatgtcctgcatgcataatgaaccgtttacagtgtatttaagaaagggaaagctgtgccttttttagcttcatatctaatttaccattattttacagtctctgttgtaaataaccacactgaaacctcttcggttgtcttgaaacctttctactttttctgtactttttgttttgttcttggtctcccgcttggggcatttgtgggactccagcacgttttctggcttctgcttcatcctgctccatcggggaatgacacactgcggtgtctgcagctcctggaaggtgtcatttgacaacacatgtgggagaggaggtccttggagtgctgcagctttgggaaagctgcctcgtttcccttttcctctagaagcagaaccagctctacgagagtgagactgggaacttgatggctcagagagcatcttttcctcccattttagaaaatcagattttctcctgtgggaaaaaaaaattccatgcactctctctctgttaaagatcagctattcccttctgatcttggaaagaggttctgcactcctggaaccggtcacaggaacgcacagatcatggcaggatgcgctgggacggcccatcttggcaaggttcagtctgaatggcatggagaccgggagatagaggggttttagatttttaaaaggtaggttttaaaaataagttttatacataaacagttttggagaaaaattacagatcatataagcaagacagtggcactaaaatgtttaattcattaatctgtttgtttggcactgatgcaatgtatggcttttctcttgccccaaatcacaaacatatgtatctttggggaaactaacaatatgattgcactaaataaactactttgaatagaggccaaattaatcttttaaaaatgatgataatcatcaggtttactcagtgaaatcatattaattattttccaaaatctaaaagctgtagctggagaagcccatggccacgaggaagcagcaattaattagatcaacacttttctccagggttcaccatgcaggcaacattaccttgtctttcaaaagacacctgccttatgcaaggggaaacctgtgaaagctgcactcagagggaggagtttttcttacataatttgcaatttcaggaatttaatttataggcagatctttaaatacagtcaacttacggtgcacagtaatatgaaagccacactttgaaggtaataaatacacagcatgcagactgggagttgctagcaaacaaatggcttacttacaaaagcagcttttagttcagacttagtttttataaaatgggaattctgacttacttaaccaggtttgggatggagatggtctgcatcagctttttgtattaacaaagttactggctctttgtgtgtctccaggtaactttgcttgattaaacagcaaagccatattctaaattcactgttgaatgcctgtcccagtccaaattgtctgtctgctcttatttttgtaccatattgctcttaaaaatcttggtttggtacagttcataattcaccaaaagttcatataatttaaagaaacactaaattagtttaaaatgaagcaatttatatctttatgcaaaaacatatgtctgtctttgcaaaggactgtaagcagattacaataaatcctttacttt

SEQ ID NO: 14044 - DNA, 3822 bp, Homo sapiens
  source 1..3822: mol_type = unassigned DNA
ggtttcgtggcggtggcaagcgctgcaacaggtagacggcgagagacggaccccggccgaggcagcgatggagaccaaaggctaccacagtctccctgaaggtctagatatggaaagacggtggggtcaagtttctcaggctgtggagcgttcttccctgggacctacagagaggaccgatgagaataactacatggagattgtcaacgtaagctgtgtttccggtgctattccaaacaacagtactcaaggaagcagcaaagaaaaacaagaactactcccttgccttcagcaagacaataatcggcctgggattttaacatctgatattaaaactgagctggaatctaaggaactttcagcaactgtagctgagtccatgggtttatatatggattctgtaagagatgctgactattcctatgagcagcagaaccaacaaggaagcatgagtccagctaagatttatcagaatgttgaacagctggtgaaattttacaaaggaaatggccatcgtccttccactctaagttgtgtgaacacgcccttgagatcatttatgtctgactctgggagctccgtgaatggtggcgtcatgcgcgccgttgttaaaagccctatcatgtgtcatgagaaaagcccgtctgtttgcagccctctgaacatgacatcttcggtttgcagccctgctggaatcaactctgtgtcctccaccacagccagctttggcagttttccagtgcacagcccaatcacccagggaactcctctgacatgctcccctaatgttgaaaatcgaggctccaggtcgcacagccctgcacatgctagcaatgtgggctctcctctctcaagtccgttaagtagcatgaaatcctcaatttccagccctccaagtcactgcagtgtaaaatctccagtctccagtcccaataatgtcactctgagatcctctgtgtctagccctgcaaatattaacaactcaaggtgctctgtttccagcccttcgaacactaataacagatccacgctttccagtccggcagccagtactgtgggatctatctgtagccctgtaaacaatgccttcagctacactgcttctggcacctctgctggatccagtacattgcgggatgtggttcccagtccagacacgcaggagaaaggtgctcaagaggtcccttttcctaagactgaggaagtagagagtgccatctcaaatggtgtgactggccagcttaatattgtccagtacataaaaccagaaccagatggagcttttagcagctcatgtctaggaggaaatagcaaaataaattcggattcttcattctcagtaccaataaagcaagaatcaaccaagcattcatgttcaggcacctcttttaaagggaatccaacagtaaacccgtttccatttatggatggctcgtatttttcctttatggatgataaagactattattccctatcaggaattttaggaccacctgtgcccggctttgatggtaactgtgaaggcagcggattcccagtgggtattaaacaagaaccagatgatgggagctattacccagaggccagcatcccttcctctgctattgttggggtgaattcaggtggacagtccttccactacaggattggtgctcaaggtacaatatctttatcacgatcggctagagaccaatctttccaacacctgagttcctttcctcctgtcaatactttagtggagtcatggaaatcacacggcgacctgtcgtctagaagaagtgatgggtatccggtcttagaatacattccagaaaatgtatcaagctctactttacgaagtgtttctactggatcttcaagaccttcaaaaatatgtttggtgtgtggggatgaggcttcaggatgccattatggggtagtcacctgtggcagctgcaaagttttcttcaaaagagcagtggaagggcaacacaactatttatgtgctggaagaaatgattgcatcattgataagattcgacgaaagaattgtcctgcttgcagacttcagaaatgtcttcaagctggaatgaatttaggaggatttaaaaacttgcctcttgaggaccaaattaccctaatccagtattcttggatgtgtctatcatcatttgccttgagctggagatcgtacaaacatacgaacagccaatttctctattttgcaccagacctagtctttaatgaagagaagatgcatcagtctgccatgtatgaactatgccaggggatgcaccaaatcagccttcagttcgttcgactgcagctcacctttgaagaatacaccatcatgaaagttttgctgctactaagcacaattccaaaggatggcctcaaaagccaggctgcatttgaagaaatgaggacaaattacatcaaagaactgaggaagatggtaactaagtgtcccaacaattctgggcagagctggcagaggttctaccaactgaccaagctgctggactccatgcatgacctggtgagcgacctgctggaattctgcttctacaccttccgagagtcccatgcgctgaaggtagagttccccgcaatgctggtggagatcatcagcgaccagctgcccaaggtggagtcggggaacgccaagccgctctacttccaccggaagtgactgcccgctgcccagaagaactttgccttaagtttccctgtgttgttccacacccagaaggacccaagaaaacctgtttttaacatgtgatggttgattcacacttgttcaacagtttctcaagtttaaagtcatgtcagaggtttggagccgggaaagctgtttttccgtggatttggcgagaccagagcagtctgaaggattccccacctccaatcccccagcgcttagaaacatgttcctgttcctcgggatgaaaagccatatctagtcaataactctgattttgatattttcacagatggaagaagttttaactatgccgtgtagtttctggtatcgttcgcttgttttaaaagggttcaaggactaacgaacgttttaaagcttacccttggtttgcacataaaacgtatagtcaatatggggcattaatattcttttgttattaaaaaaacacaaaaaaataataaaaaaatatatacagattcctgttgtgtaataacagaactcgtggcgtggggcagcagctgcctctgagccctcgctcgtccacggtcttctgcatcactggtatacacactcgttagcgtccatttcttatttaattagaatggataagatgatgttaaatgccttggtttgatttctagtatctattgtgttggctttacaaataattttttgcagtcttttgctgtgctgtacattactgtatgtataaattatgaaggacctgaaataaggtataaggatcttttgtaaatgagacacatacaaaaaaaatctttaatggttaataggatgaatgggaaagtatttttgaaagaattctattttgctggagactatttaagtactatctttgtctaaacaaggtaatttttttttgtaaagtgcaatgtcctgcatgcataatgaaccgtttacagtgtatttaagaaagggaaagctgtgccttttttagcttcatatctaatttaccattattttacagtctctgttgtaaataaccacactgaaacctcttcggttgtcttgaaacctttctactttttctgtactttttgttttgttcttggtctcccgcttggggcatttgtgggactccagcacgttttctggcttctgcttcatcctgctccatcggg

SEQ ID NO: 14045 - DNA, 3150 bp, Homo sapiens
  source 1..3150: mol_type = unassigned DNA
cgggagccaacttcaggctgctcagaggaagcccgtgcagtcagtcacctgggtgcaagagcgttgctgcctcgggctctcccgctgcagggagagcggcactcgctggcctggatgtggttggatttaggggggctccgcagcaggggtttcgtggcggtggcaagcgctgcaacaggtagacggcgagagacggaccccggccgaggcagcgatggagaccaaaggctaccacagtctccctgaaggtctagatatggaaagacggtggggtcaagtttctcaggctgtggagcgttcttccctgggacctacagagaggaccgatgagaataactacatggagattgtcaacgtaagctgtgtttccggtgctattccaaacaacagtactcaaggaagcagcaaagaaaaacaagaactactcccttgccttcagcaagacaataatcggcctgggattttaacatctgatattaaaactgagctggaatctaaggaactttcagcaactgtagctgagtccatgggtttatatatggattctgtaagagatgctgactattcctatgagcagcagaaccaacaaggaagcatgagtccagctaagatttatcagaatgttgaacagctggtgaaattttacaaaggaaatggccatcgtccttccactctaagttgtgtgaacacgcccttgagatcatttatgtctgactctgggagctccgtgaatggtggcgtcatgcgcgccgttgttaaaagccctatcatgtgtcatgagaaaagcccgtctgtttgcagccctctgaacatgacatcttcggtttgcagccctgctggaatcaactctgtgtcctccaccacagccagctttggcagttttccagtgcacagcccaatcacccagggaactcctctgacatgctcccctaatgttgaaaatcgaggctccaggtcgcacagccctgcacatgctagcaatgtgggctctcctctctcaagtccgttaagtagcatgaaatcctcaatttccagccctccaagtcactgcagtgtaaaatctccagtctccagtcccaataatgtcactctgagatcctctgtgtctagccctgcaaatattaacaactcaaggtgctctgtttccagcccttcgaacactaataacagatccacgctttccagtccggcagccagtactgtgggatctatctgtagccctgtaaacaatgccttcagctacactgcttctggcacctctgctggatccagtacattgcgggatgtggttcccagtccagacacgcaggagaaaggtgctcaagaggtcccttttcctaagactgaggaagtagagagtgccatctcaaatggtgtgactggccagcttaatattgtccagtacataaaaccagaaccagatggagcttttagcagctcatgtctaggaggaaatagcaaaataaattcggattcttcattctcagtaccaataaagcaagaatcaaccaagcattcatgttcaggcacctcttttaaagggaatccaacagtaaacccgtttccatttatggatggctcgtatttttcctttatggatgataaagactattattccctatcaggaattttaggaccacctgtgcccggctttgatggtaactgtgaaggcagcggattcccagtgggtattaaacaagaaccagatgatgggagctattacccagaggccagcatcccttcctctgctattgttggggtgaattcaggtggacagtccttccactacaggattggtgctcaaggtacaatatctttatcacgatcggctagagaccaatctttccaacacctgagttcctttcctcctgtcaatactttagtggagtcatggaaatcacacggcgacctgtcgtctagaagaagtgatgggtatccggtcttagaatacattccagaaaatgtatcaagctctactttacgaagtgtttctactggatcttcaagaccttcaaaaatatgtttggtgtgtggggatgaggcttcaggatgccattatggggtagtcacctgtggcagctgcaaagttttcttcaaaagagcagtggaagggcaacacaactatttatgtgctggaagaaatgattgcatcattgataagattcgacgaaagaattgtcctgcttgcagacttcagaaatgtcttcaagctggaatgaatttaggagagagaagatgcatcagtctgccatgtatgaactatgccaggggatgcaccaaatcagccttcagttcgttcgactgcagctcacctttgaagaatacaccatcatgaaagttttgctgctactaagcacaattccaaaggatggcctcaaaagccaggctgcatttgaagaaatgaggacaaattacatcaaagaactgaggaagatggtaactaagtgtcccaacaattctgggcagagctggcagaggttctaccaactgaccaagctgctggactccatgcatgacctggtgagcgacctgctggaattctgcttctacaccttccgagagtcccatgcgctgaaggtagagttccccgcaatgctggtggagatcatcagcgaccagctgcccaaggtggagtcggggaacgccaagccgctctacttccaccggaagtgactgcccgctgcccagaagaactttgccttaagtttccctgtgttgttccacacccagaaggacccaagaaaacctgtttttaacatgtgatggttgattcacacttgttcaacagtttctcaagtttaaagtcatgtcagaggtttggagccgggaaagctgtttttccgtggatttggcgagaccagagcagtctgaaggattccccacctccaatcccccagcgcttagaaacatgttcctgttcctcgggatgaaaagccatatctagtcaataactctgattttgatattttcacagatggaagaagttttaactatgccgtgtagtttctggtatcgttcgcttgttttaaaagggttcaaggactaacgaacgttttaaagcttacccttggtttgcacataaaacgtatagtcaatatggggcattaatattcttttgttattaaaaaaacacaaaaaaataataaaaaa

SEQ ID NO: 14046 - DNA, 2967 bp, Homo sapiens
  source 1..2967: mol_type = unassigned DNA
atggagaccaaaggctaccacagtctccctgaaggtctagatatggaaagacggtggggtcaagtttctcaggctgtggagcgttcttccctgggacctacagagaggaccgatgagaataactacatggagattgtcaacgtaagctgtgtttccggtgctattccaaacaacagtactcaaggaagcagcaaagaaaaacaagaactactcccttgccttcagcaagacaataatcggcctgggattttaacatctgatattaaaactgagctggaatctaaggaactttcagcaactgtagctgagtccatgggtttatatatggattctgtaagagatgctgactattcctatgagcagcagaaccaacaaggaagcatgagtccagctaagatttatcagaatgttgaacagctggtgaaattttacaaaggaaatggccatcgtccttccactctaagttgtgtgaacacgcccttgagatcatttatgtctgactctgggagctccgtgaatggtggcgtcatgcgcgccgttgttaaaagccctatcatgtgtcatgagaaaagcccgtctgtttgcagccctctgaacatgacatcttcggtttgcagccctgctggaatcaactctgtgtcctccaccacagccagctttggcagttttccagtgcacagcccaatcacccagggaactcctctgacatgctcccctaatgttgaaaatcgaggctccaggtcgcacagccctgcacatgctagcaatgtgggctctcctctctcaagtccgttaagtagcatgaaatcctcaatttccagccctccaagtcactgcagtgtaaaatctccagtctccagtcccaataatgtcactctgagatcctctgtgtctagccctgcaaatattaacaactcaaggtgctctgtttccagcccttcgaacactaataacagatccacgctttccagtccggcagccagtactgtgggatctatctgtagccctgtaaacaatgccttcagctacactgcttctggcacctctgctggatccagtacattgcgggatgtggttcccagtccagacacgcaggagaaaggtgctcaagaggtcccttttcctaagactgaggaagtagagagtgccatctcaaatggtgtgactggccagcttaatattgtccagtacataaaaccagaaccagatggagcttttagcagctcatgtctaggaggaaatagcaaaataaattcggattcttcattctcagtaccaataaagcaagaatcaaccaagcattcatgttcaggcacctcttttaaagggaatccaacagtaaacccgtttccatttatggatggctcgtatttttcctttatggatgataaagactattattccctatcaggaattttaggaccacctgtgcccggctttgatggtaactgtgaaggcagcggattcccagtgggtattaaacaagaaccagatgatgggagctattacccagaggccagcatcccttcctctgctattgttggggtgaattcaggtggacagtccttccactacaggattggtgctcaaggtacaatatctttatcacgatcggctagagaccaatctttccaacacctgagttcctttcctcctgtcaatactttagtggagtcatggaaatcacacggcgacctgtcgtctagaagaagtgatgggtatccggtcttagaatacattccagaaaatgtatcaagctctactttacgaagtgtttctactggatcttcaagaccttcaaaaatatgtttggtgtgtggggatgaggcttcaggatgccattatggggtagtcacctgtggcagctgcaaagttttcttcaaaagagcagtggaaggtaaatgttcatggcaacacaactatttatgtgctggaagaaatgattgcatcattgataagattcgacgaaagaattgtcctgcttgcagacttcagaaatgtcttcaagctggaatgaatttaggagcacgaaagtcaaagaagttgggaaagttaaaagggattcacgaggagcagccacagcagcagcagcccccacccccacccccacccccgcaaagcccagaggaagggacaacgtacatcgctcctgcaaaagaaccctcggtcaacacagcactggttcctcagctctccacaatctcacgagcgctcacaccttcccccgttatggtccttgaaaacattgaacctgaaattgtatatgcaggctatgacagctcaaaaccagatacagccgaaaatctgctctccacgctcaaccgcttagcaggcaaacagatgatccaagtcgtgaagtgggcaaaggtacttccaggatttaaaaacttgcctcttgaggaccaaattaccctaatccagtattcttggatgtgtctatcatcatttgccttgagctggagatcgtacaaacatacgaacagccaatttctctattttgcaccagacctagtctttaatgaagagaagatgcatcagtctgccatgtatgaactatgccaggggatgcaccaaatcagccttcagttcgttcgactgcagctcacctttgaagaatacaccatcatgaaagttttgctgctactaagcacaattccaaaggatggcctcaaaagccaggctgcatttgaagaaatgaggacaaattacatcaaagaactgaggaagatggtaactaagtgtcccaacaattctgggcagagctggcagaggttctaccaactgaccaagctgctggactccatgcatgacctggtgagcgacctgctggaattctgcttctacaccttccgagagtcccatgcgctgaaggtagagttccccgcaatgctggtggagatcatcagcgaccagctgcccaaggtggagtcggggaacgccaagccgctctacttccaccggaagtga

SEQ ID NO: 14047 - DNA, 877 bp, Homo sapiens
  source 1..877: mol_type = unassigned DNA
agaagatggagaaacttctgaagaggcccagggccctaagtgcctgccatagaggccgcagtttcctatggagtgccccctacaccactgacggggcaacacaactatttatgtgctggaagaaatgattgcatcattgataagattcgacgaaagaattgtcctgcttgcagacttcagaaatgtcttcaagctggaatgaatttaggagcacgaaagtcaaagaagttgggaaagttaaaagggattcacgaggagcagccacagcagcagcagcccccacccccacccccacccccgcaaagcccagaggaagggacaacgtacatcgctcctgcaaaagaaccctcggtcaacacagcactggttcctcagctctccacaatctcacgagcgctcacaccttcccccgttatggtccttgaaaacattgaacctgaaattgtatatgcaggctatgacagctcaaaaccagatacagccgaaaatctgctctccacgctcaaccgcttagcaggcaaacagatgatccaagtcgtgaagtgggcaaaggtacttccaggatttaaaaacttgcctcttgaggaccaaattaccctaatccagtattcttggatgtgtctatcatcatttgccttgagctggagatcgtacaaacatacgaacagccaatttctctattttgcaccagacctagtctttaatgaactgttggcgagagtgagagagggttgaagtcttagtggcacttcacatgcctctgtggattctctgagtgtctctctgggatgaaggtgacttccacccacaccatcttgcgtctgaagcactagttgtgtgagggcagctccattagacgagtacacaactcagttgc

SEQ ID NO: 14048 - DNA, 491 bp, Homo sapiens
  source 1..491: mol_type = unassigned DNA
agcagcagcccccacccccacccccacccccgcaaagcccagaggaagggacaacgtacatcgctcctgcaaaagaaccctcggtcaacacagcactggttcctcagctctccacaatctcacgagcgctcacaccttcccccgttatggtccttgaaaacattgaacctgaaattgtatatgcaggctatgacagctcaaaaccagatacagccgaaaatctgctctccacgctcaaccgcttagcaggcaaacagatgatccaagtcgtgaagtgggcaaaggtacttccaggatttaaaaacttgcctcttgaggaccaaattaccctaatccagtattcttggatgtgtctatcatcatttgccttgagctggagatcgtacaaacatacgaacagccaatttctctattttgcaccagacctagtctttaatgagtaagtacctattaattagccttcataaaataaactgcagagttatgcgtta

SEQ ID NO: 14049 - DNA, 438 bp, Homo sapiens
  source 1..438: mol_type = unassigned DNA
gtaataacaatagcagagacagggtggggaagctattttcttcccacgattcgattttcttctttgaagaggtagtaattcggttgtacacacttaatattgaagcacatcccaacccaagaactaagtaactattgttattacgcatccccttcccacactaagggatttttaagctgaaaccgcaagtgtacaaaggctcagagctctactttacgaagtgtttctactggatcttcaagaccttcaaaaatatgtttggtgtgtggggatgaggcttcaggatgccattatggggtagtcacctgtggcagctgcaaagttttcttcaaaagagcagtggaagggcaacacaactatttatgtgctggaagaaatgattgcatcattgataagattcgacgaaagaattgtcctgcttgcagacttcagaaatgt

SEQ ID NO: 14050 - DNA, 5909 bp, Homo sapiens
  source 1..5909: mol_type = unassigned DNA
aaaagggccagccctccagctggcccactccccctccgggctttcgcccgccctctctccctcccttttttgcccgccctggccctgcccctgcccctgccccctcctctcagcccctccgcgcccggggtgtcattgggcccgggagacgggagccaacttcaggctgctcagaggaagcccgtgcagtcagtcacctgggtgcaagagcgttgctgcctcgggctctcccgctgcagggagagcggcactcgctggcctggatgtggttggatttaggggggctccgcagcaggggtttcgtggcggtggcaagcgctgcaacaggtagacggcgagagacggaccccggccgaggcagcgatggagaccaaaggctaccacagtctccctgaaggtctagatatggaaagacggtggggtcaagtttctcaggctgtggagcgttcttccctgggacctacagagaggaccgatgagaataactacatggagattgtcaacgtaagctgtgtttccggtgctattccaaacaacagtactcaaggaagcagcaaagaaaaacaagaactactcccttgccttcagcaagacaataatcggcctgggattttaacatctgatattaaaactgagctggaatctaaggaactttcagcaactgtagctgagtccatgggtttatatatggattctgtaagagatgctgactattcctatgagcagcagaaccaacaaggaagcatgagtccagctaagatttatcagaatgttgaacagctggtgaaattttacaaaggaaatggccatcgtccttccactctaagttgtgtgaacacgcccttgagatcatttatgtctgactctgggagctccgtgaatggtggcgtcatgcgcgccgttgttaaaagccctatcatgtgtcatgagaaaagcccgtctgtttgcagccctctgaacatgacatcttcggtttgcagccctgctggaatcaactctgtgtcctccaccacagccagctttggcagttttccagtgcacagcccaatcacccagggaactcctctgacatgctcccctaatgttgaaaatcgaggctccaggtcgcacagccctgcacatgctagcaatgtgggctctcctctctcaagtccgttaagtagcatgaaatcctcaatttccagccctccaagtcactgcagtgtaaaatctccagtctccagtcccaataatgtcactctgagatcctctgtgtctagccctgcaaatattaacaactcaaggtgctctgtttccagcccttcgaacactaataacagatccacgctttccagtccggcagccagtactgtgggatctatctgtagccctgtaaacaatgccttcagctacactgcttctggcacctctgctggatccagtacattgcgggatgtggttcccagtccagacacgcaggagaaaggtgctcaagaggtcccttttcctaagactgaggaagtagagagtgccatctcaaatggtgtgactggccagcttaatattgtccagtacataaaaccagaaccagatggagcttttagcagctcatgtctaggaggaaatagcaaaataaattcggattcttcattctcagtaccaataaagcaagaatcaaccaagcattcatgttcaggcacctcttttaaagggaatccaacagtaaacccgtttccatttatggatggctcgtatttttcctttatggatgataaagactattattccctatcaggaattttaggaccacctgtgcccggctttgatggtaactgtgaaggcagcggattcccagtgggtattaaacaagaaccagatgatgggagctattacccagaggccagcatcccttcctctgctattgttggggtgaattcaggtggacagtccttccactacaggattggtgctcaaggtacaatatctttatcacgatcggctagagaccaatctttccaacacctgagttcctttcctcctgtcaatactttagtggagtcatggaaatcacacggcgacctgtcgtctagaagaagtgatgggtatccggtcttagaatacattccagaaaatgtatcaagctctactttacgaagtgtttctactggatcttcaagaccttcaaaaatatgtttggtgtgtggggatgaggcttcaggatgccattatggggtagtcacctgtggcagctgcaaagttttcttcaaaagagcagtggaaggtaaatgttcatggcaacacaactatttatgtgctggaagaaatgattgcatcattgataagattcgacgaaagaattgtcctgcttgcagacttcagaaatgtcttcaagctggaatgaatttaggagcacgaaagtcaaagaagttgggaaagttaaaagggattcacgaggagcagccacagcagcagcagcccccacccccacccccacccccgcaaagcccagaggaagggacaacgtacatcgctcctgcaaaagaaccctcggtcaacacagcactggttcctcagctctccacaatctcacgagcgctcacaccttcccccgttatggtccttgaaaacattgaacctgaaattgtatatgcaggctatgacagctcaaaaccagatacagccgaaaatctgctctccacgctcaaccgcttagcaggcaaacagatgatccaagtcgtgaagtgggcaaaggtacttccaggatttaaaaacttgcctcttgaggaccaaattaccctaatccagtattcttggatgtgtctatcatcatttgccttgagctggagatcgtacaaacatacgaacagccaatttctctattttgcaccagacctagtctttaatgaagagaagatgcatcagtctgccatgtatgaactatgccaggggatgcaccaaatcagccttcagttcgttcgactgcagctcacctttgaagaatacaccatcatgaaagttttgctgctactaagcacaattccaaaggatggcctcaaaagccaggctgcatttgaagaaatgaggacaaattacatcaaagaactgaggaagatggtaactaagtgtcccaacaattctgggcagagctggcagaggttctaccaactgaccaagctgctggactccatgcatgacctggtgagcgacctgctggaattctgcttctacaccttccgagagtcccatgcgctgaaggtagagttccccgcaatgctggtggagatcatcagcgaccagctgcccaaggtggagtcggggaacgccaagccgctctacttccaccggaagtgactgcccgctgcccagaagaactttgccttaagtttccctgtgttgttccacacccagaaggacccaagaaaacctgtttttaacatgtgatggttgattcacacttgttcaacagtttctcaagtttaaagtcatgtcagaggtttggagccgggaaagctgtttttccgtggatttggcgagaccagagcagtctgaaggattccccacctccaatcccccagcgcttagaaacatgttcctgttcctcgggatgaaaagccatatctagtcaataactctgattttgatattttcacagatggaagaagttttaactatgccgtgtagtttctggtatcgttcgcttgttttaaaagggttcaaggactaacgaacgttttaaagcttacccttggtttgcacataaaacgtatagtcaatatggggcattaatattcttttgttattaaaaaaacacaaaaaaataataaaaaaatatatacagattcctgttgtgtaataacagaactcgtggcgtggggcagcagctgcctctgagccctcgctcgtccacggtcttctgcatcactggtatacacactcgttagcgtccatttcttatttaattagaatggataagatgatgttaaatgccttggtttgatttctagtatctattgtgttggctttacaaataattttttgcagtcttttgctgtgctgtacattactgtatgtataaattatgaaggacctgaaataaggtataaggatcttttgtaaatgagacacatacaaaaaaaatctttaatggttaataggatgaatgggaaagtatttttgaaagaattctattttgctggagactatttaagtactatctttgtctaaacaaggtaatttttttttgtaaagtgcaatgtcctgcatgcataatgaaccgtttacagtgtatttaagaaagggaaagctgtgccttttttagcttcatatctaatttaccattattttacagtctctgttgtaaataaccacactgaaacctcttcggttgtcttgaaacctttctactttttctgtactttttgttttgttcttggtctcccgcttggggcatttgtgggactccagcacgttttctggcttctgcttcatcctgctccatcggggaatgacacactgcggtgtctgcagctcctggaaggtgtcatttgacaacacatgtgggagaggaggtccttggagtgctgcagctttgggaaagctgcctcgtttcccttttcctctagaagcagaaccagctctacgagagtgagactgggaacttgatggctcagagagcatcttttcctcccattttagaaaatcagattttctcctgtgggaaaaaaaaattccatgcactctctctctgttaaagatcagctattcccttctgatcttggaaagaggttctgcactcctggaaccggtcacaggaacgcacagatcatggcaggatgcgctgggacggcccatcttggcaaggttcagtctgaatggcatggagaccgggagatagaggggttttagatttttaaaaggtaggttttaaaaataagttttatacataaacagttttggagaaaaattacagatcatataagcaagacagtggcactaaaatgtttaattcattaatctgtttgtttggcactgatgcaatgtatggcttttctcttgccccaaatcacaaacatatgtatctttggggaaactaacaatatgattgcactaaataaactactttgaatagaggccaaattaatcttttaaaaatgatgataatcatcaggtttactcagtgaaatcatattaattattttccaaaatctaaaagctgtagctggagaagcccatggccacgaggaagcagcaattaattagatcaacacttttctccagggttcaccatgcaggcaacattaccttgtctttcaaaagacacctgccttatgcaaggggaaacctgtgaaagctgcactcagagggaggagtttttcttacataatttgcaatttcaggaatttaatttataggcagatctttaaatacagtcaacttacggtgcacagtaatatgaaagccacactttgaaggtaataaatacacagcatgcagactgggagttgctagcaaacaaatggcttacttacaaaagcagcttttagttcagacttagtttttataaaatgggaattctgacttacttaaccaggtttgggatggagatggtctgcatcagctttttgtattaacaaagttactggctctttgtgtgtctccaggtaactttgcttgattaaacagcaaagccatattctaaattcactgttgaatgcctgtcccagtccaaattgtctgtctgctcttatttttgtaccatattgctcttaaaaatcttggtttggtacagttcataattcaccaaaagttcatataatttaaagaaacactaaattagtttaaaatgaagcaatttatatctttatgcaaaaacatatgtctgtctttgcaaaggactgtaagcagattacaataaatcctttactttaatc

SEQ ID NO: 14051 - DNA, 548 bp, Homo sapiens
  source 1..548: mol_type = unassigned DNA
ttcctggtgtaagctttggtatggatggtggccgtctccctacagactgggagctgttagagggcagggatcctagctgacacatctatgtcctcgccttggttggaggcctccaccatggacagaggccaggccctgcccctcccaggcagcctggctccttctgctgggccctgaaggcagacgggataatgtggttggccaaggcctgttggtccatccagagtgagatgccctgtatccaagcccaatatgggacaccagcaccgagtccgggaccccgtgaccacctggcaagcgaccccctgacccctgagttcatcaagcccaccatggacctggccagccccgaggcagcccccgctgcccccactgccctgcccagcttcagcaccttcatggacggctacacaggagagtttgacaccttcctctaccagctgccaggaacagtccagccatgctcctcagcctcctcctcggcctcctccacatcctcgtcctcagccacctcccctgcctctgcctccttcaagttcgaggacttc

SEQ ID NO: 14052 - DNA, 1258 bp, Homo sapiens
  source 1..1258: mol_type = unassigned DNA
cgggcgcgggggcggggggcgccgcgcggccggaactgcgggcggggggcttcccgggggcggggggcgctgagcggctgcggcgcggctgcaggagcgcgaggaggaggtggcggcggcggcggaactggcgggggtcccctcgcggcgcccgggacccccggcctccaggcatgggcgcccctgcggtgcagagcagctcagggccggctggtgcgcgaccccggaaagcgggggtggagaggcgagcggagcccgcggggccaggcctccaccatggacagaggccaggccctgcccctcccaggcagcctggctccttctgctgggccctgaaggcagacgggataatgtggttggccaaggcctgttggtccatccagagtgagatgccctgtatccaagcccaatatgggacaccagcaccgagtccgggaccccgtgaccacctggcaagcgaccccctgacccctgagttcatcaagcccaccatggacctggccagccccgaggcagcccccgctgcccccactgccctgcccagcttcagcaccttcatggacggctacacaggagagtttgacaccttcctctaccagctgccaggaacagtccagccatgctcctcagcctcctcctcggcctcctccacatcctcgtcctcagccacctcccctgcctctgcctccttcaagttcgaggacttccaggtgtacggctgctaccccggccccctgagcggcccagtggatgaggccctgtcctccagtggctctgactactatggcagcccctgctcggccccgtcgccctccacgcccagcttccagccgccccagctctctccctgggatggctccttcggccacttctcgcccagccagacttacgaaggcctgcgggcatggacagagcagctgcccaaagcctctgggcccccacagcctccagccttcttttccttcagtcctcccaccggccccagccccagcctggcccagagccccctgaagttgttcccctcacaggccacccaccagctgggggagggagagagctattccatgcctacggccttcccaggtttggcacccacttctccacaccttgagggctcggggatactggatacacccgtgacctcaaccaaggcccggagcggggccccaggtggaagtgaaggccgctgtgctgtgtgtggggacaacgcttcatgccagcattatggtgtccgcacatgtgagggctgcaagggctt

SEQ ID NO: 14053 - DNA, 521 bp, Homo sapiens
  source 1..521: mol_type = unassigned DNA
ggcgctgagcggctgcggcgcggctgcaggagcgcgaggaggaggtggcggcggcggcggaactggcgggggtcccctcgcggcgcccgggacccccggcctccaggcatgggcgcccctgcggtgcagagcagctcagggccggctggtgcgcgaccccggaaagcgggggtggagaggcgagcggagcccgcggggccaggcctccaccatggacagaggccaggccctgcccctcccaggcagcctggctccttctgctgggccctgaaggcagacgggataatgtggttggccaaggcctgttggtccatccagagtgggctccctgagaccaccaggaagagcccccaaccaatcttgggattctcccttcgtgcggttgtctgggacctttttccagggtcaaagcagatcgtgaggaggaagctggtttcccatgacagtgggggagcccaggccccaggcagtgctacatttggatgtggagcctctcctttccattgtgaactgaattctac

SEQ ID NO: 14054 - DNA, 3511 bp, Homo sapiens
  source 1..3511: mol_type = unassigned DNA
tttctccgccggctgcgggaaccggttccaggagcgcgggagctcgtctgccaggagacccagccgggagggaccgatgctgcgtgatgcaaccccttcgagggactgagtcaagaaaccaaggctgggggtctcgtggagtcaggcggagctggggattaggactcggggcttgtgtctcccaggcgtgtttttttgttgttgttttgtttttttgccgcaacatcttccttatactgggtggggtgggggcgggggtggtctgtatttccagacctcctccatggtggtctggctgtgtggagggcagggcacagttccttgacttggctcattcccccccaacgccccccctttcttttttttttgagatggagtctcgctctgttgcccaggctggagtgcagtagcgtgatctcggctcactgcaatctccgtctcccgggttcaagcgaatctcctgcctcagcctccagagtagctgggactacaggcacccaccaccacgcccggctaatttttgtatttttagtagagacagggtttcaccatattggccaggctggtctggaactcctgaccttgtgatccgcctgcctcggcctcctaaagtgctgggattacaggcgtgagccaccgcgcctggcaggctcattccctttttatgccttcgtttttgatagatgacctggggatgggagaaatgctgcagaggtggtttatttacagtgaattgttaatttggttgtggggctagtattaggggcacattgggaaaacacaggctgggcagaggttggtaggttcacaacagttatgcccactgggtgctgatggatttgggggctgtcgtcggcctggcttggggccctagtggtggggctacaaggcttgctcctagatctactccaagtgaacatttaagatcagtgacttggatggagacttaaaaaggaagtcagctgactccgtgtagtcatccagagctgtgaggaatgacaagtgcacagtataaaatcaagattctaattgaaggcctccaccatggacagaggccaggccctgcccctcccaggcagcctggctccttctgctgggccctgaaggcagacgggataatgtggttggccaaggcctgttggtccatccagagtgagatgccctgtatccaagcccaatatgggacaccagcaccgagtccgggaccccgtgaccacctggcaagcgaccccctgacccctgagttcatcaagcccaccatggacctggccagccccgaggcagcccccgctgcccccactgccctgcccagcttcagcaccttcatggacggctacacaggagagtttgacaccttcctctaccagctgccaggaacagtccagccatgctcctcagcctcctcctcggcctcctccacatcctcgtcctcagccacctcccctgcctctgcctccttcaagttcgaggacttccaggtgtacggctgctaccccggccccctgagcggcccagtggatgaggccctgtcctccagtggctctgactactatggcagcccctgctcggccccgtcgccctccacgcccagcttccagccgccccagctctctccctgggatggctccttcggccacttctcgcccagccagacttacgaaggcctgcgggcatggacagagcagctgcccaaagcctctgggcccccacagcctccagccttcttttccttcagtcctcccaccggccccagccccagcctggcccagagccccctgaagttgttcccctcacaggccacccaccagctgggggagggagagagctattccatgcctacggccttcccaggtttggcacccacttctccacaccttgagggctcggggatactggatacacccgtgacctcaaccaaggcccggagcggggccccaggtggaagtgaaggccgctgtgctgtgtgtggggacaacgcttcatgccagcattatggtgtccgcacatgtgagggctgcaagggcttcttcaagcgcacagtgcagaaaaacgccaagtacatctgcctggctaacaaggactgccctgtggacaagaggcggcgaaaccgctgccagttctgccgcttccagaagtgcctggcggtgggcatggtgaaggaagttgtccgaacagacagcctgaaggggcggcggggccggctaccttcaaaacccaagcagcccccagatgcctcccctgccaatctcctcacttccctggtccgtgcacacctggactcagggcccagcactgccaaactggactactccaagttccaggagctggtgctgccccactttgggaaggaagatgctggggatgtacagcagttctacgacctgctctccggttctctggaggtcatccgcaagtgggcggagaagatccctggctttgctgagctgtcaccggctgaccaggacctgttgctggagtcggccttcctggagctcttcatcctccgcctggcgtacaggtctaagccaggcgagggcaagctcatcttctgctcaggcctggtgctacaccggctgcagtgtgcccgtggcttcggggactggattgacagtatcctggccttctcaaggtccctgcacagcttgcttgtcgatgtccctgccttcgcctgcctctctgcccttgtcctcatcaccgaccggcatgggctgcaggagccgcggcgggtggaggagctgcagaaccgcatcgccagctgcctgaaggagcacgtggcagctgtggcgggcgagccccagccagccagctgcctgtcacgtctgttgggcaaactgcccgagctgcggaccctgtgcacccagggcctgcagcgcatcttctacctcaagctggaggacttggtgccccctccacccatcattgacaagatcttcatggacacgctgcccttctgacccctgcctgggaacacgtgtgcacatgcgcactctcatatgccaccccatgtgcctttagtccacggacccccagagcacccccaagcctgggcttgagctgcagaatgactccaccttctcacctgctccaggaggtttgcagggagctcaagcccttggggagggggatgccttcatgggggtgaccccacgatttgtcttatcccccccagcctggccccggcctttatgttttttgtaagataaaccgtttttaacacatagcgccgtgctgtaaataagcccagtgctgctgtaaatacaggaagaaagagcttgaggtgggagcggggctgggaggaagggatgggccccgccttcctgggcagcctttccagcctcctgctggctctctcttcctaccctccttccacatgtacataaactgtcactctaggaagaagacaaatgacagattctgacatttatatttgtgtattttcctggatttatagtatgtgacttttctgattaatatatttaatatattgaataaaaaatagacatgtagttgg

SEQ ID NO: 14055 - DNA, 2029 bp, Homo sapiens
  source 1..2029: mol_type = unassigned DNA
tgtaggcctccaccatggacagaggccaggccctgcccctcccaggcagcctggctccttctgctgggccctgaaggcagacgggataatgtggttggccaaggcctgttggtccatccagagtgagatgccctgtatccaagcccaatatgggacaccagcaccgagtccgggaccccgtgaccacctggcaagcgaccccctgacccctgagttcatcaagcccaccatggacctggccagccccgaggcagcccccgctgcccccactgccctgcccagcttcagcaccttcatggacggctacacaggagagtttgacaccttcctctaccagctgccaggaacagtccagccatgctcctcagcctcctcctcggcctcctccacatcctcgtcctcagccacctcccctgcctctgcctccttcaagttcgaggacttccaggtgtacggctgctaccccggccccctgagcggcccagtggatgaggccctgtcctccagtggctctgactactatggcagcccctgctcggccccgtcgccctccacgcccagcttccagccgccccagctctctccctgggatggctccttcggccacttctcgcccagccagacttacgaaggcctgcgggcatggacagagcagctgcccaaagcctctgggcccccacagcctccagccttcttttccttcagtcctcccaccggccccagccccagcctggcccagagccccctgaagttgttcccctcacaggccacccaccagctgggggagggagagagctattccatgcctacggccttcccaggtttggcacccacttctccacaccttgagggctcggggatactggatacacccgtgacctcaaccaaggcccggagcggggccccaggtggaagtgaaggccgctgtgctgtgtgtggggacaacgcttcatgccagcattatggtgtccgcacatgtgagggctgcaagggcttcttcaagcgcacagtgcagaaaaacgccaagtacatctgcctggctaacaaggactgccctgtggacaagaggcggcgaaaccgctgccagttctgccgcttccagaagtgcctggcggtgggcatggtgaaggaagttgtccgaacagacagcctgaaggggcggcggggccggctaccttcaaaacccaagcagcccccagatgcctcccctgccaatctcctcacttccctggtccgtgcacacctggactcagggcccagcactgccaaactggactactccaagttccaggagctggtgctgccccactttgggaaggaagatgctggggatgtacagcagttctacgacctgctctccggttctctggaggtcatccgcaagtgggcggagaagatccctggctttgctgagctgtcaccggctgaccaggacctgttgctggagtcggccttcctggagctcttcatcctccgcctggcgtacaggtctaagccaggcgagggcaagctcatcttctgctcaggcctggtgctacaccggctgcagtgtgcccgtggcttcggggactggattgacagtatcctggccttctcaaggtccctgcacagcttgcttgtcgatgtccctgccttcgcctgcctctctgcccttgtcctcatcaccgaccggcatgggctgcaggagccgcggcgggtggaggagctgcagaaccgcatcgccagctgcctgaaggagcacgtggcagctgtggcgggcgagccccagccagccagctgcctgtcacgtctgttgggcaaactgcccgagctgcggaccctgtgcacccagggcctgcagcgcatcttctacctcaagctggaggacttggtgccccctccacccatcattgacaagatcttcatggacacgctgcccttctgacccctgcctgggaacacgtgtgcacatgcgcactctcatatgccaccccatgtgcctttagtccacggacccccagagcacccccaagcctgggcttgagctgca

SEQ ID NO: 14056 - DNA, 600 bp, Homo sapiens
  source 1..600: mol_type = unassigned DNA
gtggaactcccatgccagatatactgccaaggccaccctgaggggctgccaaccggggccccatgagtgctagagctgctggtcttgtgacgtgggcacctgtctgccaggcctgggcacgggcccagggtcacgctcatgctggggctcccgtcagctgactattttgggctcttgctgacctgggccaaagtcaggtccagtcaagagggcccaaagtggctccccccatccccagaggccggctctggtttctgctatataaacagaggaggacacgccggcttggaggcagcaccacatccagagctcgctcagctgctgcccagcctcggctgtgaggataggctggctgggcagcacgtctctccccacagggctccctgagaccaccaggaagagcccccaaccaatcttgggattctcccttcgtgcggttgtctgggacctttttccagggtcaaagcagatcgtgaggaggaagctgagatgccctgtatccaagcccaatatgggacaccagcaccgagtccgggaccccgtgaccacctggcaagcgaccccctgacccctgagttcatcaagcccaccatggacctg

SEQ ID NO: 14057 - DNA, 1820 bp, Homo sapiens
  source 1..1820: mol_type = unassigned DNA
tccagagctcgctcagctgctgcccagcctcggctgtgaggataggctggctgggcagcacgtctctccccacagggctccctgagaccaccaggaagagcccccaaccaatcttgggattctcccttcgtgcggttgtctgggacctttttccagggtcaaagcagatcgtgaggaggaagctgagatgccctgtatccaagcccaatatgggacaccagcaccgagtccgggaccccgtgaccacctggcaagcgaccccctgacccctgagttcatcaagcccaccatggacctggccagccccgaggcagcccccgctgcccccactgccctgcccagcttcagcaccttcatggacggctacacaggagagtttgacaccttcctctaccagctgccaggaacagtccagccatgctcctcagcctcctcctcggcctcctccacatcctcgtcctcagccacctcccctgcctctgcctccttcaagttcgaggacttccaggtgtacggctgctaccccggccccctgagcggcccagtggatgaggccctgtcctccagtggctctgactactatggcagcccctgctcggccccgtcgccctccacgcccagcttccagccgccccagctctctccctgggatggctccttcggccacttctcgcccagccagacttacgaaggcctgcgggcatggacagagcagctgcccaaagcctctgggcccccacagcctccagccttcttttccttcagtcctcccaccggccccagccccagcctggcccagagccccctgaagttgttcccctcacaggccacccaccagctgggggagggagagagctattccatgcctacggccttcccaggtttggcacccacttctccacaccttgagggctcggggatactggatacacccgtgacctcaaccaaggcccggagcggggccccaggtggaagtgaaggccgctgtgctgtgtgtggggacaacgcttcatgccagcattatggtgtccgcacatgtgagggctgcaagggcttcttcaaggtaccgcgcagccccaggtggggccttttgttggaaatggagagaggctggcctcatcccattgggacctgtggtctccccctgggttctcctcctagctaagtcctgtcctgcagggtgggatcagccctgccaggtgggccgccttcctggagacccgtagatgccagggctggaagctttcatttgccgggacactcgggcccatgggattgcacagagctggagggaggggtgagataggggcagataggagctgcaggggtgcctggcgagcctctggttttcctctgctcctctgcctgtcctctcccaactcaaggttctagtgggaaggggtgcccccaggctctcatgttcctggcgtgagatgaaaggatccctgcggagggtttggttcttgagggctgggggtggacttgggaacaggctgtgtgtttgtcccagcgatggtgcctgcttagcttcccgtccccaccccccagccccttggccctctcctgtctgccctagggagaaggcaggtggacaagggcccatgaaaaaatacaggtgtctagactgccagggagaccctggcccccagtagtgtgtcctggggacttcctcagagcgagaaacctcccccaatgtcttcaagacttttctctccccccgcccaaccccgtctctccctcccttgccacccaaatgttagaaaaatagctgtgaacagagagcgcttttgtctgcaatggcagcaggatctggacggtcc

SEQ ID NO: 14058 - DNA, 570 bp, Homo sapiens
  source 1..570: mol_type = unassigned DNA
cttgggattctcccttcgtgcggttgtctgggacctttttccagggtcaaagcagatcgtgaggaggaagctggtagggtgcagcctgaggcttgttcagcagaacaggtgcaagccacattgttgccaagacctgcctgaagccggattctccccactgcctccttcaaccccgcctcttcctcctcctgtgggactgctcccccctcctgtgaggctagatagatgccctgtatccaagcccaatatgggacaccagcaccgagtccgggaccccgtgaccacctggcaagcgaccccctgacccctgagttcatcaagcccaccatggacctggccagccccgaggcagcccccgctgcccccactgccctgcccagcttcagcaccttcatggacggctacacaggagagtttgacaccttcctctaccagctgccaggaacagtccagccatgctcctcagcctcctcctcggcctcctccacatcctcgtcctcagccacctcccctgcctctgcctccttcaagttcgaggacttccaggtgtacggctgctaccccggcccc

SEQ ID NO: 14059 - DNA, 574 bp, Homo sapiens
  source 1..574: mol_type = unassigned DNA
agtcccagtggcggaggctacgaaacttgggggagtgcacagaagaacttcgggagcgcacgcgggaccagggaccaggctgagactcggggcgccagtccgggcaggggcagcgggagccggccggagatgccctgtatccaagcccaatatgggacaccagcaccgagtccgggaccccgtgaccacctggcaagcgaccccctgacccctgagttcatcaagcccaccatggacctggccagccccgaggcagcccccgctgcccccactgccctgcccagcttcagcaccttcatggacggctacacaggagagtttgacaccttcctctaccagctgccaggaacagtccagccatgctcctcagcctcctcctcggcctcctccacatcctcgtcctcagccacctcccctgcctctgcctccttcaagttcgaggacttccaggtcgcacagtgcagaaaaacgccaagtacatctgcctggctaacaaggactgccctgtggacaagaggcggcgaaaccgctgccagttctgccgcttccagaagtgcctggcggtgggcatggt

SEQ ID NO: 14060 - DNA, 2639 bp, Homo sapiens
  source 1..2639: mol_type = unassigned DNA
agtcccagtggcggaggctacgaaacttgggggagtgcacagaagaacttcgggagcgcacgcgggaccagggaccaggctgagactcggggcgccagtccgggcaggggcagcgggagccggccgggtagggtgcagcctgaggcttgttcagcagaacaggtgcaagccacattgttgccaagacctgcctgaagccggattctccccactgcctccttcaaccccgcctcttcctcctcctgtgggactgctcccccctcctgtgaggctagatagatgccctgtatccaagcccaatatgggacaccagcaccgagtccgggaccccgtgaccacctggcaagcgaccccctgacccctgagttcatcaagcccaccatggacctggccagccccgaggcagcccccgctgcccccactgccctgcccagcttcagcaccttcatggacggctacacaggagagtttgacaccttcctctaccagctgccaggaacagtccagccatgctcctcagcctcctcctcggcctcctccacatcctcgtcctcagccacctcccctgcctctgcctccttcaagttcgaggacttccaggtgtacggctgctaccccggccccctgagcggcccagtggatgaggccctgtcctccagtggctctgactactatggcagcccctgctcggccccgtcgccctccacgcccagcttccagccgccccagctctctccctgggatggctccttcggccacttctcgcccagccagacttacgaaggcctgcgggcatggacagagcagctgcccaaagcctctgggcccccacagcctccagccttcttttccttcagtcctcccaccggccccagccccagcctggcccagagccccctgaagttgttcccctcacaggccacccaccagctgggggagggagagagctattccatgcctacggccttcccaggtttggcacccacttctccacaccttgagggctcggggatactggatacacccgtgacctcaaccaaggcccggagcggggccccaggtggaagtgaaggccgctgtgctgtgtgtggggacaacgcttcatgccagcattatggtgtccgcacatgtgagggctgcaagggcttcttcaagcgcacagtgcagaaaaacgccaagtacatctgcctggctaacaaggactgccctgtggacaagaggcggcgaaaccgctgccagttctgccgcttccagaagtgcctggcggtgggcatggtgaaggaagttgtccgaacagacagcctgaaggggcggcggggccggctaccttcaaaacccaagcagcccccagatgcctcccctgccaatctcctcacttccctggtccgtgcacacctggactcagggcccagcactgccaaactggactactccaagttccaggagctggtgctgccccactttgggaaggaagatgctggggatgtacagcagttctacgacctgctctccggttctctggaggtcatccgcaagtgggcggagaagatccctggctttgctgagctgtcaccggctgaccaggacctgttgctggagtcggccttcctggagctcttcatcctccgcctggcgtacaggtctaagccaggcgagggcaagctcatcttctgctcaggcctggtgctacaccggctgcagtgtgcccgtggcttcggggactggattgacagtatcctggccttctcaaggtccctgcacagcttgcttgtcgatgtccctgccttcgcctgcctctctgcccttgtcctcatcaccgaccggcatgggctgcaggagccgcggcgggtggaggagctgcagaaccgcatcgccagctgcctgaaggagcacgtggcagctgtggcgggcgagccccagccagccagctgcctgtcacgtctgttgggcaaactgcccgagctgcggaccctgtgcacccagggcctgcagcgcatcttctacctcaagctggaggacttggtgccccctccacccatcattgacaagatcttcatggacacgctgcccttctgacccctgcctgggaacacgtgtgcacatgcgcactctcatatgccaccccatgtgcctttagtccacggacccccagagcacccccaagcctgggcttgagctgcagaatgactccaccttctcacctgctccaggaggtttgcagggagctcaagcccttggggagggggatgccttcatgggggtgaccccacgatttgtcttatcccccccagcctggccccggcctttatgttttttgtaagataaaccgtttttaacacatagcgccgtgctgtaaataagcccagtgctgctgtaaatacaggaagaaagagcttgaggtgggagcggggctgggaggaagggatgggccccgccttcctgggcagcctttccagcctcctgctggctctctcttcctaccctccttccacatgtacataaactgtcactctaggaagaagacaaatgacagattctgacatttatatttgtgtattttcctggatttatagtatgtgacttttctgattaatatatttaatatattgaataaaaaatagacatgtagttggaactga

SEQ ID NO: 14061 - DNA, 1101 bp, Homo sapiens
  source 1..1101: mol_type = unassigned DNA
agtggcggaggctacgaaacttgggggagtgcacagaagaacttcgggagcgcacgcgggaccagggaccaggctgagactcggggcgccagtccgggcaggggcagcgggagccggccggagatgccctgtatccaagcccaatatgggacaccagcaccgagtccgggaccccgtgaccacctggcaagcgaccccctgacccctgagttcatcaagcccaccatggacctggccagccccgaggcagcccccgctgcccccactgccctgcccagcttcagcaccttcatggacggctacacaggagagtttgacaccttcctctaccagctgccaggaacagtccagccatgctcctcagcctcctcctcggcctcctccacatcctcgtcctcagccacctcccctgcctctgcctccttcaagttcgaggacttccaggtgtacggctgctaccccggccccctgagcggcccagtggatgaggccctgtcctccagtggctctgactactatggcagcccctgctcggccccgtcgccctccacgcccagcttccagccgccccagctctctccctgggatggctccttcggccacttctcgcccagccagacttacgaaggcctgcgggcatggacagagcagctgcccaaagcctctgggcccccacagcctccagccttcttttccttcagtcctcccaccggccccagccccagcctggcccagagccccctgaagttgttcccctcacaggccacccaccagctgggggagggagagagctattccatgcctacggccttcccaggtttggcacccacttctccacaccttgagggctcggggatactggatacacccgtgacctcaaccaaggcccggagcggggccccaggtggaagtgaaggccgctgtgctgtgtgtggggacaacgcttcatgccagcattatggtgtccgcacatgtgagggctgcaagggcttcttcaaggtaccgcgcagccccaggtggggccttttgttggaaatggagagaggctggcctcatcccattgggacctgtggtctccccctgggttctcctcctagctaa

SEQ ID NO: 14062 - DNA, 838 bp, Homo sapiens
  source 1..838: mol_type = unassigned DNA
ctacgaaacttgggggagtgcacagaagaacttcgggagcgcacgcgggaccagggaccaggctgagactcggggcgccagtccgggcaggggcagcgggagccggccggtagtctctgttggatcttacaggtagggtgcagcctgaggcttgttcagcagaacaggtgcaagccacattgttgccaagacctgcctgaagccggattctccccactgcctccttcaaccccgcctcttcctcctcctgtgggactgctcccccctcctgtgaggctagatagatgccctgtatccaagcccaatatgggacaccagcaccgagtccgggaccccgtgaccacctggcaagcgaccccctgacccctgagttcatcaagcccaccatggacctggccagccccgaggcagcccccgctgcccccactgccctgcccagcttcagcaccttcatggacggctacacaggagagtttgacaccttcctctaccagctgccaggaacagtccagccatgctcctcagcctcctcctcggcctcctccacatcctcgtcctcagccacctcccctgcctctgcctccttcaagttcgaggacttccaggtgtacggctgctaccccggccccctgagcggcccagtggatgaggccctgtcctccagtggctctgactactatggcagcccctgctcggccccgtcgccctccacgcccagcttccagccgccccagctctctccctgggatggctccttcggccacttctcgcccagccagacttacgaaggcctgcgggcatggacagagcagctgcccaaagcctctgggcccccaca

SEQ ID NO: 14063 - DNA, 535 bp, Homo sapiens
  source 1..535: mol_type = unassigned DNA
gaaacttgggggagtgcacagaagaacttcgggagcgcacgcgggaccagggaccaggctgagactcggggcgccagtccgggcaggggcagcgggagccggccggttgtccgaacagacagcctgaaggggcggcggggccggctaccttcaaaacccaagcagcccccagatgcctcccctgccaatctcctcacttccctggtccgtgcacacctggactcagggcccagcactgccaaactggactactccaagttccaggagctggtgctgccccactttgggaaggaagatgctggggatgtacagcagttctacgacctgctctccggttctctggaggtcatccgcaagtgggcggagaagatccctggctttgctgagctgtcaccggctgaccaggacctgttgctggagtcggccttcctggagctcttcatcctccgcctggcgtacaggtctaagccaggcgagggcaagctcatcttctgctcaggcctggtgctacaccggctgcagtgtgcccgtggct

SEQ ID NO: 14064 - DNA, 4837 bp, Homo sapiens
  source 1..4837: mol_type = unassigned DNA
agagttctcttattaagataactgggggcagcagaacattctttttaggtactgttgtccattctcctgagagtccagggggctgtggtctccttcctccccccttgccctgtccccagcaaatggcctttaaaggtctggagccaggttaccgatgaggaggcctaggttcccttcctctttgcttctgggagcatctcgagcagtgcagagtggcttcccagccccagatggcaggattggggtgggtttgggatctgctgcctttgctcagtgtgcagggttggggtggaaatgggggacaggctagggcctctgcattaggctgccttcttaggcaggtgggctttcacttccagctcctcttccattttcacgatgtccttcttcctaggcactgcgaggggaggagaaaaggggctttgcagaggcctgggagtattcccaggaagtgcctggttggcgaaacaaccagggagctgctcctgggagctgggctgaggctttgctgggctgcctctcccactcacccttctcccggcccccaccatgccttccccatgggggaggggcagggggctggaggaacacagcttccccctgttctagcagagaaatgctggctgtatgcctcccctagggttcccaggctgactagggtgtggctggccttctgatggagcccactcatgctgggccgctgcccaggggctttgtggcacctaggtcgagatggtactcaggccaggggtcaggattcctgggtgctctggtcccggtgcctctgtctcatctttaggctgggattcctgccaccttgctgctctggggcccaaatactttgagacaaggctataggcttgtcccactgactctcctttccctccctggggtctcctctctctccagagatgccctgtatccaagcccaatatgggacaccagcaccgagtccgggaccccgtgaccacctggcaagcgaccccctgacccctgagttcatcaagcccaccatggacctggccagccccgaggcagcccccgctgcccccactgccctgcccagcttcagcaccttcatggacggctacacaggagagtttgacaccttcctctaccagctgccaggaacagtccagccatgctcctcagcctcctcctcggcctcctccacatcctcgtcctcagccacctcccctgcctctgcctccttcaagttcgaggacttccaggtgtacggctgctaccccggccccctgagcggcccagtggatgaggccctgtcctccagtggctctgactactatggcagcccctgctcggccccgtcgccctccacgcccagcttccagccgccccagctctctccctgggatggctccttcggccacttctcgcccagccagacttacgaaggcctgcgggcatggacagagcagctgcccaaagcctctgggcccccacagcctccagccttcttttccttcagtcctcccaccggccccagccccagcctggcccagagccccctgaagttgttcccctcacaggccacccaccagctgggggagggagagagctattccatgcctacggccttcccaggtttggcacccacttctccacaccttgagggctcggggatactggatacacccgtgacctcaaccaaggcccggagcggggccccaggtggaagtgaaggccgctgtgctgtgtgtggggacaacgcttcatgccagcattatggtgtccgcacatgtgagggctgcaagggcttcttcaaggtaccgcgcagccccaggtggggccttttgttggaaatggagagaggctggcctcatcccattgggacctgtggtctccccctgggttctcctcctagctaagtcctgtcctgcagggtgggatcagccctgccaggtgggccgccttcctggagacccgtagatgccagggctggaagctttcatttgccgggacactcgggcccatgggattgcacagagctggagggaggggtgagataggggcagataggagctgcaggggtgcctggcgagcctctggttttcctctgctcctctgcctgtcctctcccaactcaaggttctagtgggaaggggtgcccccaggctctcatgttcctggcgtgagatgaaaggatccctgcggagggtttggttcttgagggctgggggtggacttgggaacaggctgtgtgtttgtcccagcgatggtgcctgcttagcttcccgtccccaccccccagccccttggccctctcctgtctgccctagggagaaggcaggtggacaagggcccatgaaaaaatacaggtgtctagactgccagggagaccctggcccccagtagtgtgtcctggggacttcctcagagcgagaaacctcccccaatgtcttcaagacttttctctccccccgcccaaccccgtctctccctcccttgccacccaaatgttagaaaaatagctgtgaacagagagcgcttttgtctgcaatggcagcaggatctggacggtcccctcccctaagttcccccctccccaccccacactctgacagcttgttccgtgttgcccccccacccagcgcacagtgcagaaaaacgccaagtacatctgcctggctaacaaggactgccctgtggacaagaggcggcgaaaccgctgccagttctgccgcttccagaagtgcctggcggtgggcatggtgaaggaaggtgtgtggctggggtgcggcccagcggggcaagggtaggcttgagtggagtgggaccagcagggcccccaggcttctgccctggaggacccagaggagggcacgtcttatttccaccccacctctgaaccccaggccttggagggaggcagcctacacctgcctggattgtgagggtggtggcagggggaggttcctatagggtaccttggatctcagggactctgggtcctagggactcggtggggcgcgtctcagcagtggtgtgcacggcttgggctgagaggcccttcctcagatcccttccttcctcacccctacccattcctttgcagttgtccgaacagacagcctgaaggggcggcggggccggctaccttcaaaacccaagcagcccccagatgcctcccctgccaatctcctcacttccctggtccgtgcacacctggactcagggcccagcactgccaaactggactactccaaggtgaggtcccaccccgtgtctgccttggggaggtctatgagcacatgcagtgcctttgtgcgtgttaggagagctaccccctctggaaggactgaatgagaaaggaggtttaaaaaagaaagaaagaaaagcgactccctccagttcgacagatcaaagagaggatccccctctcggctgaccagatgggaaaatgcaccccctcaggcaggtggccaattagaaaaatatgtccttttggcagctgcagccctgggttaatatgtgagacttggcaagtgagagcctgggcaggatctcagatccactcccactcccgggatctggcatccaagtgtctgacacagccatacgtggcagtgggtgtaggagcctgcctggggtgctgaccccactggaccgtcttcctagttccaggagctggtgctgccccactttgggaaggaagatgctggggatgtacagcagttctacgacctgctctccggttctctggaggtcatccgcaagtgggcggagaagatccctggctttgctgagctgtcaccggctgaccaggacctgttgctggagtcggccttcctggagctcttcatcctccgcctggcgtacaggtctaagccaggcgagggcaagctcatcttctgctcaggcctggtgctacaccggctgcagtgtgcccgtggcttcggggactggattgacagtatcctggccttctcaaggtccctgcacagcttgcttgtcgatgtccctgccttcgcctgcctctctgcccttgtcctcatcaccgaccggcatgggctgcaggagccgcggcgggtggaggagctgcagaaccgcatcgccagctgcctgaaggagcacgtggcagctgtggcgggcgagccccagccagccagctgcctgtcacgtctgttgggcaaactgcccgagctgcggaccctgtgcacccagggcctgcagcgcatcttctacctcaagctggaggacttggtgccccctccacccatcattgacaagatcttcatggacacgctgcccttctgacccctgcctgggaacacgtgtgcacatgcgcactctcatatgccaccccatgtgcctttagtccacggacccccagagcacccccaagcctgggcttgagctgcagaatgactccaccttctcacctgctccaggaggtttgcagggagctcaagcccttggggagggggatgccttcatgggggtgaccccacgatttgtcttatcccccccagcctggccccggcctttatgttttttgtaagataaaccgtttttaacacatagcgccgtgctgtaaataagcccagtgctgctgtaaatacaggaagaaagagcttgaggtgggagcggggctgggaggaagggatgggccccgccttcctgggcagcctttccagcctcctgctggctctctcttcctaccctccttccacatgtacataaactgtcactctaggaagaagacaaatgacagattctgacatttatatttgtgtattttcctggatttatagtatgtgacttttctgattaatatatttaatatattgaataaaaaatagacatgtagttggaa

SEQ ID NO: 14065 - DNA, 752 bp, Homo sapiens
  source 1..752: mol_type = unassigned DNA
gaaggcaggtggacaagggcccatgaaaaaatacaggtgtctagactgccagggagaccctggcccccagtagtgtgtcctggggacttcctcagagcgagaaacctcccccaatgtcttcaagacttttctctccccccgcccaaccccgtctctccctcccttgccacccaaatgttagaaaaatagctgtgaacagagagcgcttttgtctgcaatggcagcaggatctggacggtcccctcccctaagttcccccctccccaccccacactctgacagcttgttccgtgttgcccccccacccagcgcacagtgcagaaaaacgccaagtacatctgcctggctaacaaggactgccctgtggacaagaggcggcgaaaccgctgccagttctgccgcttccagaagtgcctggcggtgggcatggtgaaggaaggtttgtccgaacagacagcctgaaggggcggcggggccggctaccttcaaaacccaagcagcccccagatgcctcccctgccaatctcctcacttccctggtccgtgcacacctggactcagggcccagcactgccaaactggactactccaaggtgaggtcccaccccgtgtctgccttggggaggtctatgagcacatgcagtgcctttgtgcgtgttaggagagctaccccctctggaaggactgaatgagaaaggaggtttaaaaaagaaagaaagaaaagcgactccctccagttcgacagatcaaag

SEQ ID NO: 14066 - DNA, 500 bp, Homo sapiens
  source 1..500: mol_type = unassigned DNA
ccacccagcgcacagtgcagaaaaacgccaagtacatctgcctggctaacaaggactgccctgtggacaagaggcggcgaaaccgctgccagttctgccgcttccagaagtgcctggcggtgggcatggtgaaggaagttgtccgaacagacagcctgaaggggcggcggggccggctaccttcaaaacccaagcagcccccagatgcctcccctgccaatctcctcacttccctggtccgtgcacacctggactcagggcccagcactgccaaactggactactccaaggtgaggtcccaccccgtgtctgccttggggaggtctatgagcacatgcagtgcctttgtgcgtgttaggagagctaccccctctggaaggactgaatgagaaaggaggtttaaaaaagaaagaaagaaaagcgactccctccagttcgacagatcaaagagaggatccccctctcggctgaccagatgggaaaatgcaccccctcaggca

SEQ ID NO: 14067 - DNA, 612 bp, Homo sapiens
  source 1..612: mol_type = unassigned DNA
gcatggtgaaggaaggtgtgtggctggggtgcggcccagcggggcaagggtaggcttgagtggagtgggaccagcagggcccccaggcttctgccctggaggacccagaggagggcacgtgaggtcccaccccgtgtctgccttggggaggtctatgagcacatgcagtgcctttgtgcgtgttaggagagctaccccctctggaaggactgaatgagaaaggaggtttaaaaaagaaagaaagaaaagcgactccctccagttcgacagatcaaagagaggatccccctctcggctgaccagatgggaaaatgcaccccctcaggcaggtggccaattagaaaaatatgtccttttggcagctgcagccctgggttaatatgtgagacttggcaagtgagagcctgggcaggatctcagatccactcccactcccgggatctggcatccaagtgtctgacacagccatacgtggcagtgggtgtaggagcctgcctggggtgctgaccccactggaccgtcttcctagttccaggagctggtgctgccccactttgggaaggaagatgctggggatgtacagcagttctacgacctgctctccggttctct

SEQ ID NO: 14068 - DNA, 607 bp, Homo sapiens
  source 1..607: mol_type = unassigned DNA
ctggactcagggcccagcactgccaaactggactactccaagctgcagccctgggttaatatgtgagacttggcaagtgagagcctgggcaggatctcagatccactcccactcccgggatctggcatccaagtgtctgacacagccatacgtggcagtgggtgtaggagcctgcctggggtgctgaccccactggaccgtcttcctagttccaggagctggtgctgccccactttgggaaggaagatgctggggatgtacagcagttctacgacctgctctccggttctctggaggtcatccgcaagtgggcggagaagatccctggctttgctgagctgtcaccggctgaccaggacctgttgctggagtcggccttcctggagctcttcatcctccgcctggcgtacaggtctaagccaggcgagggcaagctcatcttctgctcaggcctggtgctacaccggctgcagtgtgcccgtggcttcggggactggattgacagtatcctggccttctcaaggtccctgcacagcttgcttgtcgatgtccctgccttcgcctgcctctctgcccttgtcctcatcaccgaccggcatgggctgca

SEQ ID NO: 14069 - DNA, 691 bp, Homo sapiens
  source 1..691: mol_type = unassigned DNA
catgcagtgcctttgtgcgtgttaggagagctaccccctctggaaggactgaatgagaaaggaggtttaaaaaagaaagaaagaaaagcgactccctccagttcgacagatcaaagagaggatccccctctcggctgaccagatgggaaaatgcaccccctcaggcaggtggccaattagaaaaatatgtccttttggcagctgcagccctgggttaatatgtgagacttggcaagtgagagcctgggcaggatctcagatccactcccactcccgggatctggcatccaagtgtctgacacagccatacgtggcagtgggtgtaggagcctgcctggggtgctgaccccactggaccgtcttcctagttccaggagctggtgctgccccactttgggaaggaagatgctggggatgtacagcagttctacgacctgctctccggttctctggaggtcatccgcaagtgggcggagaagatccctggctttgctgagctgtcaccggctgaccaggacctgttgctggagtcggccttcctggagctcttcatcctccgcctggcgtacaggtctaagccaggcgagggcaagctcatcttctgctcaggcctggtgctacaccggctgcagtgtgcccgtggcttcggggactggattgacagtatcctggccttctcaaggtccctgca

SEQ ID NO: 14070 - DNA, 2528 bp, Homo sapiens
  source 1..2528: mol_type = unassigned DNA
gtcacggagcgcttaagaggagggtcgggctcggccggggagtcccagtggcggaggctacgaaacttgggggagtgcacagaagaacttcgggagcgcacgcgggaccagggaccaggctgagactcggggcgccagtccgggcaggggcagcgggagccggccggagatgccctgtatccaagcccaatatgggacaccagcaccgagtccgggaccccgtgaccacctggcaagcgaccccctgacccctgagttcatcaagcccaccatggacctggccagccccgaggcagcccccgctgcccccactgccctgcccagcttcagcaccttcatggacggctacacaggagagtttgacaccttcctctaccagctgccaggaacagtccagccatgctcctcagcctcctcctcggcctcctccacatcctcgtcctcagccacctcccctgcctctgcctccttcaagttcgaggacttccaggtgtacggctgctaccccggccccctgagcggcccagtggatgaggccctgtcctccagtggctctgactactatggcagcccctgctcggccccgtcgccctccacgcccagcttccagccgccccagctctctccctgggatggctccttcggccacttctcgcccagccagacttacgaaggcctgcgggcatggacagagcagctgcccaaagcctctgggcccccacagcctccagccttcttttccttcagtcctcccaccggccccagccccagcctggcccagagccccctgaagttgttcccctcacaggccacccaccagctgggggagggagagagctattccatgcctacggccttcccaggtttggcacccacttctccacaccttgagggctcggggatactggatacacccgtgacctcaaccaaggcccggagcggggccccaggtggaagtgaaggccgctgtgctgtgtgtggggacaacgcttcatgccagcattatggtgtccgcacatgtgagggctgcaagggcttcttcaagcgcacagtgcagaaaaacgccaagtacatctgcctggctaacaaggactgccctgtggacaagaggcggcgaaaccgctgccagttctgccgcttccagaagtgcctggcggtgggcatggtgaaggaagttgtccgaacagacagcctgaaggggcggcggggccggctaccttcaaaacccaagcagcccccagatgcctcccctgccaatctcctcacttccctggtccgtgcacacctggactcagggcccagcactgccaaactggactactccaagttccaggagctggtgctgccccactttgggaaggaagatgctggggatgtacagcagttctacgacctgctctccggttctctggaggtcatccgcaagtgggcggagaagatccctggctttgctgagctgtcaccggctgaccaggacctgttgctggagtcggccttcctggagctcttcatcctccgcctggcgtacaggtctaagccaggcgagggcaagctcatcttctgctcaggcctggtgctacaccggctgcagtgtgcccgtggcttcggggactggattgacagtatcctggccttctcaaggtccctgcacagcttgcttgtcgatgtccctgccttcgcctgcctctctgcccttgtcctcatcaccgaccggcatgggctgcaggagccgcggcgggtggaggagctgcagaaccgcatcgccagctgcctgaaggagcacgtggcagctgtggcgggcgagccccagccagccagctgcctgtcacgtctgttgggcaaactgcccgagctgcggaccctgtgcacccagggcctgcagcgcatcttctacctcaagctggaggacttggtgccccctccacccatcattgacaagatcttcatggacacgctgcccttctgacccctgcctgggaacacgtgtgcacatgcgcactctcatatgccaccccatgtgcctttagtccacggacccccagagcacccccaagcctgggcttgagctgcagaatgactccaccttctcacctgctccaggaggtttgcagggagctcaagcccttggggagggggatgccttcatgggggtgaccccacgatttgtcttatcccccccagcctggccccggcctttatgttttttgtaagataaaccgtttttaacacatagcgccgtgctgtaaataagcccagtgctgctgtaaatacaggaagaaagagcttgaggtgggagcggggctgggaggaagggatgggccccgccttcctgggcagcctttccagcctcctgctggctctctcttcctaccctccttccacatgtacataaactgtcactctaggaagaagacaaatgacagattctgacatttatatttgtgtattttcctggatttatagtatgtgacttttctgattaatatatttaatatattgaataaaaaatagacatgtagttggaactg

SEQ ID NO: 14071 - DNA, 2589 bp, Homo sapiens
  source 1..2589: mol_type = unassigned DNA
ttcctggtgtaagctttggtatggatggtggccgtctccctacagactgggagctgttagagggcagggatcctagctgacacatctatgtcctcgccttggttggaggcctccaccatggacagaggccaggccctgcccctcccaggcagcctggctccttctgctgggccctgaaggcagacgggataatgtggttggccaaggcctgttggtccatccagagtgagatgccctgtatccaagcccaatatgggacaccagcaccgagtccgggaccccgtgaccacctggcaagcgaccccctgacccctgagttcatcaagcccaccatggacctggccagccccgaggcagcccccgctgcccccactgccctgcccagcttcagcaccttcatggacggctacacaggagagtttgacaccttcctctaccagctgccaggaacagtccagccatgctcctcagcctcctcctcggcctcctccacatcctcgtcctcagccacctcccctgcctctgcctccttcaagttcgaggacttccaggtgtacggctgctaccccggccccctgagcggcccagtggatgaggccctgtcctccagtggctctgactactatggcagcccctgctcggccccgtcgccctccacgcccagcttccagccgccccagctctctccctgggatggctccttcggccacttctcgcccagccagacttacgaaggcctgcgggcatggacagagcagctgcccaaagcctctgggcccccacagcctccagccttcttttccttcagtcctcccaccggccccagccccagcctggcccagagccccctgaagttgttcccctcacaggccacccaccagctgggggagggagagagctattccatgcctacggccttcccaggtttggcacccacttctccacaccttgagggctcggggatactggatacacccgtgacctcaaccaaggcccggagcggggccccaggtggaagtgaaggccgctgtgctgtgtgtggggacaacgcttcatgccagcattatggtgtccgcacatgtgagggctgcaagggcttcttcaagcgcacagtgcagaaaaacgccaagtacatctgcctggctaacaaggactgccctgtggacaagaggcggcgaaaccgctgccagttctgccgcttccagaagtgcctggcggtgggcatggtgaaggaagttgtccgaacagacagcctgaaggggcggcggggccggctaccttcaaaacccaagcagcccccagatgcctcccctgccaatctcctcacttccctggtccgtgcacacctggactcagggcccagcactgccaaactggactactccaagttccaggagctggtgctgccccactttgggaaggaagatgctggggatgtacagcagttctacgacctgctctccggttctctggaggtcatccgcaagtgggcggagaagatccctggctttgctgagctgtcaccggctgaccaggacctgttgctggagtcggccttcctggagctcttcatcctccgcctggcgtacaggtctaagccaggcgagggcaagctcatcttctgctcaggcctggtgctacaccggctgcagtgtgcccgtggcttcggggactggattgacagtatcctggccttctcaaggtccctgcacagcttgcttgtcgatgtccctgccttcgcctgcctctctgcccttgtcctcatcaccgaccggcatgggctgcaggagccgcggcgggtggaggagctgcagaaccgcatcgccagctgcctgaaggagcacgtggcagctgtggcgggcgagccccagccagccagctgcctgtcacgtctgttgggcaaactgcccgagctgcggaccctgtgcacccagggcctgcagcgcatcttctacctcaagctggaggacttggtgccccctccacccatcattgacaagatcttcatggacacgctgcccttctgacccctgcctgggaacacgtgtgcacatgcgcactctcatatgccaccccatgtgcctttagtccacggacccccagagcacccccaagcctgggcttgagctgcagaatgactccaccttctcacctgctccaggaggtttgcagggagctcaagcccttggggagggggatgccttcatgggggtgaccccacgatttgtcttatcccccccagcctggccccggcctttatgttttttgtaagataaaccgtttttaacacatagcgccgtgctgtaaataagcccagtgctgctgtaaatacaggaagaaagagcttgaggtgggagcggggctgggaggaagggatgggccccgccttcctgggcagcctttccagcctcctgctggctctctcttcctaccctccttccacatgtacataaactgtcactctaggaagaagacaaatgacagattctgacatttatatttgtgtattttcctggatttatagtatgtgacttttctgattaatatatttaatatattgaataaaaaatagacatgtagttggaactg

SEQ ID NO: 14072 - DNA, 2678 bp, Homo sapiens
  source 1..2678: mol_type = unassigned DNA
gtcacggagcgcttaagaggagggtcgggctcggccggggagtcccagtggcggaggctacgaaacttgggggagtgcacagaagaacttcgggagcgcacgcgggaccagggaccaggctgagactcggggcgccagtccgggcaggggcagcgggagccggccgggtagggtgcagcctgaggcttgttcagcagaacaggtgcaagccacattgttgccaagacctgcctgaagccggattctccccactgcctccttcaaccccgcctcttcctcctcctgtgggactgctcccccctcctgtgaggctagatagatgccctgtatccaagcccaatatgggacaccagcaccgagtccgggaccccgtgaccacctggcaagcgaccccctgacccctgagttcatcaagcccaccatggacctggccagccccgaggcagcccccgctgcccccactgccctgcccagcttcagcaccttcatggacggctacacaggagagtttgacaccttcctctaccagctgccaggaacagtccagccatgctcctcagcctcctcctcggcctcctccacatcctcgtcctcagccacctcccctgcctctgcctccttcaagttcgaggacttccaggtgtacggctgctaccccggccccctgagcggcccagtggatgaggccctgtcctccagtggctctgactactatggcagcccctgctcggccccgtcgccctccacgcccagcttccagccgccccagctctctccctgggatggctccttcggccacttctcgcccagccagacttacgaaggcctgcgggcatggacagagcagctgcccaaagcctctgggcccccacagcctccagccttcttttccttcagtcctcccaccggccccagccccagcctggcccagagccccctgaagttgttcccctcacaggccacccaccagctgggggagggagagagctattccatgcctacggccttcccaggtttggcacccacttctccacaccttgagggctcggggatactggatacacccgtgacctcaaccaaggcccggagcggggccccaggtggaagtgaaggccgctgtgctgtgtgtggggacaacgcttcatgccagcattatggtgtccgcacatgtgagggctgcaagggcttcttcaagcgcacagtgcagaaaaacgccaagtacatctgcctggctaacaaggactgccctgtggacaagaggcggcgaaaccgctgccagttctgccgcttccagaagtgcctggcggtgggcatggtgaaggaagttgtccgaacagacagcctgaaggggcggcggggccggctaccttcaaaacccaagcagcccccagatgcctcccctgccaatctcctcacttccctggtccgtgcacacctggactcagggcccagcactgccaaactggactactccaagttccaggagctggtgctgccccactttgggaaggaagatgctggggatgtacagcagttctacgacctgctctccggttctctggaggtcatccgcaagtgggcggagaagatccctggctttgctgagctgtcaccggctgaccaggacctgttgctggagtcggccttcctggagctcttcatcctccgcctggcgtacaggtctaagccaggcgagggcaagctcatcttctgctcaggcctggtgctacaccggctgcagtgtgcccgtggcttcggggactggattgacagtatcctggccttctcaaggtccctgcacagcttgcttgtcgatgtccctgccttcgcctgcctctctgcccttgtcctcatcaccgaccggcatgggctgcaggagccgcggcgggtggaggagctgcagaaccgcatcgccagctgcctgaaggagcacgtggcagctgtggcgggcgagccccagccagccagctgcctgtcacgtctgttgggcaaactgcccgagctgcggaccctgtgcacccagggcctgcagcgcatcttctacctcaagctggaggacttggtgccccctccacccatcattgacaagatcttcatggacacgctgcccttctgacccctgcctgggaacacgtgtgcacatgcgcactctcatatgccaccccatgtgcctttagtccacggacccccagagcacccccaagcctgggcttgagctgcagaatgactccaccttctcacctgctccaggaggtttgcagggagctcaagcccttggggagggggatgccttcatgggggtgaccccacgatttgtcttatcccccccagcctggccccggcctttatgttttttgtaagataaaccgtttttaacacatagcgccgtgctgtaaataagcccagtgctgctgtaaatacaggaagaaagagcttgaggtgggagcggggctgggaggaagggatgggccccgccttcctgggcagcctttccagcctcctgctggctctctcttcctaccctccttccacatgtacataaactgtcactctaggaagaagacaaatgacagattctgacatttatatttgtgtattttcctggatttatagtatgtgacttttctgattaatatatttaatatattgaataaaaaatagacatgtagttggaactg

SEQ ID NO: 14073 - DNA, 3472 bp, Homo sapiens
  source 1..3472: mol_type = unassigned DNA
acataaacaaaggcacattggcggccagggccagtccgcccggcggctcgcgcacggctccgcggtcccttttgcctgtccagccggccgcctgtccctgctccctccctccgtgaggtgtccgggttcccttcgcccagctctcccacccctacccgaccccggcgcccgggctcccagagggaactgcacttcggcagagttgaatgaatgaagacagacgcggagaactcctaaggaggagattggacaggctggactccccattgcttttctaaaaatcttggaaactttgtccttcattgaattacgacactgtccacctttaatttcctcgaaaacgcctgtaactcggctgaagccatgccttgtgttcaggcgcagtatgggtcctcgcctcaaggagccagccccgcttctcagagctacagttaccactcttcgggagaatacagctccgatttcttaactccagagtttgtcaagtttagcatggacctcaccaacactgaaatcactgccaccacttctctccccagcttcagtacctttatggacaactacagcacaggctacgacgtcaagccaccttgcttgtaccaaatgcccctgtccggacagcagtcctccattaaggtagaagacattcagatgcacaactaccagcaacacagccacctgcccccccagtctgaggagatgatgccgcactccgggtcggtttactacaagccctcctcgcccccgacgcccaccaccccgggcttccaggtgcagcacagccccatgtgggacgacccgggatctctccacaacttccaccagaactacgtggccactacgcacatgatcgagcagaggaaaacgccagtctcccgcctctccctcttctcctttaagcaatcgccccctggcaccccggtgtctagttgccagatgcgcttcgacgggcccctgcacgtccccatgaacccggagcccgccggcagccaccacgtggtggacgggcagaccttcgctgtgcccaaccccattcgcaagcccgcgtccatgggcttcccgggcctgcagatcggccacgcgtctcagctgctcgacacgcaggtgccctcaccgccgtcgcggggctccccctccaacgaggggctgtgcgctgtgtgtggggacaacgcggcctgccaacactacggcgtgcgcacctgtgagggctgcaaaggcttctttaagcgcacagtgcaaaaaaatgcaaaatacgtgtgtttagcaaataaaaactgcccagtggacaagcgtcgccggaatcgctgtcagtactgccgatttcagaagtgcctggctgttgggatggtcaaagaagtggttcgcacagacagtttaaaaggccggagaggtcgtttgccctcgaaaccgaagagcccacaggagccctctcccccttcgcccccggtgagtctgatcagtgccctcgtcagggcccatgtcgactccaacccggctatgaccagcctggactattccaggttccaggcgaaccctgactatcaaatgagtggagatgacacccagcatatccagcaattctatgatctcctgactggctccatggagatcatccggggctgggcagagaagatccctggcttcgcagacctgcccaaagccgaccaagacctgctttttgaatcagctttcttagaactgtttgtccttcgattagcatacaggtccaacccagtggagggtaaactcatcttttgcaatggggtggtcttgcacaggttgcaatgcgttcgtggctttggggaatggattgattccattgttgaattctcctccaacttgcagaatatgaacatcgacatttctgccttctcctgcattgctgccctggctatggtcacagagagacacgggctcaaggaacccaagagagtggaagaactgcaaaacaagattgtaaattgtctcaaagaccacgtgactttcaacaatggggggttgaaccgccccaattatttgtccaaactgttggggaagctcccagaacttcgtaccctttgcacacaggggctacagcgcattttctacctgaaattggaagacttggtgccaccgccagcaataattgacaaacttttcctggacactttacctttctaagacctcctcccaagcacttcaaaggaactggaatgataatggaaactgtcaagagggggcaagtcacatgggcagagatagccgtgtgagcagtctcagctcaagctgccccccatttctgtaaccctcctagcccccttgatccctaaagaaaacaaacaaacaaacaaaaactgttgctatttcctaacctgcaggcagaacctgaaagggcattttggctccggggcatcctggatttagaacatggactacacacaatacagtggtataaactttttattctcagtttaaaaatcagtttgttgttcagaagaaagattgctataatgtataatgggaaatgtttggccatgcttggttgttgcagttcagacaaatgtaacacacacacacatacacacacacacacacacacagagacacatcttaaggggacccacaagtattgccctttaacaagacttcaaagttttctgctgtaaagaaagctgtaatatatagtaaaactaaatgttgcgtgggtggcatgagttgaagaaggcaaaggcttgtaaatttacccaatgcagtttggctttttaaattattttgtgcctatttatgaataaatattacaaattctaaaagataagtgtgtttgcaaaaaaaaagaaaataaatacataaaaaagggacaagcatgttgattctaggttgaaaatgttataggcacttgctacttcagtaatgtctatattatataaatagtatttcagacactatgtagtctgttagattttataaagattggtagttatctgagcttaaacattttctcaattgtaaaataggtgggcacaagtattacacatcagaaaatcctgacaaaagggacacatagtgtttgtaacaccgtccaacattccttgtttgtaagtgttgtatgtaccgttgatgttgataaaaagaaagtttatatcttgattattttgttgtctaaagctaaacaaaacttgcatgcagcagcttttgactgtttccagagtgcttataatatacataactccctggaaataactgagcactttgaattttttttatgtctaaaattgtcagttaatttattattttgtttgagtaagaattttaatattgccatattctgtagtatttttctttgtatatttctagtatggcacatgatatgagtcactgcctttttttctatggtgtatgacagttagagatgctgattttttttctgataaattctttctttgagaaagacaattttaatgtttacaacaataaaccatgtaaatgaacagaa

SEQ ID NO: 14074 - DNA, 2642 bp, Homo sapiens
  source 1..2642: mol_type = unassigned DNA
ataaacaaaggcacattggcggccagggccagtccgcccggcggctcgcgcacggctccgcggtcccttttgcctgtccagccggccgcctgtccctgctccctccctccgtgaggtgtccgggttcccttcgcccagctctcccacccctacccgaccccggcgcccgggctcccagagggaactgcacttcggcagagttgaatgaatgaagacagacgcggagaactcctaaggaggagattggacaggctggactccccattgcttttctaaaaatcttggaaactttgtccttcattgaattacgacactgtccacctttaatttcctcgaaaacgcctgtaactcggctgaagcttcagtacctttatggacaactacagcacaggctacgacgtcaagccaccttgcttgtaccaaatgcccctgtccggacagcagtcctccattaaggtagaagacattcagatgcacaactaccagcaacacagccacctgcccccccagtctgaggagatgatgccgcactccgggtcggtttactacaagccctcctcgcccccgacgcccaccaccccgggcttccaggtgcagcacagccccatgtgggacgacccgggatctctccacaacttccaccagaactacgtggccactacgcacatgatcgagcagaggaaaacgccagtctcccgcctctccctcttctcctttaagcaatcgccccctggcaccccggtgtctagttgccagatgcgcttcgacgggcccctgcacgtccccatgaacccggagcccgccggcagccaccacgtggtggacgggcagaccttcgctgtgcccaaccccattcgcaagcccgcgtccatgggcttcccgggcctgcagatcggccacgcgtctcagctgctcgacacgcaggtgccctcaccgccgtcgcggggctccccctccaacgaggggctgtgcgctgtgtgtggggacaacgcggcctgccaacactacggcgtgcgcacctgtgagggctgcaaaggcttctttaagcgcacagtgcaaaaaaatgcaaaatacgtgtgtttagcaaataaaaactgcccagtggacaagcgtcgccggaatcgctgtcagtactgccgatttcagaagtgcctggctgttgggatggtcaaagaagtggttcgcacagacagtttaaaaggccggagaggtcgtttgccctcgaaaccgaagagcccacaggagccctctcccccttcgcccccggtgagtctgatcagtgccctcgtcagggcccatgtcgactccaacccggctatgaccagcctggactattccaggttccaggcgaaccctgactatcaaatgagtggagatgacacccagcatatccagcaattctatgatctcctgactggctccatggagatcatccggggctgggcagagaagatccctggcttcgcagacctgcccaaagccgaccaagacctgctttttgaatcagctttcttagaactgtttgtccttcgattagcatacaggtccaacccagtggagggtaaactcatcttttgcaatggggtggtcttgcacaggttgcaatgcgttcgtggctttggggaatggattgattccattgttgaattctcctccaacttgcagaatatgaacatcgacatttctgccttctcctgcattgctgccctggctatggtcacagagagacacgggctcaaggaacccaagagagtggaagaactgcaaaacaagattgtaaattgtctcaaagaccacgtgactttcaacaatggggggttgaaccgccccaattatttgtccaaactgttggggaagctcccagaacttcgtaccctttgcacacaggggctacagcgcattttctacctgaaattggaagacttggtgccaccgccagcaataattgacaaacttttcctggacactttacctttctaagacctcctcccaagcacttcaaaggaactggaatgataatggaaactgtcaagagggggcaagtcacatgggcagagatagccgtgtgagcagtctcagctcaagctgccccccatttctgtaaccctcctagcccccttgatccctaaagaaaacaaacaaacaaacaaaaactgttgctatttcctaacctgcaggcagaacctgaaagggcattttggctccggggcatcctggatttagaacatggactacacacaatacagtggtataaactttttattctcagtttaaaaatcagtttgttgttcagaagaaagattgctataatgtataatgggaaatgtttggccatgcttggttgttgcagttcagacaaatgtaacacacacacacatacacacacacacacacacacagagacacatcttaaggggacccacaagtattgccctttaacaagacttcaaagttttctgctgtaaagaaagctgtaatatatagtaaaactaaatgttgcgtgggtggcatgagttgaagaaggcaaaggcttgtaaatttacccaatgcagtttggctttttaaattattttgtgcctatttatgaataaatattacaaattctaaaagataagtgtgtttgcaaaaaaaaagaaaataaa

SEQ ID NO: 14075 - DNA, 2878 bp, Homo sapiens
  source 1..2878: mol_type = unassigned DNA
ctccccggctcccttcttggtcggccgcgaccccccgaaaggtaacaggcctctttcgcccccggccaggacctgggccctgtgggctttttttttttccattttatcagtaagttccccttgtcccagcctccgctttcacttcccgcgttccctccaccccaaaaaccgccccaacatgtccagagaggggcatctacccagccgcccagccaggggcgaccactttgtgagccccggggagcgggacccgtaccaggcgcgcccagcgggggatgcggtgaccgaggggccgggagcgccgggcagggaggagattggacaggctggactccccattgcttttctaaaaatcttggaaactttgtccttcattgaattacgacactgtccacctttaatttcctcgaaaacgcctgtaactcggctgaagccatgccttgtgttcaggcgcagtatgggtcctcgcctcaaggagccagccccgcttctcagagctacagttaccactcttcgggagaatacagctccgatttcttaactccagagtttgtcaagtttagcatggacctcaccaacactgaaatcactgccaccacttctctccccagcttcagtacctttatggacaactacagcacaggctacgacgtcaagccaccttgcttgtaccaaatgcccctgtccggacagcagtcctccattaaggtagaagacattcagatgcacaactaccagcaacacagccacctgcccccccagtctgaggagatgatgccgcactccgggtcggtttactacaagccctcctcgcccccgacgcccaccaccccgggcttccaggtgcagcacagccccatgtgggacgacccgggatctctccacaacttccaccagaactacgtggccactacgcacatgatcgagcagaggaaaacgccagtctcccgcctctccctcttctcctttaagcaatcgccccctggcaccccggtgtctagttgccagatgcgcttcgacgggcccctgcacgtccccatgaacccggagcccgccggcagccaccacgtggtggacgggcagaccttcgctgtgcccaaccccattcgcaagcccgcgtccatgggcttcccgggcctgcagatcggccacgcgtctcagctgctcgacacgcaggtgccctcaccgccgtcgcggggctccccctccaacgaggggctgtgcgctgtgtgtggggacaacgcggcctgccaacactacggcgtgcgcacctgtgagggctgcaaaggcttctttaagcgcacagtgcaaaaaaatgcaaaatacgtgtgtttagcaaataaaaactgcccagtggacaagcgtcgccggaatcgctgtcagtactgccgatttcagaagtgcctggctgttgggatggtcaaagaagtggttcgcacagacagtttaaaaggccggagaggtcgtttgccctcgaaaccgaagagcccacaggagccctctcccccttcgcccccggtgagtctgatcagtgccctcgtcagggcccatgtcgactccaacccggctatgaccagcctggactattccaggttccaggcgaaccctgactatcaaatgagtggagatgacacccagcatatccagcaattctatgatctcctgactggctccatggagatcatccggggctgggcagagaagatccctggcttcgcagacctgcccaaagccgaccaagacctgctttttgaatcagctttcttagaactgtttgtccttcgattagcatacaggtccaacccagtggagggtaaactcatcttttgcaatggggtggtcttgcacaggttgcaatgcgttcgtggctttggggaatggattgattccattgttgaattctcctccaacttgcagaatatgaacatcgacatttctgccttctcctgcattgctgccctggctatggtcacagagagacacgggctcaaggaacccaagagagtggaagaactgcaaaacaagattgtaaattgtctcaaagaccacgtgactttcaacaatggggggttgaaccgccccaattatttgtccaaactgttggggaagctcccagaacttcgtaccctttgcacacaggggctacagcgcattttctacctgaaattggaagacttggtgccaccgccagcaataattgacaaacttttcctggacactttacctttctaagacctcctcccaagcacttcaaaggaactggaatgataatggaaactgtcaagagggggcaagtcacatgggcagagatagccgtgtgagcagtctcagctcaagctgccccccatttctgtaaccctcctagcccccttgatccctaaagaaaacaaacaaacaaacaaaaactgttgctatttcctaacctgcaggcagaacctgaaagggcattttggctccggggcatcctggatttagaacatggactacacacaatacagtggtataaactttttattctcagtttaaaaatcagtttgttgttcagaagaaagattgctataatgtataatgggaaatgtttggccatgcttggttgttgcagttcagacaaatgtaacacacacacacatacacacacacacacacacacagagacacatcttaaggggacccacaagtattgccctttaacaagacttcaaagttttctgctgtaaagaaagctgtaatatatagtaaaactaaatgttgcgtgggtggcatgagttgaagaaggcaaaggcttgtaaatttacccaatgcagtttggctttttaaattattttgtgcctatttatgaataaatattacaaattctaaaagataagtgtgtttgcaa

SEQ ID NO: 14076 - DNA, 2265 bp, Homo sapiens
  source 1..2265: mol_type = unassigned DNA
ggagattggacaggctggactccccattgcttttctaaaaatcttggaaactttgtccttcattgaattacgacactgtccacctttaatttcctcgaaaacgcctgtaactcggctgaagcttcagtacctttatggacaactacagcacaggctacgacgtcaagccaccttgcttgtaccaaatgcccctgtccggacagcagtcctccattaaggtagaagacattcagatgcacaactaccagcaacacagccacctgcccccccagtctgaggagatgatgccgcactccgggtcggtttactacaagccctcctcgcccccgacgcccaccaccccgggcttccaggtgcagcacagccccatgtgggacgacccgggatctctccacaacttccaccagaactacgtggccactacgcacatgatcgagcagaggaaaacgccagtctcccgcctctccctcttctcctttaagcaatcgccccctggcaccccggtgtctagttgccagatgcgcttcgacgggcccctgcacgtccccatgaacccggagcccgccggcagccaccacgtggtggacgggcagaccttcgctgtgcccaaccccattcgcaagcccgcgtccatgggcttcccgggcctgcagatcggccacgcgtctcagctgctcgacacgcaggtgccctcaccgccgtcgcggggctccccctccaacgaggggctgtgcgctgtgtgtggggacaacgcggcctgccaacactacggcgtgcgcacctgtgagggctgcaaaggcttctttaagcgcacagtgcaaaaaaatgcaaaatacgtgtgtttagcaaataaaaactgcccagtggacaagcgtcgccggaatcgctgtcagtactgccgatttcagaagtgcctggctgttgggatggtcaaagaagtggttcgcacagacagtttaaaaggccggagaggtcgtttgccctcgaaaccgaagagcccacaggagccctctcccccttcgcccccggtgagtctgatcagtgccctcgtcagggcccatgtcgactccaacccggctatgaccagcctggactattccaggttccaggcgaaccctgactatcaaatgagtggagatgacacccagcatatccagcaattctatgatctcctgactggctccatggagatcatccggggctgggcagagaagatccctggcttcgcagacctgcccaaagccgaccaagacctgctttttgaatcagctttcttagaactgtttgtccttcgattagcatacagaatatgaacatcgacatttctgccttctcctgcattgctgccctggctatggtcacagagagacacgggctcaaggaacccaagagagtggaagaactgcaaaacaagattgtaaattgtctcaaagaccacgtgactttcaacaatggggggttgaaccgccccaattatttgtccaaactgttggggaagctcccagaacttcgtaccctttgcacacaggggctacagcgcattttctacctgaaattggaagacttggtgccaccgccagcaataattgacaaacttttcctggacactttacctttctaagacctcctcccaagcacttcaaaggaactggaatgataatggaaactgtcaagagggggcaagtcacatgggcagagatagccgtgtgagcagtctcagctcaagctgccccccatttctgtaaccctcctagcccccttgatccctaaagaaaacaaacaaacaaacaaaaactgttgctatttcctaacctgcaggcagaacctgaaagggcattttggctccggggcatcctggatttagaacatggactacacacaatacagtggtataaactttttattctcagtttaaaaatcagtttgttgttcagaagaaagattgctataatgtataatgggaaatgtttggccatgcttggttgttgcagttcagacaaatgtaacacacacacacatacacacacacacacacacacagagacacatcttaaggggacccacaagtattgccctttaacaagacttcaaagttttctgctgtaaagaaagctgtaatatatagtaaaactaaatgttgcgtgggtggcatgagttgaagaaggcaaaggcttgtaaatttacccaatgcagtttggctttttaaattattttgtgcctatttatgaataaatattacaaattctaaaagataagtgtgtttgc

SEQ ID NO: 14077 - DNA, 2450 bp, Homo sapiens
  source 1..2450: mol_type = unassigned DNA
aagttgcctgaaatttctggttttgacatatgctgtccttgggtttgcgaatgtatcagagcgagaatatgaatatgtaaagagtacagttatgaaactgtggagctaccagggggttaatatccaacacaggaatatctctaagggctgtggggttcgagtctcctttctgctttttctggggaggagattggacaggctggactccccattgcttttctaaaaatcttggaaactttgtccttcattgaattacgacactgtccacctttaatttcctcgaaaacgcctgtaactcggctgaagcttcagtacctttatggacaactacagcacaggctacgacgtcaagccaccttgcttgtaccaaatgcccctgtccggacagcagtcctccattaaggtagaagacattcagatgcacaactaccagcaacacagccacctgcccccccagtctgaggagatgatgccgcactccgggtcggtttactacaagccctcctcgcccccgacgcccaccaccccgggcttccaggtgcagcacagccccatgtgggacgacccgggatctctccacaacttccaccagaactacgtggccactacgcacatgatcgagcagaggaaaacgccagtctcccgcctctccctcttctcctttaagcaatcgccccctggcaccccggtgtctagttgccagatgcgcttcgacgggcccctgcacgtccccatgaacccggagcccgccggcagccaccacgtggtggacgggcagaccttcgctgtgcccaaccccattcgcaagcccgcgtccatgggcttcccgggcctgcagatcggccacgcgtctcagctgctcgacacgcaggtgccctcaccgccgtcgcggggctccccctccaacgaggggctgtgcgctgtgtgtggggacaacgcggcctgccaacactacggcgtgcgcacctgtgagggctgcaaaggcttctttaagcgcacagtgcaaaaaaatgcaaaatacgtgtgtttagcaaataaaaactgcccagtggacaagcgtcgccggaatcgctgtcagtactgccgatttcagaagtgcctggctgttgggatggtcaaagaagtggttcgcacagacagtttaaaaggccggagaggtcgtttgccctcgaaaccgaagagcccacaggagccctctcccccttcgcccccggtgagtctgatcagtgccctcgtcagggcccatgtcgactccaacccggctatgaccagcctggactattccaggttccaggcgaaccctgactatcaaatgagtggagatgacacccagcatatccagcaattctatgatctcctgactggctccatggagatcatccggggctgggcagagaagatccctggcttcgcagacctgcccaaagccgaccaagacctgctttttgaatcagctttcttagaactgtttgtccttcgattagcatacagaatatgaacatcgacatttctgccttctcctgcattgctgccctggctatggtcacagagagacacgggctcaaggaacccaagagagtggaagaactgcaaaacaagattgtaaattgtctcaaagaccacgtgactttcaacaatggggggttgaaccgccccaattatttgtccaaactgttggggaagctcccagaacttcgtaccctttgcacacaggggctacagcgcattttctacctgaaattggaagacttggtgccaccgccagcaataattgacaaacttttcctggacactttacctttctaagacctcctcccaagcacttcaaaggaactggaatgataatggaaactgtcaagagggggcaagtcacatgggcagagatagccgtgtgagcagtctcagctcaagctgccccccatttctgtaaccctcctagcccccttgatccctaaagaaaacaaacaaacaaacaaaaactgttgctatttcctaacctgcaggcagaacctgaaagggcattttggctccggggcatcctggatttagaacatggactacacacaatacagtggtataaactttttattctcagtttaaaaatcagtttgttgttcagaagaaagattgctataatgtataatgggaaatgtttggccatgcttggttgttgcagttcagacaaatgtaacacacacacacatacacacacacacacacacacagagacacatcttaaggggacccacaagtattgccctttaacaagacttcaaagttttctgctgtaaagaaagctgtaatatatagtaaaactaaatgttgcgtgggtggcatgagttgaagaaggcaaaggcttgtaaatttacccaatgcagtttggctttttaaattattttgtgcctatttatgaataaatattacaaattctaaaagataagtgtgtttgc

SEQ ID NO: 14078 - DNA, 1735 bp, Homo sapiens
  source 1..1735: mol_type = unassigned DNA
acctttaatttcctcgaaaacgcctgtaactcggctgaagccatgccttgtgttcaggcgcagtatgggtcctcgcctcaaggagccagccccgcttctcagagctacagttaccactcttcgggagaatacagctccgatttcttaactccagagtttgtcaagtttagcatggacctcaccaacactgaaatcactgccaccacttctctccccagcttcagtacctttatggacaactacagcacaggctacgacgtcaagccaccttgcttgtaccaaatgcccctgtccggacagcagtcctccattaaggtagaagacattcagatgcacaactaccagcaacacagccacctgcccccccagtctgaggagatgatgccgcactccgggtcggtttactacaagccctcctcgcccccgacgcccaccaccccgggcttccaggtgcagcacagccccatgtgggacgacccgggatctctccacaacttccaccagaactacgtggccactacgcacatgatcgagcagaggaaaacgccagtctcccgcctctccctcttctcctttaagcaatcgccccctggcaccccggtgtctagttgccagatgcgcttcgacgggcccctgcacgtccccatgaacccggagcccgccggcagccaccacgtggtggacgggcagaccttcgctgtgcccaaccccattcgcaagcccgcgtccatgggcttcccgggcctgcagatcggccacgcgtctcagctgctcgacacgcaggtgccctcaccgccgtcgcggggctccccctccaacgaggggctgtgcgctgtgtgtggggacaacgcggcctgccaacactacggcgtgcgcacctgtgagggctgcaaaggcttctttaagcgcacagtgcaaaaaaatgcaaaatacgtgtgtttagcaaataaaaactgcccagtggacaagcgtcgccggaatcgctgtcagtactgccgatttcagaagtgcctggctgttgggatggtcaaagaagtggttcgcacagacagtttaaaaggccggagaggtcgtttgccctcgaaaccgaagagcccacaggagccctctcccccttcgcccccggtgagtctgatcagtgccctcgtcagggcccatgtcgactccaacccggctatgaccagcctggactattccaggttccaggcgaaccctgactatcaaatgagtggagatgacacccagcatatccagcaattctatgatctcctgactggctccatggagatcatccggggctgggcagagaagatccctggcttcgcagacctgcccaaagccgaccaagacctgctttttgaatcagctttcttagaactgtttgtccttcgattagcatacaggtccaacccagtggaggaatatgaacatcgacatttctgccttctcctgcattgctgccctggctatggtcacagagagacacgggctcaaggaacccaagagagtggaagaactgcaaaacaagattgtaaattgtctcaaagaccacgtgactttcaacaatggggggttgaaccgccccaattatttgtccaaactgttggggaagctcccagaacttcgtaccctttgcacacaggggctacagcgcattttctacctgaaattggaagacttggtgccaccgccagcaataattgacaaacttttcctggacactttacctttctaa

SEQ ID NO: 14079 - DNA, 1571 bp, Homo sapiens
  source 1..1571: mol_type = unassigned DNA
ttacgacactgtccacctttaatttcctcgaaaacgcctgtaactcggctgaagcttcagtacctttatggacaactacagcacaggctacgacgtcaagccaccttgcttgtaccaaatgcccctgtccggacagcagtcctccattaaggtagaagacattcagatgcacaactaccagcaacacagccacctgcccccccagtctgaggagatgatgccgcactccgggtcggtttactacaagccctcctcgcccccgacgcccaccaccccgggcttccaggtgcagcacagccccatgtgggacgacccgggatctctccacaacttccaccagaactacgtggccactacgcacatgatcgagcagaggaaaacgccagtctcccgcctctccctcttctcctttaagcaatcgccccctggcaccccggtgtctagttgccagatgcgcttcgacgggcccctgcacgtccccatgaacccggagcccgccggcagccaccacgtggtggacgggcagaccttcgctgtgcccaaccccattcgcaagcccgcgtccatgggcttcccgggcctgcagatcggccacgcgtctcagctgctcgacacgcaggtgccctcaccgccgtcgcggggctccccctccaacgaggggctgtgcgctgtgtgtggggacaacgcggcctgccaacactacggcgtgcgcacctgtgagggctgcaaaggcttctttaagcgcacagtgcaaaaaaatgcaaaatacgtgtgtttagcaaataaaaactgcccagtggacaagcgtcgccggaatcgctgtcagtactgccgatttcagaagtgcctggctgttgggatggtcaaagaagtggttcgcacagacagtttaaaaggccggagaggtcgtttgccctcgaaaccgaagagcccacaggagccctctcccccttcgcccccggtgagtctgatcagtgccctcgtcagggcccatgtcgactccaacccggctatgaccagcctggactattccaggttccaggcgaaccctgactatcaaatgagtggagatgacacccagcatatccagcaattctatgatctcctgactggctccatggagatcatccggggctgggcagagaagatccctggcttcgcagacctgcccaaagccgaccaagacctgctttttgaatcagctttcttagaactgtttgtccttcgattagcatacaggtccaacccagtggaggaatatgaacatcgacatttctgccttctcctgcattgctgccctggctatggtcacagagagacacgggctcaaggaacccaagagagtggaagaactgcaaaacaagattgtaaattgtctcaaagaccacgtgactttcaacaatggggggttgaaccgccccaattatttgtccaaactgttggggaagctcccagaacttcgtaccctttgcacacaggggctacagcgcattttctacctgaaattggaagacttggtgccaccgccagcaataattgacaaacttttcctggacactttacctttctaa

SEQ ID NO: 14080 - DNA, 449 bp, Homo sapiens
  source 1..449: mol_type = unassigned DNA
cagttaccactcttcgggagaatacagctccgatttcttaactccagagtttgtcaagtttagcatggacctcaccaacactgaaatcactgccaccacttctctccccagcttcagtacctttatggacaactacagcacaggctacgacgtcaagccaccttgcttgtaccaaatgcccctgtccggacagcagtcctccattaagcgcacagtgcaaaaaaatgcaaaatacgtgtgtttagcaaataaaaactgcccagtggacaagcgtcgccggaatcgctgtcagtactgccgatttcagaagtgcctggctgttgggatggtcaaagaagtggttcgcacagacagtttaaaaggccggagaggtcgtttgccctcgaaaccgaagagcccacaggagccctctcccccttcgcccccggtgagtctgatcagtgccctcg

SEQ ID NO: 14081 - DNA, 1010 bp, Homo sapiens
  source 1..1010: mol_type = unassigned DNA
taaacaaaggcacattggcggccagggccagtccgcccggcggctcgcgcacggctccgcggtcccttttgcctgtccagccggccgcctgtccctgctccctccctccgtgaggtgtccgggttcccttcgcccagctctcccacccctacccgaccccggcgcccgggctcccagagggaactgcacttcggcagagttgaatgaatgaagacagacgcggagaactcctaaccatgccttgtgttcaggcgcagtatgggtcctcgcctcaaggagccagccccgcttctcagagctacagttaccactcttcgggagaatacagctccgatttcttaactccagagtttgtcaagtttagcatggacctcaccaacactgaaatcactgccaccacttctctccccagcttcagtacctttatggacaactacagcacaggctacgacgtcaagccaccttgcttgtaccaaatgcccctgtccggacagcagtcctccattaaggtagaagacattcagatgcacaactaccagcaacacagccacctgcccccccagtctgaggagatgatgccgcactccgggtcggtttactacaagccctcctcgcccccgacgcccaccaccccgggcttccaggtgcagcacagccccatgtgggacgacccgggatctctccacaacttccaccagaactacgtggccactacgcacatgatcgagcagaggaaaacgccagtctcccgcctctccctcttctcctttaagcaatcgccccctggcaccccggtgtctagttgccagatgcgcttcgacgggcccctgcacgtccccatgaacccggagcccgccggcagccaccacgtggtggacgggcagaccttcgctgtgcccaaccccattcgcaagcccgcgtccatgggcttcccgggcctgcagatcggccacgcgtctcagctgctcgacacgcaggtgccctcaccgccgtcgcggggctccccctcc

SEQ ID NO: 14082 - DNA, 574 bp, Homo sapiens
  source 1..574: mol_type = unassigned DNA
agccacataaacaaaggcacattggcggccagggccagtccgcccggcggctcgcgcacggctccgcggtcccttttgcctgtccagccggccgcctgtccctgctccctccctccgtgaggtgtccgggttcccttcgcccagctctcccacccctacccgaccccggcgcccgggctcccagagggaactgcacttcggcagagttgaatgaatgaagacagacgcggagaactcctaacttcagtacctttatggacaactacagcacaggctacgacgtcaagccaccttgcttgtaccaaatgcccctgtccggacagcagtcctccattaaggtagaagacattcagatgcacaactaccagcaacacagccacctgcccccccagtctgaggagatgatgccgcactccgggtcggtttactacaagccctcctcgcccccgacgcccaccaccccgggcttccaggtgcagcacagccccatgtgggacgacccgggatctctccacaacttccaccagaactacgtggccactacgcacatgatcgagcagaggaaaacgccagt

SEQ ID NO: 14083 - DNA, 2588 bp, Homo sapiens
  source 1..2588: mol_type = unassigned DNA
ataaatgacgtgccgagagagcgagcgaacgcgcagccgggagagcggagtctcctgcctcccgccccccacccctccagctcctgctcctcctccgctccccatacacagacgcgctcacacccgctccctcactcgcacacacagacacaagcgcgcacacaggctccgcacacacacttcgctctcccgcgcgctcacacccctcttgccctgagcccttgccggtgcagcgcggcgccgcagctggacgcccctcccgggctcactttgcaacgctgacggtgccggcagtggccgtggaggtgggaacagcggcggcatcctcccccctggtcacagcccaagccaggacgcccgcggaacctctcggctgtgctctcccatgagtcgggatcgcagcatcccccaccagccgctcaccgcctccgggagccgctgggcttgtacaccgcagcccttccgggacagcagctgtgactcccccccagtgcagatttcgggacagctctctagaaactcgctctaaagacggaaccgccacagcactcaaagcccactgcggaagagggcagcccggcaagcccgggccctgagcctggacccttagcggtgccgggcagcactgccggcgcttcgcctcgccggacgtccgctcctcctacactctcagcctccgctggagagacccccagccccaccattcagcgcgcaagataccctccagatatgccctgcgtccaagcccaatatagcccttcccctccaggttccagttatgcggcgcagacatacagctcggaatacaccacggagatcatgaaccccgactacaccaagctgaccatggaccttggcagcactgagatcacggctacagccaccacgtccctgcccagcatcagtaccttcgtggagggctactcgagcaactacgaactcaagccttcctgcgtgtaccaaatgcagcggcccttgatcaaagtggaggaggggcgggcgcccagctaccatcaccatcaccaccaccaccaccaccaccaccaccatcaccagcagcagcatcagcagccatccattcctccagcctccagcccggaggacgaggtgctgcccagcacctccatgtacttcaagcagtccccaccgtccacccccaccacgccggccttccccccgcaggcgggggcgttatgggacgaggcactgccctcggcgcccggctgcatcgcacccggcccgctgctggacccgccgatgaaggcggtccccacggtggccggcgcgcgcttcccgctcttccacttcaagccctcgccgccgcatccccccgcgcccagcccggccggcggccaccacctcggctacgacccgacggccgctgccgcgctcagcctgccgctgggagccgcagccgccgcgggcagccaggccgccgcgcttgagagccacccgtacgggctgccgctggccaagagggcggccccgctggccttcccgcctctcggcctcacgccctcccctaccgcgtccagcctgctgggcgagagtcccagcctgccgtcgccgcccagcaggagctcgtcgtctggcgagggcacgtgtgccgtgtgcggggacaacgccgcctgccagcactacggcgtgcgaacctgcgagggctgcaagggctttttcaagagaacagtgcagaaaaatgcaaaatatgtttgcctggcaaataaaaactgcccagtagacaagagacgtcgaaaccgatgtcagtactgtcgatttcagaagtgtctcagtgttggaatggtaaaagaagttgtccgtacagatagtctgaaagggaggagaggtcgtctgccttccaaaccaaagagcccattacaacaggaaccttctcagccctctccaccttctcctccaatctgcatgatgaatgcccttgtccgagctttaacagactcaacacccagagatcttgattattccagagtaagttttatgatttcctgctttcaaatgaatgatcagggtctctatttatggctactagtaataagagttgattgaatgattttgtgtctggcaccatgttagacagttttcatactttttctatatttctcgcttcatttagcaattcagtgcatccattgcagcaaataatttttgccttattgaatctctaaatgccttaacaagtgaccctgacagtgctgcacctgtcatacacattgttgcaggattcctggtggttgtgccaatgaaaatctgcacagacaaactacaatttgtagatttatctcgtgatctagacaaagtgactactgttttttttcatattgtgttcaaaccatctgggtgagcctcaagttattactaagcagtttatccaattgcatcagcattgattgacctgctgcttattcagagggattagaccattggtggagagaagcgagctctggctgtgacatcagttgtcaggagaactgggatggaacgccacctctgctacttcctgcctgtgtcacctggttcctgcttttggctctctcctgcctacagtggaaatggctacaatatttaacctcaga

SEQ ID NO: 14084 - DNA, 3794 bp, Homo sapiens
  source 1..3794: mol_type = unassigned DNA
ataaatgacgtgccgagagagcgagcgaacgcgcagccgggagagcggagtctcctgcctcccgccccccacccctccagctcctgctcctcctccgctccccatacacagacgcgctcacacccgctccctcactcgcacacacagacacaagcgcgcacacaggctccgcacacacacttcgctctcccgcgcgctcacacccctcttgccctgagcccttgccggtgcagcgcggcgccgcagctggacgcccctcccgggctcactttgcaacgctgacggtgccggcagtggccgtggaggtgggaacagcggcggcatcctcccccctggtcacagcccaagccaggacgcccgcggaacctctcggctgtgctctcccatgagtcgggatcgcagcatcccccaccagccgctcaccgcctccgggagccgctgggcttgtacaccgcagcccttccgggacagcagctgtgactcccccccagtgcagatttcgggacagctctctagaaactcgctctaaagacggaaccgccacagcactcaaagcccactgcggaagagggcagcccggcaagcccgggccctgagcctggacccttagcggtgccgggcagcactgccggcgcttcgcctcgccggacgtccgctcctcctacactctcagcctccgctggagagacccccagccccaccattcagcgcgcaagataccctccagatatgccctgcgtccaagcccaatatagcccttcccctccaggttccagttatgcggcgcagacatacagctcggaatacaccacggagatcatgaaccccgactacaccaagctgaccatggaccttggcagcactgagatcacggctacagccaccacgtccctgcccagcatcagtaccttcgtggagggctactcgagcaactacgaactcaagccttcctgcgtgtaccaaatgcagcggcccttgatcaaagtggaggaggggcgggcgcccagctaccatcaccatcaccaccaccaccaccaccaccaccaccatcaccagcagcagcatcagcagccatccattcctccagcctccagcccggaggacgaggtgctgcccagcacctccatgtacttcaagcagtccccaccgtccacccccaccacgccggccttccccccgcaggcgggggcgttatgggacgaggcactgccctcggcgcccggctgcatcgcacccggcccgctgctggacccgccgatgaaggcggtccccacggtggccggcgcgcgcttcccgctcttccacttcaagccctcgccgccgcatccccccgcgcccagcccggccggcggccaccacctcggctacgacccgacggccgctgccgcgctcagcctgccgctgggagccgcagccgccgcgggcagccaggccgccgcgcttgagagccacccgtacgggctgccgctggccaagagggcggccccgctggccttcccgcctctcggcctcacgccctcccctaccgcgtccagcctgctgggcgagagtcccagcctgccgtcgccgcccagcaggagctcgtcgtctggcgagggcacgtgtgccgtgtgcggggacaacgccgcctgccagcactacggcgtgcgaacctgcgagggctgcaagggctttttcaagagaacagtgcagaaaaatgcaaaatatgtttgcctggcaaataaaaactgcccagtagacaagagacgtcgaaaccgatgtcagtactgtcgatttcagaagtgtctcagtgttggaatggtaaaagaagttgtccgtacagatagtctgaaagggaggagaggtcgtctgccttccaaaccaaagagcccattacaacaggaaccttctcagccctctccaccttctcctccaatctgcatgatgaatgcccttgtccgagctttaacagactcaacacccagagatcttgattattccagatactgtcccactgaccaggctgctgcaggcacagatgctgagcatgtgcaacaattctacaacctcctgacagcctccattgatgtatccagaagctgggcagaaaagattccgggatttactgatctccccaaagaagatcagacattacttattgaatcagcctttttggagctgtttgtcctcagactttccatcaggtcaaacactgctgaagataagtttgtgttctgcaatggacttgtcctgcatcgacttcagtgccttcgtggatttggggagtggctcgactctattaaagacttttccttaaatttgcagagcctgaaccttgatatccaagccttagcctgcctgtcagcactgagcatgatcacagaaagacatgggttaaaagaaccaaagagagtcgaagagctatgcaacaagatcacaagcagtttaaaagaccaccagagtaagggacaggctctggagcccaccgagtccaaggtcctgggtgccctggtagaactgaggaagatctgcaccctgggcctccagcgcatcttctacctgaagctggaagacttggtgtctccaccttccatcattgacaagctcttcctggacaccctacctttctaatcaggagcagtggagcagtgagctgcctcctctcctagcacctgcttgctacgcagcaaagggataggtttggaaacctatcatttcctgtccttccttaagaggaaaagcagctcctgtagaaagcaaagactttcttttttttctggctcttttccttacaacctaaagccagaaaacttgcagagtattgtgttggggttgtgttttatatttaggcattgggggatggggtgggagggggttatagttcatgagggttttctaagaaattgctaacaaagcacttttggacaatgctatcccagcaggaaaaaaaaggataatataactgttttaaaactctttctggggaatccaattatagttgctttgtatttaaaaacaagaacagccaagggttgttcgccagggtaggatgtgtcttaaagattggtcccttgaaaatatgcttcctgtatcaaaggtacgtatgtggtgcaaacaaggcagaaacttccttttaatttccttcttcctttattttaacaaatggtgaaagatggaggattacctacaaatcagacatggcaaaacaataatggctgtttgcttccataaacaagtgcaattttttaaagtgctgtcttactaagtcttgtttattaactctcctttattctatatggaaataaaaaggaggcagtcatgttagcaaatgacacgttaatatccctagcagaggctgtgttcaccttccctgtcgatcccttctgaggtatggcccatccaagacttttaggccattcttgatggaaccagatccctgccctgactgtccagctatcctgaaagtggatcagattataaactggattacatgtaactgttttggttgtgttctatcaaccccaccagagttccctaaacttgcttcagttatagtaactgactggtatattcattcagaagcgccataagtcagttgagtatttgatccctagataagaacatgcaaatcagcaggaactggtcatacagggtaagcaccagggacaataaggatttttatagatataatttaatttttgttattggttaaggagacaattttggagagcaagcaaatctttttaaaaaatagtatgaatgtgaatactagaaaagatttaaaaaatagtatgagtgtgagtactaggaaggat

SEQ ID NO: 14085 - DNA, 4982 bp, Homo sapiens
  source 1..4982: mol_type = unassigned DNA
caggccctcatcaccttttttcaagtcaagatttcatcccatacatgcatgactcaatcagatttggaaatgtggatatgccctgcgtccaagcccaatatagcccttcccctccaggttccagttatgcggcgcagacatacagctcggaatacaccacggagatcatgaaccccgactacaccaagctgaccatggaccttggcagcactgagatcacggctacagccaccacgtccctgcccagcatcagtaccttcgtggagggctactcgagcaactacgaactcaagccttcctgcgtgtaccaaatgcagcggcccttgatcaaagtggaggaggggcgggcgcccagctaccatcaccatcaccaccaccaccaccaccaccaccaccatcaccagcagcagcatcagcagccatccattcctccagcctccagcccggaggacgaggtgctgcccagcacctccatgtacttcaagcagtccccaccgtccacccccaccacgccggccttccccccgcaggcgggggcgttatgggacgaggcactgccctcggcgcccggctgcatcgcacccggcccgctgctggacccgccgatgaaggcggtccccacggtggccggcgcgcgcttcccgctcttccacttcaagccctcgccgccgcatccccccgcgcccagcccggccggcggccaccacctcggctacgacccgacggccgctgccgcgctcagcctgccgctgggagccgcagccgccgcgggcagccaggccgccgcgcttgagagccacccgtacgggctgccgctggccaagagggcggccccgctggccttcccgcctctcggcctcacgccctcccctaccgcgtccagcctgctgggcgagagtcccagcctgccgtcgccgcccagcaggagctcgtcgtctggcgagggcacgtgtgccgtgtgcggggacaacgccgcctgccagcactacggcgtgcgaacctgcgagggctgcaagggctttttcaagagaacagtgcagaaaaatgcaaaatatgtttgcctggcaaataaaaactgcccagtagacaagagacgtcgaaaccgatgtcagtactgtcgatttcagaagtgtctcagtgttggaatggtaaaagaagttgtccgtacagatagtctgaaagggaggagaggtcgtctgccttccaaaccaaagagcccattacaacaggaaccttctcagccctctccaccttctcctccaatctgcatgatgaatgcccttgtccgagctttaacagactcaacacccagagatcttgattattccagatactgtcccactgaccaggctgctgcaggcacagatgctgagcatgtgcaacaattctacaacctcctgacagcctccattgatgtatccagaagctgggcagaaaagattccgggatttactgatctccccaaagaagatcagacattacttattgaatcagcctttttggagctgtttgtcctcagactttccatcaggtcaaacactgctgaagataagtttgtgttctgcaatggacttgtcctgcatcgacttcagtgccttcgtggatttggggagtggctcgactctattaaagacttttccttaaatttgcagagcctgaaccttgatatccaagccttagcctgcctgtcagcactgagcatgatcacagaaagacatgggttaaaagaaccaaagagagtcgaagagctatgcaacaagatcacaagcagtttaaaagaccaccagagtaagggacaggctctggagcccaccgagtccaaggtcctgggtgccctggtagaactgaggaagatctgcaccctgggcctccagcgcatcttctacctgaagctggaagacttggtgtctccaccttccatcattgacaagctcttcctggacaccctacctttctaatcaggagcagtggagcagtgagctgcctcctctcctagcacctgcttgctacgcagcaaagggataggtttggaaacctatcatttcctgtccttccttaagaggaaaagcagctcctgtagaaagcaaagactttcttttttttctggctcttttccttacaacctaaagccagaaaacttgcagagtattgtgttggggttgtgttttatatttaggcattgggggatggggtgggagggggttatagttcatgagggttttctaagaaattgctaacaaagcacttttggacaatgctatcccagcaggaaaaaaaaggataatataactgttttaaaactctttctggggaatccaattatagttgctttgtatttaaaaacaagaacagccaagggttgttcgccagggtaggatgtgtcttaaagattggtcccttgaaaatatgcttcctgtatcaaaggtacgtatgtggtgcaaacaaggcagaaacttccttttaatttccttcttcctttattttaacaaatggtgaaagatggaggattacctacaaatcagacatggcaaaacaataatggctgtttgcttccataaacaagtgcaattttttaaagtgctgtcttactaagtcttgtttattaactctcctttattctatatggaaataaaaaggaggcagtcatgttagcaaatgacacgttaatatccctagcagaggctgtgttcaccttccctgtcgatcccttctgaggtatggcccatccaagacttttaggccattcttgatggaaccagatccctgccctgactgtccagctatcctgaaagtggatcagattataaactggattacatgtaactgttttggttgtgttctatcaaccccaccagagttccctaaacttgcttcagttatagtaactgactggtatattcattcagaagcgccataagtcagttgagtatttgatccctagataagaacatgcaaatcagcaggaactggtcatacagggtaagcaccagggacaataaggatttttatagatataatttaatttttgttattggttaaggagacaattttggagagcaagcaaatctttttaaaaaatagtatgaatgtgaatactagaaaagatttaaaaaatagtatgagtgtgagtactaggaaggattagtgggctgcgtttcaacattccgtgttcgtactcccttttgtatgtttctactgttaatgccatattactatgagataatttgttgcatagtgtccttatttgtataaacatttgtatgcacgttatattgtaatagctttgcctgtatttattgcaagaccaccagctcctggaagctgagttacagagtaattaaatggggtgttcacagtgacttggatacaccaattagaaattaaataagcaaatatatatatatatataaatatagcaggttacatatatatatttataatgtgtctttttattaaccatttgtacaataaatgtcacttcccatgccgttattttatggttcatttgcagtgacttttaaggcagtactgtttagcactttgatattaaaattttgcttatgttttgctaaattcgaataatgtttgaagatttttaggtctaaaagtctttatattatatactctgtatcaagtcaaaatatctttggccattttgctaagaaacaaactttgaatgtcaaactgatgtcacagtagtttttgttagctttaaatcatttttgctttagtctttttaaaggaaaataacaaaactatgctgtttatattgtcattaaattatacaatcaaacaaatgccaaatgaattgcctaattgctgcaaagtataacccagataggaaatcatatgtttttttccaagagtcattctaatatttgattatgttatgtgtgcttttatgaaagattgttatttttatatatcaagatgatagaacctggaatgttaggattttgaaatgttagacttggaaggggcctggtctgtcaactagtccaaccccttaaaattcatagaggagcaaactggggcccattgaagggtgaagagttactcaaggtcaaacagctggtaacagaatcaagactaagacctaatttacctttccatactctttttttttctcaacttcatctatataaaatcaggcttttaaacataaccactaatatttacctgaagataaccatgagtaaagtatacttttgcattaattttttgagcttatatgcaaacataataaatattattaaatatcaggaaagctaacatttcatacaagatagcttcagaccaaattcaaattgaatttgaataaattagaaatactgtgcatacataaccttcttgtgcaccatgagtatttggaaagttaatccttgtttttgtcgtgtctataaaggaagaacaaaacaaaataaaaacagagccctagagaaatgctgttactttttatttttacacccatcagatttaaggaaaagactttttagccattataatctagtggttggaaggaatgaagaagcttttttagtaataggtccagatatgagtgctaaaaataaagatgatagcatgttcttctgtcttccatagttattacaactatgagagcctcccaagtcatcttatcaactcaactcccttttttttgtcttaatgttgcacataagtttatacagagtggatgaccacactagcacagaagagaacaacatgtattaaagcaggtgattcctccccttggcgggagagctctctcagtgtgaacatgccttctgtgggcggaaatcaggaagccaccagctgttaatggagagtgccttgcttttatttcagacagcagagttttccaaagtttctctgctcctctaacagcattgctctttagtgtgtgttaacctgtggtttgaaagaaatgctcttgtacattaacaatgtaaatttaaatgattaaattacattttatcaatggc

SEQ ID NO: 14086 - DNA, 5706 bp, Homo sapiens
  source 1..5706: mol_type = unassigned DNA
ataaatgacgtgccgagagagcgagcgaacgcgcagccgggagagcggagtctcctgcctcccgccccccacccctccagctcctgctcctcctccgctccccatacacagacgcgctcacacccgctccctcactcgcacacacagacacaagcgcgcacacaggctccgcacacacacttcgctctcccgcgcgctcacacccctcttgccctgagcccttgccggtgcagcgcggcgccgcagctggacgcccctcccgggctcactttgcaacgctgacggtgccggcagtggccgtggaggtgggaacagcggcggcatcctcccccctggtcacagcccaagccaggacgcccgcggaacctctcggctgtgctctcccatgagtcgggatcgcagcatcccccaccagccgctcaccgcctccgggagccgctgggcttgtacaccgcagcccttccgggacagcagctgtgactcccccccagtgcagatttcgggacagctctctagaaactcgctctaaagacggaaccgccacagcactcaaagcccactgcggaagagggcagcccggcaagcccgggccctgagcctggacccttagcggtgccgggcagcactgccggcgcttcgcctcgccggacgtccgctcctcctacactctcagcctccgctggagagacccccagccccaccattcagcgcgcaagataccctccaggccctcatcaccttttttcaagtcaagatttcatcccatacatgcatgactcaatcagatttggaaatgtggatatgccctgcgtccaagcccaatatagcccttcccctccaggttccagttatgcggcgcagacatacagctcggaatacaccacggagatcatgaaccccgactacaccaagctgaccatggaccttggcagcactgagatcacggctacagccaccacgtccctgcccagcatcagtaccttcgtggagggctactcgagcaactacgaactcaagccttcctgcgtgtaccaaatgcagcggcccttgatcaaagtggaggaggggcgggcgcccagctaccatcaccatcaccaccaccaccaccaccaccaccaccatcaccagcagcagcatcagcagccatccattcctccagcctccagcccggaggacgaggtgctgcccagcacctccatgtacttcaagcagtccccaccgtccacccccaccacgccggccttccccccgcaggcgggggcgttatgggacgaggcactgccctcggcgcccggctgcatcgcacccggcccgctgctggacccgccgatgaaggcggtccccacggtggccggcgcgcgcttcccgctcttccacttcaagccctcgccgccgcatccccccgcgcccagcccggccggcggccaccacctcggctacgacccgacggccgctgccgcgctcagcctgccgctgggagccgcagccgccgcgggcagccaggccgccgcgcttgagagccacccgtacgggctgccgctggccaagagggcggccccgctggccttcccgcctctcggcctcacgccctcccctaccgcgtccagcctgctgggcgagagtcccagcctgccgtcgccgcccagcaggagctcgtcgtctggcgagggcacgtgtgccgtgtgcggggacaacgccgcctgccagcactacggcgtgcgaacctgcgagggctgcaagggctttttcaagagaacagtgcagaaaaatgcaaaatatgtttgcctggcaaataaaaactgcccagtagacaagagacgtcgaaaccgatgtcagtactgtcgatttcagaagtgtctcagtgttggaatggtaaaagaagttgtccgtacagatagtctgaaagggaggagaggtcgtctgccttccaaaccaaagagcccattacaacaggaaccttctcagccctctccaccttctcctccaatctgcatgatgaatgcccttgtccgagctttaacagactcaacacccagagatcttgattattccagatactgtcccactgaccaggctgctgcaggcacagatgctgagcatgtgcaacaattctacaacctcctgacagcctccattgatgtatccagaagctgggcagaaaagattccgggatttactgatctccccaaagaagatcagacattacttattgaatcagcctttttggagctgtttgtcctcagactttccatcaggtcaaacactgctgaagataagtttgtgttctgcaatggacttgtcctgcatcgacttcagtgccttcgtggatttggggagtggctcgactctattaaagacttttccttaaatttgcagagcctgaaccttgatatccaagccttagcctgcctgtcagcactgagcatgatcacagaaagacatgggttaaaagaaccaaagagagtcgaagagctatgcaacaagatcacaagcagtttaaaagaccaccagagtaagggacaggctctggagcccaccgagtccaaggtcctgggtgccctggtagaactgaggaagatctgcaccctgggcctccagcgcatcttctacctgaagctggaagacttggtgtctccaccttccatcattgacaagctcttcctggacaccctacctttctaatcaggagcagtggagcagtgagctgcctcctctcctagcacctgcttgctacgcagcaaagggataggtttggaaacctatcatttcctgtccttccttaagaggaaaagcagctcctgtagaaagcaaagactttcttttttttctggctcttttccttacaacctaaagccagaaaacttgcagagtattgtgttggggttgtgttttatatttaggcattgggggatggggtgggagggggttatagttcatgagggttttctaagaaattgctaacaaagcacttttggacaatgctatcccagcaggaaaaaaaaggataatataactgttttaaaactctttctggggaatccaattatagttgctttgtatttaaaaacaagaacagccaagggttgttcgccagggtaggatgtgtcttaaagattggtcccttgaaaatatgcttcctgtatcaaaggtacgtatgtggtgcaaacaaggcagaaacttccttttaatttccttcttcctttattttaacaaatggtgaaagatggaggattacctacaaatcagacatggcaaaacaataatggctgtttgcttccataaacaagtgcaattttttaaagtgctgtcttactaagtcttgtttattaactctcctttattctatatggaaataaaaaggaggcagtcatgttagcaaatgacacgttaatatccctagcagaggctgtgttcaccttccctgtcgatcccttctgaggtatggcccatccaagacttttaggccattcttgatggaaccagatccctgccctgactgtccagctatcctgaaagtggatcagattataaactggattacatgtaactgttttggttgtgttctatcaaccccaccagagttccctaaacttgcttcagttatagtaactgactggtatattcattcagaagcgccataagtcagttgagtatttgatccctagataagaacatgcaaatcagcaggaactggtcatacagggtaagcaccagggacaataaggatttttatagatataatttaatttttgttattggttaaggagacaattttggagagcaagcaaatctttttaaaaaatagtatgaatgtgaatactagaaaagatttaaaaaatagtatgagtgtgagtactaggaaggattagtgggctgcgtttcaacattccgtgttcgtactcccttttgtatgtttctactgttaatgccatattactatgagataatttgttgcatagtgtccttatttgtataaacatttgtatgcacgttatattgtaatagctttgcctgtatttattgcaagaccaccagctcctggaagctgagttacagagtaattaaatggggtgttcacagtgacttggatacaccaattagaaattaaataagcaaatatatatatatatataaatatagcaggttacatatatatatttataatgtgtctttttattaaccatttgtacaataaatgtcacttcccatgccgttattttatggttcatttgcagtgacttttaaggcagtactgtttagcactttgatattaaaattttgcttatgttttgctaaattcgaataatgtttgaagatttttaggtctaaaagtctttatattatatactctgtatcaagtcaaaatatctttggccattttgctaagaaacaaactttgaatgtcaaactgatgtcacagtagtttttgttagctttaaatcatttttgctttagtctttttaaaggaaaataacaaaactatgctgtttatattgtcattaaattatacaatcaaacaaatgccaaatgaattgcctaattgctgcaaagtataacccagataggaaatcatatgtttttttccaagagtcattctaatatttgattatgttatgtgtgcttttatgaaagattgttatttttatatatcaagatgatagaacctggaatgttaggattttgaaatgttagacttggaaggggcctggtctgtcaactagtccaaccccttaaaattcatagaggagcaaactggggcccattgaagggtgaagagttactcaaggtcaaacagctggtaacagaatcaagactaagacctaatttacctttccatactctttttttttctcaacttcatctatataaaatcaggcttttaaacataaccactaatatttacctgaagataaccatgagtaaagtatacttttgcattaattttttgagcttatatgcaaacataataaatattattaaatatcaggaaagctaacatttcatacaagatagcttcagaccaaattcaaattgaatttgaataaattagaaatactgtgcatacataaccttcttgtgcaccatgagtatttggaaagttaatccttgtttttgtcgtgtctataaaggaagaacaaaacaaaataaaaacagagccctagagaaatgctgttactttttatttttacacccatcagatttaaggaaaagactttttagccattataatctagtggttggaaggaatgaagaagcttttttagtaataggtccagatatgagtgctaaaaataaagatgatagcatgttcttctgtcttccatagttattacaactatgagagcctcccaagtcatcttatcaactcaactcccttttttttgtcttaatgttgcacataagtttatacagagtggatgaccacactagcacagaagagaacaacatgtattaaagcaggtgattcctccccttggcgggagagctctctcagtgtgaacatgccttctgtgggcggaaatcaggaagccaccagctgttaatggagagtgccttgcttttatttcagacagcagagttttccaaagtttctctgctcctctaacagcattgctctttagtgtgtgttaacctgtggtttgaaagaaatgctcttgtacattaacaatgtaaatttaaatgattaaattacattttatcaatggc

SEQ ID NO: 14087 - DNA, 1853 bp, Homo sapiens
  source 1..1853: mol_type = unassigned DNA
cgcggcgcggcgccggaggaggaagtggtgaggttgttgctccttcagcgcctatcgctggctcttggggcgcagagaggggccgcagtctccgcggctgcgtcgagctcccttgcagtcccctccatgttccccggcgccactactccccttcctaaggccgccgcttaccccggggtctatggaagtaatggaaggacccctcaacctggctcatcaacagagcagacgagcagaccgtttattagctgcaggcaaatacgaagaggctatttcttgtcacaaaaaggctgcagcatatctttctgaagccatgaagctgacacagtcagagcaggctcatctttcactggaattgcaaagggatagccatatgaaacagctcctcctcatccaagagagatggaaaagggcccagcgtgaagaaagattgaaagcccagcagaacacagacaaggatgcagctgcccatcttcagacatctcacaaaccctctgcagaggatgcagagggccagagtcccctttctcagaagtacagcccttccacagagaaatgcctgcctgagattcaggggatctttgacagggatccagacacactactttatttacttcagcaaaagagtgagccagcagagccatgtattggaagcaaagccccaaaagatgataaaacaattatagaggagcaggcaaccaaaattgcagatttgaagaggcatgtggaattccttgtggctgagaatgaaagattaaggaaagaaaataaacaactaaaggctgaaaaggccagacttctaaaaggtccaatagaaaaggagctggatgtagatgctgattttgtagaaacgtcagagttatggagcttgccaccacatgcagaaactgctacagcctcctcaacctggcagaagttcgcagcaaatactgggaaagccaaggacattccaatccccaatcttcctcccttggattttccatctccagaacttcctcttatggagctctctgaggatattctgaaaggatttatgaataattaaaatggaaggccacagaaaaggggaaaagaggaaataatacagtaatcgttaatccagcaaaaagaaatgaaaagggaaaaccacatagaagggtaatcccggaaatgcttcatctggtggactgtgggagcagaggcattgccaggacttgggaaacagtcactgtgaaatgcgctgcgtatctcattcactcacttcagctaatgattccgacttggcagacgctaaactcatggaggttcggtttctcctgatacaaaccaaatggctacctggaagaatttctttcaagcaacagttatttttcttatcttcagggttaaaatgtataaaagttatgtgtaattaatctataatgccataaatgataatgcaaaacctaaataatatggtggccggaggggctgccttatatttgaaacatgctttctatcatgcattgactgtatgcattttgttaatgcacattctgtttgtttaaggtgtgtaagatacacacccttctagatgaaactatatgtgccacactttgcactactcataatgataacctcaagactatcagaagaaatatttaaatttccattttatgaagaaaggaaccaaattattatgctttttaaaacaaattaccagtttacataattaatcagggtgcattttaagttctaacttcgtttattgtataatgcatcatttgaaaataccaaggaggaaataccctttgtttttaatgatgcaagagtggacgtaatgctagttggcagtattttattgtaagaaatcaataaagtaattgtgttttata

SEQ ID NO: 14088 - DNA, 1816 bp, Homo sapiens
  source 1..1816: mol_type = unassigned DNA
atggcgccgtgcgtggcctcggcggtggcgcagggggcgggcccgcggcgcggcgccggaggaggaagtggtgaggttgttgctccttcagcgcctatcgctggctcttggggcgcagagaggggccgcagtctccgcggctgcgtcgagctcccttgcagtcccctccatgttccccggcgccactactccccttcctaaggccgccgcttaccccggggtctatggaagtaatggaaggacccctcaacctgcatatctttctgaagccatgaagctgacacagtcagagcaggctcatctttcactggaattgcaaagggatagccatatgaaacagctcctcctcatccaagagagatggaaaagggcccagcgtgaagaaagattgaaagcccagcagaacacagacaaggatgcagctgcccatcttcagacatctcacaaaccctctgcagaggatgcagagggccagagtcccctttctcagaagtacagcccttccacagagaaatgcctgcctgagattcaggggatctttgacagggatccagacacactactttatttacttcagcaaaagagtgagccagcagagccatgtattggaagcaaagccccaaaagatgataaaacaattatagaggagcaggcaaccaaaattgcagatttgaagaggcatgtggaattccttgtggctgagaatgaaagattaaggaaagaaaataaacaactaaaggctgaaaaggccagacttctaaaaggtccaatagaaaaggagctggatgtagatgctgattttgtagaaacgtcagagttatggagcttgccaccacatgcagaaactgctacagcctcctcaacctggcagaagttcgcagcaaatactgggaaagccaaggacattccaatccccaatcttcctcccttggattttccatctccagaacttcctcttatggagctctctgaggatattctgaaaggatttatgaataattaaaatggaaggccacagaaaaggggaaaagaggaaataatacagtaatcgttaatccagcaaaaagaaatgaaaagggaaaaccacatagaagggtaatcccggaaatgcttcatctggtggactgtgggagcagaggcattgccaggacttgggaaacagtcactgtgaaatgcgctgcgtatctcattcactcacttcagctaatgattccgacttggcagacgctaaactcatggaggttcggtttctcctgatacaaaccaaatggctacctggaagaatttctttcaagcaacagttatttttcttatcttcagggttaaaatgtataaaagttatgtgtaattaatctataatgccataaatgataatgcaaaacctaaataatatggtggccggaggggctgccttatatttgaaacatgctttctatcatgcattgactgtatgcattttgttaatgcacattctgtttgtttaaggtgtgtaagatacacacccttctagatgaaactatatgtgccacactttgcactactcataatgataacctcaagactatcagaagaaatatttaaatttccattttatgaagaaaggaaccaaattattatgctttttaaaacaaattaccagtttacataattaatcagggtgcattttaagttctaacttcgtttattgtataatgcatcatttgaaaataccaaggaggaaataccctttgtttttaatgatgcaagagtggacgtaatgctagttggcagtattttattgtaagaaatcaataaagtaattgtgttttataccttt

SEQ ID NO: 14089 - DNA, 6228 bp, Homo sapiens
  source 1..6228: mol_type = unassigned DNA
agccagaggggatagcttcgtcgagaacggaggacaccggcggtccagggtcctgggcagtcgcgccagagctgagcggagggcgcggcgcgagaacgaatctttgtgacattctctctcagcattctttatcccctgtttgctgaagacttcgacaaaagctggtcttagctgttggcattctcctgagaaaaggatagcttcagaaatcagaaaaacatttgggaggtgtctagcccagtggaccttctgaagagcaatgctaagaagacgtttggtttaaagaattaaaaggaagaacaacttaagagcttcttcaaagtttcccgcatgaaaattacttaaacgttgcacacaacgtttcacaaaatcttttgtgaaagaagaaaaggaaattcagtgtgtgagtctcagcaggagttaagctaatgcagcttaaaataatgccgaaaaagaagcgcttatctgcgggcagagtgcccctgattctcttcctgtgccagatgattagtgcactggaagtacctcttgatctggtacagcctccaaccatcacccaacagtctccaaaagattacattattgaccctcgggagaatattgtaatccagtgtgaagccaaagggaaaccgcccccaagcttttcctggacccgtaatgggactcattttgacatcgataaagaccctctggtcaccatgaagcctggcacaggaacgctcataattaacatcatgagcgaagggaaagctgagacctatgaaggagtctatcagtgtacagcaaggaacgaacgcggagctgcagtttctaataacattgttgtccgcccatccagatcaccattgtggaccaaagaaaaacttgaaccaatcacacttcaaagtggtcagtctttagtacttccctgcagacccccaattggattaccaccacctataatattttggatggataattcctttcaaagacttccacaaagtgagagagtttctcaaggtttgaatggggacctttatttttccaatgtcctcccagaggacacccgcgaagactatatctgttatgctagatttaatcatactcaaaccatacagcagaagcaacctatttctgtgaaggtgatttcagtggatgaattgaatgacactatagctgctaatttgagtgacactgagttttatggtgctaaatcaagtagagagaggccaccaacatttttaactccagaaggcaatgcaagtaacaaagaggaattaagaggaaatgtgctttcactggagtgcattgcagaaggactgcctaccccaattatttactgggcaaaggaagatggaatgctacccaaaaacaggacagtttataagaactttgagaaaaccttgcagatcattcatgtttcagaagcagactctggaaattaccaatgtatagcaaaaaacgcattaggagccatccaccataccatttctgttagagttaaagcggctccatactggatcacagcccctcaaaatcttgtgctgtccccaggagaggatgggaccttgatctgcagagctaatggcaaccccaaacccagaattagctggttaacaaatggagtcccaatagaaattgcccctgatgaccccagcagaaaaatagatggcgataccattattttttcaaatgttcaagaaagatcaagtgcagtctatcagtgcaatgcctctaatgaatatggatatttactggcaaacgcatttgtaaatgtgctggctgagccaccacgaatcctcacacctgcaaacacactctaccaggtcattgcaaacaggcctgctttactagactgtgccttctttgggtctcctctcccaaccatcgagtggtttaaaggagctaaaggaagtgctcttcatgaagatatttatgttttacatgaaaatggaactttggaaattcctgtggcccaaaaggacagtacaggaacttatacgtgtgttgcaaggaataaattagggatggcgaagaatgaagttcacttagaaatcaaagatcctacatggatcgttaaacagcccgaatatgcagttgtgcaaagagggagcatggtgtcctttgaatgcaaagtgaaacatgatcacaccttatccctcactgtcctgtggctgaaggacaacagggaactgcccagtgatgaaaggttcactgttgacaaggatcatctagtggtagctgatgtcagtgacgatgacagcgggacctacacgtgtgtggccaacaccactctggacagcgtctccgccagcgctgtgcttagcgttgttgatgtcccaaatcctccctttgacttagaactgacagatcaacttgacaaaagtgttcagctgtcatggaccccaggcgatgacaacaatagccccattacaaaattcatcatcgaatatgaagatgcaatgcacaagccagggctgtggcaccaccaaactgaagtttctggaacacagaccacagcccagctgaagctgtctccttacgtgaactactccttccgcgtgatggcagtgaacagcattgggaagagcttgcccagcgaggcgtctgagcagtatttgacgaaagcctcagaaccagataaaaaccccacagctgtggaaggactgggatcagagcctgataatttggtgattacgtggaagcccttgaatggtttcgaatctaatgggccaggccttcagtacaaagttagctggcgccagaaagatggtgatgatgaatggacatctgtggttgtggcaaatgtatccaaatatattgtctcaggcacgccaacctttgttccatacctgatcaaagttcaggccctgaatgacatggggtttgcccccgagccagctgtagtcatgggacattctggagaagacctcccaatggtggctcctgggaacgtgcgtgtgaatgtggtgaacagtaccttagccgaggtgcactgggacccagtacctctgaaaagcatccgaggacacctacaaggctatcggatttactattggaagacccagagttcatctaaaagaaacagacgtcacattgagaaaaagatcctcaccttccaaggcagcaagactcatggcatgttgccggggctagagccctttagccactacacactgaatgtccgagtggtcaatgggaaaggggagggcccagccagccctgacagagtctttaatactccagaaggagtccccagtgctccctcgtctttgaagattgtgaatccaacactggactctctcactttggaatgggatccaccgagccacccgaatggcattttgacagagtacaccttaaagtatcagccaattaacagcacacatgaattaggccctctggtagatttgaaaattcctgccaacaagacacggtggactttaaaaaatttaaatttcagcactcgatataagttttatttctatgcacaaacatcagcaggatcaggaagtcaaattacagaggaagcagtaacaactgtggatgaagcgatggcaagccggcaggtggatattgcaactcagggctggttcattggtctgatgtgtgctgttgctctccttatcttaattttgctgattgtttgcttcatcagaagaaacaagggtggtaaatatccagttaaagaaaaggaagatgcccatgctgaccctgaaatccagcctatgaaggaagatgatgggacatttggagaatacagtgatgcagaagaccacaagcctttgaaaaaaggaagtcgaactccttcagacaggactgtgaaaaaagaagatagtgacgacagcctagttgactatggagaaggggttaatggccagttcaatgaggatggctcctttattggacaatacagtggtaagaaagagaaagagccggctgaaggaaacgaaagctcagaggcaccttctcctgtcaacgccatgaattcctttgtttaatttttaagctctttgccaatattccatttctctagaatgtttatcctaagcacttgtttgtcagccctctcatactatgaacatatgggtagagagtatattttctgctgtatgttagtattatgagaatagttacagcaaaaacataactcagtcaaatgatatgttaatatgaactggaatgcaaagtgcatactttttcattcaaaatgggtattcttgatttcctcagaactgataaaaaataatgcaacatcaccaacagatcctgttatttcctctgcaggatacagttcaatatgatgcatgaaaaatgctccacatttaaaggacatacccgtgtatgttatgaaaacatggtttgatactttgtttatactaccctcagctgaacccctatatatgaattccgttttcattgtcaagaatgttactgtagtattctctagaacttcaatgtctttgtggacattgttgtgaaattggtgactatgtatagctgtcgttagtctttttgggagactgttaggaacagtttgtacagtatatacttgctaaatgagttcattatgacagtcacattgctgatgcttactgagaactattacctactcttggctcctgttactccgtaggcttcttaatcttccaggcattacagcagcacagtgttctactttttacatcatttctatgttcggttgtttttaggcataaacaatgtgtattgcagtgcatttcggcatttgtgccatactgaaagaatcaaaaacaaatcatccaaattaaatttcaaacattatttcagagaacacagggcaagacacatacagtgccttcagatattaagcattccacaacatcgtgcattctgtatcagctggtccagtccattctgggtcctagattactgtcattgtctaaaagtaacttttaaaaagcagagttcatgaaaactgcaatgctgggaaaagaaggaaacatgaaaataaaaataagacagtttattagaaatagcatttcctcataagcataaaaagaaaatctttgttgccaactgaagcacatgatgattttgtggtcctttatggtttctattacattcagtaagaaagatgtcaacatgctagaaaattaattttaaaactaagttattccaacactaaaagcatacaacagcatgccaacagtaatatattattctccaagactttacctatgtaagtgttcaaaactctgcagcattaaacaacgtgtatgcaaattgttatggatacatttcagaatctaagaaatcaggcaagtgcttaaaaggccaacggtccaagggattacatctgcagtttaaaaagtaaatatatattctatcgtattcataaacaatatctatcaaatgggttacctccaaatatgaaaatctataacaacctatggttgaaggaatgctcagtttcatttgccaataaattggtttctcataacttgcatcaagtttaattttaagtaaagctttttatatgtagatattttgttgaatttgtaaatacacttaaaatgtagatgctatatgcttataggtgttacatacaaataaacatgcaatgtttatgttgtactgtataagaggtaagctaattaatgcagtgaatgggattggaaagcatctacttaaatatctattgggttcccccctccccccaccttttttgctgtgaaactgaaatagtgaacttttctacgtattgacagcagatttttcgatgaaatcttcagagctttgcctatggggcacagtaggcctagtaacctggcatgtttgatatatgtaggtaaagcataatttaaagtaatcccaggtaaagatggccctaaatactttcatgtctctatattcatttttcacagatccacctgtctcttgaaaatataaaaagacaaaacaggtttgccttggcatcagagagcacaaagattaaaagttactttaaatttgccaatattttgggagaacaataaaactacattttttcctcttccatactggtagatgcgaaatttatctgtgcatgaaagggtcacttctgtaatagtgcaacagatttggtattaaaaattaaatgtggttttaaaagttcctctctcttttgtaatttatgttcccaattgagtgtgaatgtccaagtaatggtgtatgtaatggtacaggcaaatgtgactggatttccctcaaaaaagtaactattaaaca

SEQ ID NO: 14090 - DNA, 5782 bp, Homo sapiens
  source 1..5782: mol_type = unassigned DNA
cgtcgagaacggaggacaccggcggtccagggtcctgggcagtcgcgccagagctgagcggagggcgcggcgcgagaacgaatctttgtgacattctctctcagcattctttatcccctgtttgctgaagacttcgacaaaagctggtcttagctgttggcattctcctgagaaaaggatagcttcagaaatcagaaaaacatttgggaggtgtctagcccagtggaccttctgaagagcaatgctaagaagacgtttggtttaaagaattaaaaggaagaacaacttaagagcttcttcaaagtttcccgcatgaaaattacttaaacgttgcacacaacgtttcacaaaatcttttgtgaaagaagaaaaggaaattcagtgtgtgagtctcagcaggagttaagctaatgcagcttaaaataatgccgaaaaagaagcgcttatctgcgggcagagtgcccctgattctcttcctgtgccagatgattagtgcactggaagtacctcttgatccaaaacttcttgaagacttggtacagcctccaaccatcacccaacagtctccaaaagattacattattgaccctcgggagaatattgtaatccagtgtgaagccaaagggaaaccgcccccaagcttttcctggacccgtaatgggactcattttgacatcgataaagaccctctggtcaccatgaagcctggcacaggaacgctcataattaacatcatgagcgaagggaaagctgagacctatgaaggagtctatcagtgtacagcaaggaacgaacgcggagctgcagtttctaataacattgttgtccgcccatccagatcaccattgtggaccaaagaaaaacttgaaccaatcacacttcaaagtggtcagtctttagtacttccctgcagacccccaattggattaccaccacctataatattttggatggataattcctttcaaagacttccacaaagtgagagagtttctcaaggtttgaatggggacctttatttttccaatgtcctcccagaggacacccgcgaagactatatctgttatgctagatttaatcatactcaaaccatacagcagaagcaacctatttctgtgaaggtgatttcagctaaatcaagtagagagaggccaccaacatttttaactccagaaggcaatgcaagtaacaaagaggaattaagaggaaatgtgctttcactggagtgcattgcagaaggactgcctaccccaattatttactgggcaaaggaagatggaatgctacccaaaaacaggacagtttataagaactttgagaaaaccttgcagatcattcatgtttcagaagcagactctggaaattaccaatgtatagcaaaaaacgcattaggagccatccaccataccatttctgttagagttaaagcggctccatactggatcacagcccctcaaaatcttgtgctgtccccaggagaggatgggaccttgatctgcagagctaatggcaaccccaaacccagaattagctggttaacaaatggagtcccaatagaaattgcccctgatgaccccagcagaaaaatagatggcgataccattattttttcaaatgttcaagaaagatcaagtgcagtctatcagtgcaatgcctctaatgaatatggatatttactggcaaacgcatttgtaaatgtgctggctgagccaccacgaatcctcacacctgcaaacacactctaccaggtcattgcaaacaggcctgctttactagactgtgccttctttgggtctcctctcccaaccatcgagtggtttaaaggagctaaaggaagtgctcttcatgaagatatttatgttttacatgaaaatggaactttggaaattcctgtggcccaaaaggacagtacaggaacttatacgtgtgttgcaaggaataaattagggatggcgaagaatgaagttcacttagaaatcaaagatcctacatggatcgttaaacagcccgaatatgcagttgtgcaaagagggagcatggtgtcctttgaatgcaaagtgaaacatgatcacaccttatccctcactgtcctgtggctgaaggacaacagggaactgcccagtgatgaaaggttcactgttgacaaggatcatctagtggtagctgatgtcagtgacgatgacagcgggacctacacgtgtgtggccaacaccactctggacagcgtctccgccagcgctgtgcttagcgttgttgctcctactccaactccagctcccgtttacgatgtcccaaatcctccctttgacttagaactgacagatcaacttgacaaaagtgttcagctgtcatggaccccaggcgatgacaacaatagccccattacaaaattcatcatcgaatatgaagatgcaatgcacaagccagggctgtggcaccaccaaactgaagtttctggaacacagaccacagcccagctgaagctgtctccttacgtgaactactccttccgcgtgatggcagtgaacagcattgggaagagcttgcccagcgaggcgtctgagcagtatttgacgaaagcctcagaaccagataaaaaccccacagctgtggaaggactgggatcagagcctgataatttggtgattacgtggaagcccttgaatggtttcgaatctaatgggccaggccttcagtacaaagttagctggcgccagaaagatggtgatgatgaatggacatctgtggttgtggcaaatgtatccaaatatattgtctcaggcacgccaacctttgttccatacctgatcaaagttcaggccctgaatgacatggggtttgcccccgagccagctgtagtcatgggacattctggagaagacctcccaatggtggctcctgggaacgtgcgtgtgaatgtggtgaacagtaccttagccgaggtgcactgggacccagtacctctgaaaagcatccgaggacacctacaaggctatcggatttactattggaagacccagagttcatctaaaagaaacagacgtcacattgagaaaaagatcctcaccttccaaggcagcaagactcatggcatgttgccggggctagagccctttagccactacacactgaatgtccgagtggtcaatgggaaaggggagggcccagccagccctgacagagtctttaatactccagaaggagtccccagtgctccctcgtctttgaagattgtgaatccaacactggactctctcactttggaatgggatccaccgagccacccgaatggcattttgacagagtacaccttaaagtatcagccaattaacagcacacatgaattaggccctctggtagatttgaaaattcctgccaacaagacacggtggactttaaaaaatttaaatttcagcactcgatataagttttatttctatgcacaaacatcagcaggatcaggaagtcaaattacagaggaagcagtaacaactgtggatgaagctggtattcttccacctgatgtaggtgcaggcaaagcgatggcaagccggcaggtggatattgcaactcagggctggttcattggtctgatgtgtgctgttgctctccttatcttaattttgctgattgtttgcttcatcagaagaaacaagggtggtaaatatccagttaaagaaaaggaagatgcccatgctgaccctgaaatccagcctatgaaggaagatgatgggacatttggagaatacagtgatgcagaagaccacaagcctttgaaaaaaggaagtcgaactccttcagacaggactgtgaaaaaagaagatagtgacgacagcctagttgactatggagaaggggttaatggccagttcaatgaggatggctcctttattggacaatacagtggtaagaaagagaaagagccggctgaaggaaacgaaagctcagaggcaccttctcctgtcaacgccatgaattcctttgtttaatttttaagctctttgccaatattccatttctctagaatgtttatcctaagcacttgtttgtcagccctctcatactatgaacatatgggtagagagtatattttctgctgtatgttagtattatgagaatagttacagcaaaaacataactcagtcaaatgatatgttaatatgaactggaatgcaaagtgcatactttttcattcaaaatgggtattcttgatttcctcagaactgataaaaaataatgcaacatcaccaacagatcctgttatttcctctgcaggatacagttcaatatgatgcatgaaaaatgctccacatttaaaggacatacccgtgtatgttatgaaaacatggtttgatactttgtttatactaccctcagctgaacccctatatatgaattccgttttcattgtcaagaatgttactgtagtattctctagaacttcaatgtctttgtggacattgttgtgaaattggtgactatgtatagctgtcgttagtctttttgggagactgttaggaacagtttgtacagtatatacttgctaaatgagttcattatgacagtcacattgctgatgcttactgagaactattacctactcttggctcctgttactccgtaggcttcttaatcttccaggcattacagcagcacagtgttctactttttacatcatttctatgttcggttgtttttaggcataaacaatgtgtattgcagtgcatttcggcatttgtgccatactgaaagaatcaaaaacaaatcatccaaattaaatttcaaacattatttcagagaacacagggcaagacacatacagtgccttcagatattaagcattccacaacatcgtgcattctgtatcagctggtccagtccattctgggtcctagattactgtcattgtctaaaagtaacttttaaaaagcagagttcatgaaaactgcaatgctgggaaaagaaggaaacatgaaaataaaaataagacagtttattagaaatagcatttcctcataagcataaaaagaaaatctttgttgccaactgaagcacatgatgattttgtggtcctttatggtttctattacattcagtaagaaagatgtcaacatgctagaaaattaattttaaaactaagttattccaacactaaaagcatacaacagcatgccaacagtaatatattattctccaagactttacctatgtaagtgttcaaaactctgcagcattaaacaacgtgtatgcaaattgttatggatacatttcagaatctaagaaatcaggcaagtgcttaaaaggccaacggtccaagggattacatctgcagtttaaaaagtaaatatatattctatcgtattcataaacaatatctatcaaatgggttacctccaaatatgaaaatctataacaacctatggttgaaggaatgctcagtttcatttgccaataaattggtttctcataacttgcatcaagtttaattttaagtaaagctttttatatgtagatattttgttgaatttgtaaatacacttaaaatgtagatgctatatgcttataggtgttacatacaaataaacatgcaatgtttatgttgtactgtataagaggtaagctaattaatgcagtgaatgggattggaaagcatctacttaaatatctattgggttcccccctccccccaccttttttgctgtgaaactgaaatagtgaacttttctacgtattgacagcagatttttcgatgaaatcttcagagctttgcctatggggcaca

SEQ ID NO: 14091 - DNA, 3915 bp, Homo sapiens
  source 1..3915: mol_type = unassigned DNA
atgcagcttaaaataatgccgaaaaagaagcgcttatctgcgggcagagtgcccctgattctcttcctgtgccagatgattagtgcactggaagtacctcttgatccaaaacttcttgaagacttggtacagcctccaaccatcacccaacagtctccaaaagattacattattgaccctcgggagaatattgtaatccagtgtgaagccaaagggaaaccgcccccaagcttttcctggacccgtaatgggactcattttgacatcgataaagaccctctggtcaccatgaagcctggcacaggaacgctcataattaacatcatgagcgaagggaaagctgagacctatgaaggagtctatcagtgtacagcaaggaacgaacgcggagctgcagtttctaataacattgttgtccgcccatccagatcaccattgtggaccaaagaaaaacttgaaccaatcacacttcaaagtggtcagtctttagtacttccctgcagacccccaattggattaccaccacctataatattttggatggataattcctttcaaagacttccacaaagtgagagagtttctcaaggtttgaatggggacctttatttttccaatgtcctcccagaggacacccgcgaagactatatctgttatgctagatttaatcatactcaaaccatacagcagaagcaacctatttctgtgaaggtgatttcagtggatgaattgaatgacactatagctgctaatttgagtgacactgagttttatggtgctaaatcaagtagagagaggccaccaacatttttaactccagaaggcaatgcaagtaacaaagaggaattaagaggaaatgtgctttcactggagtgcattgcagaaggactgcctaccccaattatttactgggcaaaggaagatggaatgctacccaaaaacaggacagtttataagaactttgagaaaaccttgcagatcattcatgtttcagaagcagactctggaaattaccaatgtatagcaaaaaacgcattaggagccatccaccataccatttctgttagagttaaagcggctccatactggatcacagcccctcaaaatcttgtgctgtccccaggagaggatgggaccttgatctgcagagctaatggcaaccccaaacccagaattagctggttaacaaatggagtcccaatagaaattgcccctgatgaccccagcagaaaaatagatggcgataccattattttttcaaatgttcaagaaagatcaagtgcagtctatcagtgcaatgcctctaatgaatatggatatttactggcaaacgcatttgtaaatgtgctggctgagccaccacgaatcctcacacctgcaaacacactctaccaggtcattgcaaacaggcctgctttactagactgtgccttctttgggtctcctctcccaaccatcgagtggtttaaaggagctaaaggaagtgctcttcatgaagatatttatgttttacatgaaaatggaactttggaaattcctgtggcccaaaaggacagtacaggaacttatacgtgtgttgcaaggaataaattagggatggcgaagaatgaagttcacttagaaatcaaagatcctacatggatcgttaaacagcccgaatatgcagttgtgcaaagagggagcatggtgtcctttgaatgcaaagtgaaacatgatcacaccttatccctcactgtcctgtggctgaaggacaacagggaactgcccagtgatgaaaggttcactgttgacaaggatcatctagtggtagctgatgtcagtgacgatgacagcgggacctacacgtgtgtggccaacaccactctggacagcgtctccgccagcgctgtgcttagcgttgttgctcctactccaactccagctcccgtttacgatgtcccaaatcctccctttgacttagaactgacagatcaacttgacaaaagtgttcagctgtcatggaccccaggcgatgacaacaatagccccattacaaaattcatcatcgaatatgaagatgcaatgcacaagccagggctgtggcaccaccaaactgaagtttctggaacacagaccacagcccagctgaagctgtctccttacgtgaactactccttccgcgtgatggcagtgaacagcattgggaagagcttgcccagcgaggcgtctgagcagtatttgacgaaagcctcagaaccagataaaaaccccacagctgtggaaggactgggatcagagcctgataatttggtgattacgtggaagcccttgaatggtttcgaatctaatgggccaggccttcagtacaaagttagctggcgccagaaagatggtgatgatgaatggacatctgtggttgtggcaaatgtatccaaatatattgtctcaggcacgccaacctttgttccatacctgatcaaagttcaggccctgaatgacatggggtttgcccccgagccagctgtagtcatgggacattctggagaagacctcccaatggtggctcctgggaacgtgcgtgtgaatgtggtgaacagtaccttagccgaggtgcactgggacccagtacctctgaaaagcatccgaggacacctacaaggctatcggatttactattggaagacccagagttcatctaaaagaaacagacgtcacattgagaaaaagatcctcaccttccaaggcagcaagactcatggcatgttgccggggctagagccctttagccactacacactgaatgtccgagtggtcaatgggaaaggggagggcccagccagccctgacagagtctttaatactccagaaggagtccccagtgctccctcgtctttgaagattgtgaatccaacactggactctctcactttggaatgggatccaccgagccacccgaatggcattttgacagagtacaccttaaagtatcagccaattaacagcacacatgaattaggccctctggtagatttgaaaattcctgccaacaagacacggtggactttaaaaaatttaaatttcagcactcgatataagttttatttctatgcacaaacatcagcaggatcaggaagtcaaattacagaggaagcagtaacaactgtggatgaagctggtattcttccacctgatgtaggtgcaggcaaagttcaagcagtaaatcccaggatcagcaatcttactgctgcagctgctgagacctatgccaatatcagttgggaatatgagggaccagagcatgtgaacttttatgttgaatatggtgtagcaggcagcaaagaagaatggagaaaagaaattgtaaatggttctcggagcttctttgggttaaagggtctaatgccaggaacagcatacaaagttcgagttggtgctgtgggggactctggttttgtgagttcagaggatgtgtttgagacaggcccagcgatggcaagccggcaggtggatattgcaactcagggctggttcattggtctgatgtgtgctgttgctctccttatcttaattttgctgattgtttgcttcatcagaagaaacaagggtggtaaatatccagttaaagaaaaggaagatgcccatgctgaccctgaaatccagcctatgaaggaagatgatgggacatttggagaatacagtgatgcagaagaccacaagcctttgaaaaaaggaagtcgaactccttcagacaggactgtgaaaaaagaagatagtgacgacagcctagttgactatggagaaggggttaatggccagttcaatgaggatggctcctttattggacaatacagtggtaagaaagagaaagagccggctgaaggaaacgaaagctcagaggcaccttctcctgtcaacgccatgaattcctttgtttaa

SEQ ID NO: 14092 - DNA, 569 bp, Homo sapiens
  source 1..569: mol_type = unassigned DNA
ctggtattcttccacctgatgtaggtgcaggcaaagttcaagcagtaaatcccaggatcagcaatcttactgctgcagctgctgagacctatgccaatatcagttgggaatatgagggaccagagcatgtgaacttttatgttgaatatggtgtagcaggcacgatggcaagccggcaggtggatattgcaactcagggctggttcattggtctgatgtgtgctgttgctctccttatcttaattttgctgattgtttgcttcatcagaagaaacaagggtggtaaatatccagttaaagaaaaggaagatgcccatgctgaccctgaaatccagcctatgaaggaagatgatgggacatttggagaatacagtgatgcagaagaccacaagcctttgaaaaaaggaagtcgaactccttcagacaggactgtgaaaaaagaagatagtgacgacagcctagttgactatggagaaggggttaatggccagttcaatgaggatggctcctttattggacaatacagtggtaagaaagagaaagagccggctgaaggaaacgaaagctca

SEQ ID NO: 14093 - DNA, 554 bp, Homo sapiens
  source 1..554: mol_type = unassigned DNA
aggagctgttaaaaggttatcacttagttatgctggggaaagagtgagtgggattataaaagtcaatttaacagcacacatgaattaggccctctggtagatttgaaaattcctgccaacaagacacggtggactttaaaaaatttaaatttcagcactcgatataagttttatttctatgcacaaacatcagcaggatcaggaagtcaaattacagaggaagcagtaacaactgtggatgaagcgatggcaagccggcaggtggatattgcaactcagggctggttcattggtctgatgtgtgctgttgctctccttatcttaattttgctgattgtttgcttcatcagaagaaacaagggtggtaaatatccagttaaagaaaaggaagatgcccatgctgaccctgaaatccagcctatgaaggaagatgatgggacatttggagaatacagtgatgcagaagaccacaagcctttgaaaaaaggaagtcgaactccttcagacaggactgtgaaaaaagaagatagtgacgacagcctagttgactatgg

SEQ ID NO: 14094 - DNA, 575 bp, Homo sapiens
  source 1..575: mol_type = unassigned DNA
agtccccagtgctccctcgtctttgaagattgtgaatccaacactggactctctcactttggaatgggatccaccgagccacccgaatggcattttgacagagtacaccttaaagtatcagccaattaacagcacacatgaattaggccctctggtagatttgaaaattcctgccaacaagacacggtggactttaaaaaatttaaatttcagcactcgatataagttttatttctatgcacaaacatcagcaggatcaggaagtcaaattacagaggaagcagtaacaactgtggatgaagcgatggcaagccggcaggtggatattgcaactcagggctggttcattggtctgatgtgtgctgttgctctccttatcttaattttgctgattgtttgcttcatcagaagaaacaagggtggtaaatatccagttaaagaaaaggaagatgcccatgctgaccctgaaatccagcctatgaaggaagatgatgggacatttggagaatacagacagtaggatctgcatccttactagcatatagaaaaatcagagaaacaatgcaaccaagagt

SEQ ID NO: 14095 - DNA, 1594 bp, Homo sapiens
  source 1..1594: mol_type = unassigned DNA
gattttccatgggcaggagccagaggacgggctggaccattgcttcgtcctcctctaacagaatctacactagagacgatttgtggctaatggtgcagtttaacttaaaacttctgaggagaacccccatcttcagttatcgtagttcatgacctcccagcagtatgaggatttattaactcatgtctctttaatttcccgcatgaaaattacttaaacgttgcacacaacgtttcacaaaatcttttgtgaaagaagaaaaggaaattcagtgtgtgagtctcagcaggagttaagctaatgcagcttaaaataatgccgaaaaagaagcgcttatctgcgggcagagtgcccctgattctcttcctgtgccagatgattagtgcactggaagtacctcttgatctggtacagcctccaaccatcacccaacagtctccaaaagattacattattgaccctcgggagaatattgtaatccagtgtgaagccaaagggaaaccgcccccaagcttttcctggacccgtaatgggactcattttgacatcgataaagaccctctggtcaccatgaagcctggcacaggaacgctcataattaacatcatgagcgaagggaaagctgagacctatgaaggagtctatcagtgtacagcaaggaacgaacgcggagctgcagtttctaataacattgttgtccgcccatccagatcaccattgtggaccaaagaaaaacttgaaccaatcacacttcaaagtggtcagtctttagtacttccctgcagacccccaattggattaccaccacctataatattttggatggataattcctttcaaagacttccacaaagtgagagagtttctcaaggtttgaatggggacctttatttttccaatgtcctcccagaggacacccgcgaagactatatctgttatgctagatttaatcatactcaaaccatacagcagaagcaacctatttctgtgaaggtgatttcagtggatgaattgaatgacactatagctgctaatttgagtgacactgagttttatggtgctaaatcaagtagagagaggccaccaacatttttaactccagaaggcaatgcaagtaacaaagaggaattaagaggaaatgtgctttcactggagtgcattgcagaaggactgcctaccccaattatttactgggcaaaggaagatggaatgctacccaaaaacaggacagtttataagaactttgagaaaaccttgcagatcattcatgtttcagaagcagactctggaaattaccaatgtatagcaaaaaacgcattaggagccatccaccataccatttctgttagagttaaagcggctccatactggatcacagcccctcaaaatcttgtgctgtccccaggagaggatgggaccttgatctgcagagctaatggcaaccccaaacccagaattagctggttaacaaatggagtcccaatagaaattgcccctgatgaccccagcagaaaaatagatggcgataccattattttttcaaatgttcaagaaagatcaagtgcagtctatcagtgcaatgcctctaatgaat

SEQ ID NO: 14096 - DNA, 615 bp, Homo sapiens
  source 1..615: mol_type = unassigned DNA
ctaccccaattatttactgggcaaaggaagatggaatgctacccaaaaacaggacagtttataagaactttgagaaaaccttgcagatcattcatgtttcagaagcagactctggaaattaccaatgtatagcaaaaaacgcattaggagccatccaccataccatttctgttagagttaaagcggctccatactggatcacagcccctcaaaatcttgtgctgtccccaggagaggatgggaccttgatctgcagagctaatggcaaccccaaacccagaattagctggttaacaaatggagtcccaatagaaagtaagttgccttgagtggttctaattgcagtatattttcagagcatatatacatcccgacagtgaataaatggtgataaaaaaataactcaggttaaggaaggaagccacatgtatgttaaacacaggcaccaaattacctttgcattttattaccattagatatttattatgaatgtgaatagtttatgctgttaacataatggcatgtgatgactggtacttggcaatatttcgtctgctttttacatggataatgggaagaatgacagggtcagaaataaatatcacttcaaagttt

SEQ ID NO: 14097 - DNA, 595 bp, Homo sapiens
  source 1..595: mol_type = unassigned DNA
actttgtttaaaatttccctttgctactgggaggaaatggaaagcagtaagataacttcatttgtaagagcaatgctaagaagacgtttggtttaaagaattaaaaggaagaacaacttaagagcttcttcaaagtttcccgcatgaaaattacttaaacgttgcacacaacgtttcacaaaatcttttgtgaaagaagaaaaggaaattcagtgtgtgagtctcagcaggagttaagctaatgcagcttaaaataatgccgaaaaagaagcgcttatctgcgggcagagtgcccctgattctcttcctgtgccagatgattagtgcactggaagtacctcttgatccaaaacttcttgaagacttggtacagcctccaaccatcacccaacagtctccaaaagattacattattgaccctcgggagaatattgtaatccagtgtgaagccaaagggaaaccgcccccaagcttttcctggacccgtaatgggactcattttgacatcgataaagaccctctggtcaccatgaagcctggcacaggaacgctcataattaacatcatgagcgaagggaaagctgagacctatgaa

SEQ ID NO: 14098 - DNA, 583 bp, Homo sapiens
  source 1..583: mol_type = unassigned DNA
atttgcaaaggaaacattgaggctgacgagaggagagttggagactgcagaacttgggagctgtccactgctctgcctttgtcacagcccagagcaatgctaagaagacgtttggtttaaagaattaaaaggaagaacaacttaagagcttcttcaaagtttcccgcatgaaaattacttaaacgttgcacacaacgtttcacaaaatcttttgtgaaagaagaaaaggaaattcagtgtgtgagtctcagcaggagttaagctaatgcagcttaaaataatgccgaaaaagaagcgcttatctgcgggcagagtgcccctgattctcttcctgtgccagatgattagtgcactggaagtacctcttgatctggtacagcctccaaccatcacccaacagtctccaaaagattacattattgaccctcgggagaatattgtaatccagtgtgaagccaaagggaaaccgcccccaagcttttcctggacccgtaatgggactcattttgacatcgataaagaccctctggtcaccatgaagcctggcacaggaacgctcataattaacatcatgagcgaaggg

SEQ ID NO: 14099 - DNA, 726 bp, Homo sapiens
  source 1..726: mol_type = unassigned DNA
attgtattgccacaaagccaggctgatcaccctgggaggcctgggaggtctgagcagctttggattggctgtcaggagcaggactttaacattttactgcacatgggccagccacagcagggttcaattgccagtgcttttatctgcagaaatgtgctgggatgggcactttgtttaaaatttccctttgctactgggaggaaatggaaagcagtaagataacttcatttgtaagagcaatgctaagaagacgtttggtttaaagaattaaaaggaagaacaacttaagagcttcttcaaagtttcccgcatgaaaattacttaaacgttgcacacaacgtttcacaaaatcttttgtgaaagaagaaaaggaaattcagtgtgtgagtctcagcaggagttaagctaatgcagcttaaaataatgccgaaaaagaagcgcttatctgcgggcagagtgcccctgattctcttcctgtgccagatgattagtgcactggaagtacctcttgatctggtacagcctccaaccatcacccaacagtctccaaaagattacattattgaccctcgggagaatattgtaatccagtgtgaagccaaagggaaaccgcccccaagcttttcctggacccgtaatgggactcattttgacatcgataaagaccctctggtcaccatgaagcctggcacaggaacgctcataattaacatcatgagcgaaggg

SEQ ID NO: 14100 - DNA, 562 bp, Homo sapiens
  source 1..562: mol_type = unassigned DNA
acacgcgctcgcaggctgacggaggttggcggtggggcggccgctcaggaatctttgtgacattctctctcagcattctttatcccctgtttgctgaagacttcgacaaaagctggtcttagctgttggcattctcctgagaaaaggatagcttcagaaatcagaaaaacatttgggaggtgtctagcccagtggaccttctgaagagcaatgctaagaagacgtttggtttaaagaattaaaaggaagaacaacttaagagcttcttcaaagtttcccgcatgaaaattacttaaacgttgcacacaacgtttcacaaaatcttttgtgaaagaagaaaaggaaattcagtgtgtgagtctcagcaggagttaagctaatgcagcttaaaataatgccgaaaaagaagcgcttatctgcgggcagagtgcccctgattctcttcctgtgccagatgattagtgcactggaagtacctcttgatccaaaacttcttgaagacttggtacagcctccaaccatcacccaacagtctccaaaagattacattattgaccctcgg

SEQ ID NO: 14101 - DNA, 6685 bp, Homo sapiens
  source 1..6685: mol_type = unassigned DNA
agtccgagcctcagacgcgcgggcgcgggggacggcgcaggggccgcctggctggagcagccagaggggatagcttcgtcgagaacggaggacaccggcggtccagggtcctgggcagtcgcgccagagctgagcggagggcgcggcgcgagaacgaatctttgtgacattctctctcagcattctttatcccctgtttgctgaagacttcgacaaaagctggtcttagctgttggcattctcctgagaaaaggatagcttcagaaatcagaaaaacatttgggaggtgtctagcccagtggaccttctgaagagcaatgctaagaagacgtttggtttaaagaattaaaaggaagaacaacttaagagcttcttcaaagtttcccgcatgaaaattacttaaacgttgcacacaacgtttcacaaaatcttttgtgaaagaagaaaaggaaattcagtgtgtgagtctcagcaggagttaagctaatgcagcttaaaataatgccgaaaaagaagcgcttatctgcgggcagagtgcccctgattctcttcctgtgccagatgattagtgcactggaagtacctcttgatccaaaacttcttgaagacttggtacagcctccaaccatcacccaacagtctccaaaagattacattattgaccctcgggagaatattgtaatccagtgtgaagccaaagggaaaccgcccccaagcttttcctggacccgtaatgggactcattttgacatcgataaagaccctctggtcaccatgaagcctggcacaggaacgctcataattaacatcatgagcgaagggaaagctgagacctatgaaggagtctatcagtgtacagcaaggaacgaacgcggagctgcagtttctaataacattgttgtccgcccatccagatcaccattgtggaccaaagaaaaacttgaaccaatcacacttcaaagtggtcagtctttagtacttccctgcagacccccaattggattaccaccacctataatattttggatggataattcctttcaaagacttccacaaagtgagagagtttctcaaggtttgaatggggacctttatttttccaatgtcctcccagaggacacccgcgaagactatatctgttatgctagatttaatcatactcaaaccatacagcagaagcaacctatttctgtgaaggtgatttcagtggatgaattgaatgacactatagctgctaatttgagtgacactgagttttatggtgctaaatcaagtagagagaggccaccaacatttttaactccagaaggcaatgcaagtaacaaagaggaattaagaggaaatgtgctttcactggagtgcattgcagaaggactgcctaccccaattatttactgggcaaaggaagatggaatgctacccaaaaacaggacagtttataagaactttgagaaaaccttgcagatcattcatgtttcagaagcagactctggaaattaccaatgtatagcaaaaaacgcattaggagccatccaccataccatttctgttagagttaaagcggctccatactggatcacagcccctcaaaatcttgtgctgtccccaggagaggatgggaccttgatctgcagagctaatggcaaccccaaacccagaattagctggttaacaaatggagtcccaatagaaattgcccctgatgaccccagcagaaaaatagatggcgataccattattttttcaaatgttcaagaaagatcaagtgcagtctatcagtgcaatgcctctaatgaatatggatatttactggcaaacgcatttgtaaatgtgctggctgagccaccacgaatcctcacacctgcaaacacactctaccaggtcattgcaaacaggcctgctttactagactgtgccttctttgggtctcctctcccaaccatcgagtggtttaaaggagctaaaggaagtgctcttcatgaagatatttatgttttacatgaaaatggaactttggaaattcctgtggcccaaaaggacagtacaggaacttatacgtgtgttgcaaggaataaattagggatggcgaagaatgaagttcacttagaaatcaaagatcctacatggatcgttaaacagcccgaatatgcagttgtgcaaagagggagcatggtgtcctttgaatgcaaagtgaaacatgatcacaccttatccctcactgtcctgtggctgaaggacaacagggaactgcccagtgatgaaaggttcactgttgacaaggatcatctagtggtagctgatgtcagtgacgatgacagcgggacctacacgtgtgtggccaacaccactctggacagcgtctccgccagcgctgtgcttagcgttgttgctcctactccaactccagctcccgtttacgatgtcccaaatcctccctttgacttagaactgacagatcaacttgacaaaagtgttcagctgtcatggaccccaggcgatgacaacaatagccccattacaaaattcatcatcgaatatgaagatgcaatgcacaagccagggctgtggcaccaccaaactgaagtttctggaacacagaccacagcccagctgaagctgtctccttacgtgaactactccttccgcgtgatggcagtgaacagcattgggaagagcttgcccagcgaggcgtctgagcagtatttgacgaaagcctcagaaccagataaaaaccccacagctgtggaaggactgggatcagagcctgataatttggtgattacgtggaagcccttgaatggtttcgaatctaatgggccaggccttcagtacaaagttagctggcgccagaaagatggtgatgatgaatggacatctgtggttgtggcaaatgtatccaaatatattgtctcaggcacgccaacctttgttccatacctgatcaaagttcaggccctgaatgacatggggtttgcccccgagccagctgtagtcatgggacattctggagaagacctcccaatggtggctcctgggaacgtgcgtgtgaatgtggtgaacagtaccttagccgaggtgcactgggacccagtacctctgaaaagcatccgaggacacctacaaggctatcggatttactattggaagacccagagttcatctaaaagaaacagacgtcacattgagaaaaagatcctcaccttccaaggcagcaagactcatggcatgttgccggggctagagccctttagccactacacactgaatgtccgagtggtcaatgggaaaggggagggcccagccagccctgacagagtctttaatactccagaaggagtccccagtgctccctcgtctttgaagattgtgaatccaacactggactctctcactttggaatgggatccaccgagccacccgaatggcattttgacagagtacaccttaaagtatcagccaattaacagcacacatgaattaggccctctggtagatttgaaaattcctgccaacaagacacggtggactttaaaaaatttaaatttcagcactcgatataagttttatttctatgcacaaacatcagcaggatcaggaagtcaaattacagaggaagcagtaacaactgtggatgaagctggtattcttccacctgatgtaggtgcaggcaaagttcaagcagtaaatcccaggatcagcaatcttactgctgcagctgctgagacctatgccaatatcagttgggaatatgagggaccagagcatgtgaacttttatgttgaatatggtgtagcaggcagcaaagaagaatggagaaaagaaattgtaaatggttctcggagcttctttgggttaaagggtctaatgccaggaacagcatacaaagttcgagttggtgctgtgggggactctggttttgtgagttcagaggatgtgtttgagacaggcccagcgatggcaagccggcaggtggatattgcaactcagggctggttcattggtctgatgtgtgctgttgctctccttatcttaattttgctgattgtttgcttcatcagaagaaacaagggtggtaaatatccagttaaagaaaaggaagatgcccatgctgaccctgaaatccagcctatgaaggaagatgatgggacatttggagaatacagtgatgcagaagaccacaagcctttgaaaaaaggaagtcgaactccttcagacaggactgtgaaaaaagaagatagtgacgacagcctagttgactatggagaaggggttaatggccagttcaatgaggatggctcctttattggacaatacagtggtaagaaagagaaagagccggctgaaggaaacgaaagctcagaggcaccttctcctgtcaacgccatgaattcctttgtttaatttttaagctctttgccaatattccatttctctagaatgtttatcctaagcacttgtttgtcagccctctcatactatgaacatatgggtagagagtatattttctgctgtatgttagtattatgagaatagttacagcaaaaacataactcagtcaaatgatatgttaatatgaactggaatgcaaagtgcatactttttcattcaaaatgggtattcttgatttcctcagaactgataaaaaataatgcaacatcaccaacagatcctgttatttcctctgcaggatacagttcaatatgatgcatgaaaaatgctccacatttaaaggacatacccgtgtatgttatgaaaacatggtttgatactttgtttatactaccctcagctgaacccctatatatgaattccgttttcattgtcaagaatgttactgtagtattctctagaacttcaatgtctttgtggacattgttgtgaaattggtgactatgtatagctgtcgttagtctttttgggagactgttaggaacagtttgtacagtatatacttgctaaatgagttcattatgacagtcacattgctgatgcttactgagaactattacctactcttggctcctgttactccgtaggcttcttaatcttccaggcattacagcagcacagtgttctactttttacatcatttctatgttcggttgtttttaggcataaacaatgtgtattgcagtgcatttcggcatttgtgccatactgaaagaatcaaaaacaaatcatccaaattaaatttcaaacattatttcagagaacacagggcaagacacatacagtgccttcagatattaagcattccacaacatcgtgcattctgtatcagctggtccagtccattctgggtcctagattactgtcattgtctaaaagtaacttttaaaaagcagagttcatgaaaactgcaatgctgggaaaagaaggaaacatgaaaataaaaataagacagtttattagaaatagcatttcctcataagcataaaaagaaaatctttgttgccaactgaagcacatgatgattttgtggtcctttatggtttctattacattcagtaagaaagatgtcaacatgctagaaaattaattttaaaactaagttattccaacactaaaagcatacaacagcatgccaacagtaatatattattctccaagactttacctatgtaagtgttcaaaactctgcagcattaaacaacgtgtatgcaaattgttatggatacatttcagaatctaagaaatcaggcaagtgcttaaaaggccaacggtccaagggattacatctgcagtttaaaaagtaaatatatattctatcgtattcataaacaatatctatcaaatgggttacctccaaatatgaaaatctataacaacctatggttgaaggaatgctcagtttcatttgccaataaattggtttctcataacttgcatcaagtttaattttaagtaaagctttttatatgtagatattttgttgaatttgtaaatacacttaaaatgtagatgctatatgcttataggtgttacatacaaataaacatgcaatgtttatgttgtactgtataagaggtaagctaattaatgcagtgaatgggattggaaagcatctacttaaatatctattgggttcccccctccccccaccttttttgctgtgaaactgaaatagtgaacttttctacgtattgacagcagatttttcgatgaaatcttcagagctttgcctatggggcacagtaggcctagtaacctggcatgtttgatatatgtaggtaaagcataatttaaagtaatcccaggtaaagatggccctaaatactttcatgtctctatattcatttttcacagatccacctgtctcttgaaaatataaaaagacaaaacaggtttgccttggcatcagagagcacaaagattaaaagttactttaaatttgccaatattttgggagaacaataaaactacattttttcctcttccatactggtagatgcgaaatttatctgtgcatgaaagggtcacttctgtaatagtgcaacagatttggtattaaaaattaaatgtggttttaaaagttcctctctcttttgtaatttatgttcccaattgagtgtgaatgtccaagtaatggtgtatgtaatggtacaggcaaatgtgactggatttccctcaaaaaagtaactattaaacagtcttgatctctttgtgacttttaactttttcaaac

SEQ ID NO: 14102 - DNA, 6406 bp, Homo sapiens
  source 1..6406: mol_type = unassigned DNA
agtccgagcctcagacgcgcgggcgcgggggacggcgcaggggccgcctggctggagcagccagaggggatagcttcgtcgagaacggaggacaccggcggtccagggtcctgggcagtcgcgccagagctgagcggagggcgcggcgcgagaacgaatctttgtgacattctctctcagcattctttatcccctgtttgctgaagacttcgacaaaagctggtcttagctgttggcattctcctgagaaaaggatagcttcagaaatcagaaaaacatttgggaggtgtctagcccagtggaccttctgaagagcaatgctaagaagacgtttggtttaaagaattaaaaggaagaacaacttaagagcttcttcaaagtttcccgcatgaaaattacttaaacgttgcacacaacgtttcacaaaatcttttgtgaaagaagaaaaggaaattcagtgtgtgagtctcagcaggagttaagctaatgcagcttaaaataatgccgaaaaagaagcgcttatctgcgggcagagtgcccctgattctcttcctgtgccagatgattagtgcactggaagtacctcttgatccaaaacttcttgaagacttggtacagcctccaaccatcacccaacagtctccaaaagattacattattgaccctcgggagaatattgtaatccagtgtgaagccaaagggaaaccgcccccaagcttttcctggacccgtaatgggactcattttgacatcgataaagaccctctggtcaccatgaagcctggcacaggaacgctcataattaacatcatgagcgaagggaaagctgagacctatgaaggagtctatcagtgtacagcaaggaacgaacgcggagctgcagtttctaataacattgttgtccgcccatccagatcaccattgtggaccaaagaaaaacttgaaccaatcacacttcaaagtggtcagtctttagtacttccctgcagacccccaattggattaccaccacctataatattttggatggataattcctttcaaagacttccacaaagtgagagagtttctcaaggtttgaatggggacctttatttttccaatgtcctcccagaggacacccgcgaagactatatctgttatgctagatttaatcatactcaaaccatacagcagaagcaacctatttctgtgaaggtgatttcagtggatgaattgaatgacactatagctgctaatttgagtgacactgagttttatggtgctaaatcaagtagagagaggccaccaacatttttaactccagaaggcaatgcaagtaacaaagaggaattaagaggaaatgtgctttcactggagtgcattgcagaaggactgcctaccccaattatttactgggcaaaggaagatggaatgctacccaaaaacaggacagtttataagaactttgagaaaaccttgcagatcattcatgtttcagaagcagactctggaaattaccaatgtatagcaaaaaacgcattaggagccatccaccataccatttctgttagagttaaagcggctccatactggatcacagcccctcaaaatcttgtgctgtccccaggagaggatgggaccttgatctgcagagctaatggcaaccccaaacccagaattagctggttaacaaatggagtcccaatagaaattgcccctgatgaccccagcagaaaaatagatggcgataccattattttttcaaatgttcaagaaagatcaagtgcagtctatcagtgcaatgcctctaatgaatatggatatttactggcaaacgcatttgtaaatgtgctggctgagccaccacgaatcctcacacctgcaaacacactctaccaggtcattgcaaacaggcctgctttactagactgtgccttctttgggtctcctctcccaaccatcgagtggtttaaaggagctaaaggaagtgctcttcatgaagatatttatgttttacatgaaaatggaactttggaaattcctgtggcccaaaaggacagtacaggaacttatacgtgtgttgcaaggaataaattagggatggcgaagaatgaagttcacttagaaatcaaagatcctacatggatcgttaaacagcccgaatatgcagttgtgcaaagagggagcatggtgtcctttgaatgcaaagtgaaacatgatcacaccttatccctcactgtcctgtggctgaaggacaacagggaactgcccagtgatgaaaggttcactgttgacaaggatcatctagtggtagctgatgtcagtgacgatgacagcgggacctacacgtgtgtggccaacaccactctggacagcgtctccgccagcgctgtgcttagcgttgttgctcctactccaactccagctcccgtttacgatgtcccaaatcctccctttgacttagaactgacagatcaacttgacaaaagtgttcagctgtcatggaccccaggcgatgacaacaatagccccattacaaaattcatcatcgaatatgaagatgcaatgcacaagccagggctgtggcaccaccaaactgaagtttctggaacacagaccacagcccagctgaagctgtctccttacgtgaactactccttccgcgtgatggcagtgaacagcattgggaagagcttgcccagcgaggcgtctgagcagtatttgacgaaagcctcagaaccagataaaaaccccacagctgtggaaggactgggatcagagcctgataatttggtgattacgtggaagcccttgaatggtttcgaatctaatgggccaggccttcagtacaaagttagctggcgccagaaagatggtgatgatgaatggacatctgtggttgtggcaaatgtatccaaatatattgtctcaggcacgccaacctttgttccatacctgatcaaagttcaggccctgaatgacatggggtttgcccccgagccagctgtagtcatgggacattctggagaagacctcccaatggtggctcctgggaacgtgcgtgtgaatgtggtgaacagtaccttagccgaggtgcactgggacccagtacctctgaaaagcatccgaggacacctacaaggctatcggatttactattggaagacccagagttcatctaaaagaaacagacgtcacattgagaaaaagatcctcaccttccaaggcagcaagactcatggcatgttgccggggctagagccctttagccactacacactgaatgtccgagtggtcaatgggaaaggggagggcccagccagccctgacagagtctttaatactccagaaggagtccccagtgctccctcgtctttgaagattgtgaatccaacactggactctctcactttggaatgggatccaccgagccacccgaatggcattttgacagagtacaccttaaagtatcagccaattaacagcacacatgaattaggccctctggtagatttgaaaattcctgccaacaagacacggtggactttaaaaaatttaaatttcagcactcgatataagttttatttctatgcacaaacatcagcaggatcaggaagtcaaattacagaggaagcagtaacaactgtggatgaagctggtattcttccacctgatgtaggtgcaggcaaagcgatggcaagccggcaggtggatattgcaactcagggctggttcattggtctgatgtgtgctgttgctctccttatcttaattttgctgattgtttgcttcatcagaagaaacaagggtggtaaatatccagttaaagaaaaggaagatgcccatgctgaccctgaaatccagcctatgaaggaagatgatgggacatttggagaatacagtgatgcagaagaccacaagcctttgaaaaaaggaagtcgaactccttcagacaggactgtgaaaaaagaagatagtgacgacagcctagttgactatggagaaggggttaatggccagttcaatgaggatggctcctttattggacaatacagtggtaagaaagagaaagagccggctgaaggaaacgaaagctcagaggcaccttctcctgtcaacgccatgaattcctttgtttaatttttaagctctttgccaatattccatttctctagaatgtttatcctaagcacttgtttgtcagccctctcatactatgaacatatgggtagagagtatattttctgctgtatgttagtattatgagaatagttacagcaaaaacataactcagtcaaatgatatgttaatatgaactggaatgcaaagtgcatactttttcattcaaaatgggtattcttgatttcctcagaactgataaaaaataatgcaacatcaccaacagatcctgttatttcctctgcaggatacagttcaatatgatgcatgaaaaatgctccacatttaaaggacatacccgtgtatgttatgaaaacatggtttgatactttgtttatactaccctcagctgaacccctatatatgaattccgttttcattgtcaagaatgttactgtagtattctctagaacttcaatgtctttgtggacattgttgtgaaattggtgactatgtatagctgtcgttagtctttttgggagactgttaggaacagtttgtacagtatatacttgctaaatgagttcattatgacagtcacattgctgatgcttactgagaactattacctactcttggctcctgttactccgtaggcttcttaatcttccaggcattacagcagcacagtgttctactttttacatcatttctatgttcggttgtttttaggcataaacaatgtgtattgcagtgcatttcggcatttgtgccatactgaaagaatcaaaaacaaatcatccaaattaaatttcaaacattatttcagagaacacagggcaagacacatacagtgccttcagatattaagcattccacaacatcgtgcattctgtatcagctggtccagtccattctgggtcctagattactgtcattgtctaaaagtaacttttaaaaagcagagttcatgaaaactgcaatgctgggaaaagaaggaaacatgaaaataaaaataagacagtttattagaaatagcatttcctcataagcataaaaagaaaatctttgttgccaactgaagcacatgatgattttgtggtcctttatggtttctattacattcagtaagaaagatgtcaacatgctagaaaattaattttaaaactaagttattccaacactaaaagcatacaacagcatgccaacagtaatatattattctccaagactttacctatgtaagtgttcaaaactctgcagcattaaacaacgtgtatgcaaattgttatggatacatttcagaatctaagaaatcaggcaagtgcttaaaaggccaacggtccaagggattacatctgcagtttaaaaagtaaatatatattctatcgtattcataaacaatatctatcaaatgggttacctccaaatatgaaaatctataacaacctatggttgaaggaatgctcagtttcatttgccaataaattggtttctcataacttgcatcaagtttaattttaagtaaagctttttatatgtagatattttgttgaatttgtaaatacacttaaaatgtagatgctatatgcttataggtgttacatacaaataaacatgcaatgtttatgttgtactgtataagaggtaagctaattaatgcagtgaatgggattggaaagcatctacttaaatatctattgggttcccccctccccccaccttttttgctgtgaaactgaaatagtgaacttttctacgtattgacagcagatttttcgatgaaatcttcagagctttgcctatggggcacagtaggcctagtaacctggcatgtttgatatatgtaggtaaagcataatttaaagtaatcccaggtaaagatggccctaaatactttcatgtctctatattcatttttcacagatccacctgtctcttgaaaatataaaaagacaaaacaggtttgccttggcatcagagagcacaaagattaaaagttactttaaatttgccaatattttgggagaacaataaaactacattttttcctcttccatactggtagatgcgaaatttatctgtgcatgaaagggtcacttctgtaatagtgcaacagatttggtattaaaaattaaatgtggttttaaaagttcctctctcttttgtaatttatgttcccaattgagtgtgaatgtccaagtaatggtgtatgtaatggtacaggcaaatgtgactggatttccctcaaaaaagtaactattaaacagtcttgatctctttgtgacttttaactttttcaaac

SEQ ID NO: 14103 - DNA, 3900 bp, Homo sapiens
  source 1..3900: mol_type = unassigned DNA
atgccgaaaaagaagcgcttatctgcgggcagagtgcccctgattctcttcctgtgccagatgattagtgcactggaagtacctcttgatccaaaacttcttgaagacttggtacagcctccaaccatcacccaacagtctccaaaagattacattattgaccctcgggagaatattgtaatccagtgtgaagccaaagggaaaccgcccccaagcttttcctggacccgtaatgggactcattttgacatcgataaagaccctctggtcaccatgaagcctggcacaggaacgctcataattaacatcatgagcgaagggaaagctgagacctatgaaggagtctatcagtgtacagcaaggaacgaacgcggagctgcagtttctaataacattgttgtccgcccatccagatcaccattgtggaccaaagaaaaacttgaaccaatcacacttcaaagtggtcagtctttagtacttccctgcagacccccaattggattaccaccacctataatattttggatggataattcctttcaaagacttccacaaagtgagagagtttctcaaggtttgaatggggacctttatttttccaatgtcctcccagaggacacccgcgaagactatatctgttatgctagatttaatcatactcaaaccatacagcagaagcaacctatttctgtgaaggtgatttcagtggatgaattgaatgacactatagctgctaatttgagtgacactgagttttatggtgctaaatcaagtagagagaggccaccaacatttttaactccagaaggcaatgcaagtaacaaagaggaattaagaggaaatgtgctttcactggagtgcattgcagaaggactgcctaccccaattatttactgggcaaaggaagatggaatgctacccaaaaacaggacagtttataagaactttgagaaaaccttgcagatcattcatgtttcagaagcagactctggaaattaccaatgtatagcaaaaaacgcattaggagccatccaccataccatttctgttagagttaaagcggctccatactggatcacagcccctcaaaatcttgtgctgtccccaggagaggatgggaccttgatctgcagagctaatggcaaccccaaacccagaattagctggttaacaaatggagtcccaatagaaattgcccctgatgaccccagcagaaaaatagatggcgataccattattttttcaaatgttcaagaaagatcaagtgcagtctatcagtgcaatgcctctaatgaatatggatatttactggcaaacgcatttgtaaatgtgctggctgagccaccacgaatcctcacacctgcaaacacactctaccaggtcattgcaaacaggcctgctttactagactgtgccttctttgggtctcctctcccaaccatcgagtggtttaaaggagctaaaggaagtgctcttcatgaagatatttatgttttacatgaaaatggaactttggaaattcctgtggcccaaaaggacagtacaggaacttatacgtgtgttgcaaggaataaattagggatggcgaagaatgaagttcacttagaaatcaaagatcctacatggatcgttaaacagcccgaatatgcagttgtgcaaagagggagcatggtgtcctttgaatgcaaagtgaaacatgatcacaccttatccctcactgtcctgtggctgaaggacaacagggaactgcccagtgatgaaaggttcactgttgacaaggatcatctagtggtagctgatgtcagtgacgatgacagcgggacctacacgtgtgtggccaacaccactctggacagcgtctccgccagcgctgtgcttagcgttgttgctcctactccaactccagctcccgtttacgatgtcccaaatcctccctttgacttagaactgacagatcaacttgacaaaagtgttcagctgtcatggaccccaggcgatgacaacaatagccccattacaagaattcatcatgaatatgaagatgcaatgcacaagccagggctgtggcaccaccaaactgaagtttctggaacacagaccacagcccagctgaagctgtctccttacgtgaactactccttccgcgtgatggcagtgaacagcattgggaagagcttgcccagcgaggcgtctgagcagtatttgacgaaagcctcagaaccagataaaaaccccacagctgtggaaggactgggatcagagcctgataatttggtgattacgtggaagcccttgaatggtttcgaatctaatgggccaggccttcagtacaaagttagctggcgccagaaagatggtgatgatgaatggacatctgtggttgtggcaaatgtatccaaatatattgtctcaggcacgccaacctttgttccatacctgatcaaagttcaggccctgaatgacatggggtttgcccccgagccagctgtagtcatgggacattctggagaagacctcccaatggtggctcctgggaacgtgcgtgtgaatgtggtgaacagtaccttagccgaggtgcactgggacccagtacctctgaaaagcatccgaggacacctacaaggctatcggatttactattggaagacccagagttcatctaaaagaaacagacgtcacattgagaaaaagatcctcaccttccaaggcagcaagactcatggcatgttgccggggctagagccctttagccactacacactgaatgtccgagtggtcaatgggaaaggggagggcccagccagccctgacagagtctttaatactccagaaggagtccccagtgctccctcgtctttgaagattgtgaatccaacactggactctctcactttggaatgggatccaccgagccacccgaatggcattttgacagagtacaccttaaagtatcagccaattaacagcacacatgaattaggccctctggtagatttgaaaattcctgccaacaagacacggtggactttaaaaaatttaaatttcagcactcgatataagttttatttctatgcacaaacatcagcaggatcaggaagtcaaattacagaggaagcagtaacaactgtggatgaagctggtattcttccacctgatgtaggtgcaggcaaagttcaagcagtaaatcccaggatcagcaatcttactgctgcagctgctgagacctatgccaatatcagttgggaatatgagggaccagagcatgtgaacttttatgttgaatatggtgtagcaggcagcaaagaagaatggagaaaagaaattgtaaatggttctcggagcttctttgggttaaagggtctaatgccaggaacagcatacaaagttcgagttggtgctgtgggggactctggttttgtgagttcagaggatgtgtttgagacaggcccagcgatggcaagccggcaggtggatattgcaactcagggctggttcattggtctgatgtgtgctgttgctctccttatcttaattttgctgattgtttgcttcatcagaagaaacaagggtggtaaatatccagttaaagaaaaggaagatgcccatgctgaccctgaaatccagcctatgaaggaagatgatgggacatttggagaatacagtgatgcagaagaccacaagcctttgaaaaaaggaagtcgaactccttcagacaggactgtgaaaaaagaagatagtgacgacagcctagttgactatggagaaggggttaatggccagttcaatgaggatggctcctttattggacaatacagtggtaagaaagagaaagagccggctgaaggaaacgaaagctcagaggcaccttctcctgtcaacgccatgaattcctttgtttaa

SEQ ID NO: 14104 - DNA, 3025 bp, Homo sapiens
  source 1..3025: mol_type = unassigned DNA
agacgcgcgggcgcgggggacggcgcaggggccgcctggctggagcagccagaggggatagcttcgtcgagaacggaggacaccggcggtccagggtcctgggcagtcgcgccagagctgagcggagggcgcggcgcgagaacgaatctttgtgacattctctctcagcattctttatcccctgtttgctgaagacttcgacaaaagctggtcttagctgttggcattctcctgagaaaaggatagcttcagaaatcagaaaaacatttgggaggtgtctagcccagtggaccttctgaagagcaatgctaagaagacgtttggtttaaagaattaaaaggaagaacaacttaagagcttcttcaaagtttcccgcatgaaaattacttaaacgttgcacacaacgtttcacaaaatcttttgtgaaagaagaaaaggaaattcagtgtgtgagtctcagcaggagttaagctaatgcagcttaaaataatgccgaaaaagaagcgcttatctgcgggcagagtgcccctgattctcttcctgtgccagatgattagtgcactggaagtacctcttgatctggtacagcctccaaccatcacccaacagtctccaaaagattacattattgaccctcgggagaatattgtaatccagtgtgaagccaaagggaaaccgcccccaagcttttcctggacccgtaatgggactcattttgacatcgataaagaccctctggtcaccatgaagcctggcacaggaacgctcataattaacatcatgagcgaagggaaagctgagacctatgaaggagtctatcagtgtacagcaaggaacgaacgcggagctgcagtttctaataacattgttgtccgcccatccagatcaccattgtggaccaaagaaaaacttgaaccaatcacacttcaaagtggtcagtctttagtacttccctgcagacccccaattggattaccaccacctataatattttggatggataattcctttcaaagacttccacaaagtgagagagtttctcaaggtttgaatggggacctttatttttccaatgtcctcccagaggacacccgcgaagactatatctgttatgctagatttaatcatactcaaaccatacagcagaagcaacctatttctgtgaaggtgatttcagtggatgaattgaatgacactatagctgctaatttgagtgacactgagttttatggtgctaaatcaagtagagagaggccaccaacatttttaactccagaaggcaatgcaagtaacaaagaggaattaagaggaaatgtgctttcactggagtgcattgcagaaggactgcctaccccaattatttactgggcaaaggaagatggaatgctacccaaaaacaggacagtttataagaactttgagaaaaccttgcagatcattcatgtttcagaagcagactctggaaattaccaatgtatagcaaaaaacgcattaggagccatccaccataccatttctgttagagttaaagcggctccatactggatcacagcccctcaaaatcttgtgctgtccccaggagaggatgggaccttgatctgcagagctaatggcaaccccaaacccagaattagctggttaacaaatggagtcccaatagaaattgcccctgatgaccccagcagaaaaatagatggcgataccattattttttcaaatgttcaagaaagatcaagtgcagtctatcagtgcaatgcctctaatgaatatggatatttactggcaaacgcatttgtaaatgtgctggctgagccaccacgaatcctcacacctgcaaacacactctaccaggtcattgcaaacaggcctgctttactagactgtgccttctttgggtctcctctcccaaccatcgagtggtttaaaggagctaaaggaagtgctcttcatgaagatatttatgttttacatgaaaatggaactttggaaattcctgtggcccaaaaggacagtacaggaacttatacgtgtgttgcaaggaataaattagggatggcgaagaatgaagttcacttagaaatcaaagatcctacatggatcgttaaacagcccgaatatgcagttgtgcaaagagggagcatggtgtcctttgaatgcaaagtgaaacatgatcacaccttatccctcactgtcctgtggctgaaggacaacagggaactgcccagtgatgaaaggttcactgttgacaaggatcatctagtggtagctgatgtcagtgacgatgacagcgggacctacacgtgtgtggccaacaccactctggacagcgtctccgccagcgctgtgcttagcgttgttgatgtcccaaatcctccctttgacttagaactgacagatcaacttgacaaaagtgttcagctgtcatggaccccaggcgatgacaacaatagccccattacaaaattcatcatcgaatatgaagatgcaatgcacaagccagggctgtggcaccaccaaactgaagtttctggaacacagaccacagcccagctgaagctgtctccttacgtgaactactccttccgcgtgatggcagtgaacagcattgggaagagcttgcccagcgaggcgtctgagcagtatttgacgaaagcctcagaaccagataaaaaccccacagctgtggaaggactgggatcagagcctgataatttggtgattacgtggaagcccttgaatggtttcgaatctaatgggccaggccttcagacaagtactgcctctttttaaaatattaggtttgagtccatctaaaggcaaagtcattatgtgttttgagaggatggttttattaaatataaatgtaaatgacaagagagaaaaaggaagagaataactaaatgggtgcctgtcacaggtttgtactaatgtattttcagctgaatcaggaatgagttactgaaactcaaaaccttgaatcgtgcgagcacggtgaaatgtcaatttaatacatgttgaaacattc

SEQ ID NO: 14105 - DNA, 2835 bp, Homo sapiens
  source 1..2835: mol_type = unassigned DNA
gaaaccgtttctacatggctggctctaagccagatgatatttcatagtgcaaagagggatagaacctcactggtggccaaatgtgattatatgctataaccctgtgcccctactctgacacccacccccaagcagttaccctctgttggaagcctgcagctttctttgtttgtttctttaattatacagacagtaggatctgcatccttactagcatatagaaaaatcagagaaacaatgcaaccaagagtgctgttttcatttgtttcttctgcatccttttaatggaattttgtaggtctcttgaaagtgatgcagaagaccacaagcctttgaaaaaaggaagtcgaactccttcagacaggactgtgaaaaaagaagatagtgacgacagcctagttgactatggagaaggggttaatggccagttcaatgaggatggctcctttattggacaatacagtggtaagaaagagaaagagccggctgaaggaaacgaaagctcagaggcaccttctcctgtcaacgccatgaattcctttgtttaatttttaagctctttgccaatattccatttctctagaatgtttatcctaagcacttgtttgtcagccctctcatactatgaacatatgggtagagagtatattttctgctgtatgttagtattatgagaatagttacagcaaaaacataactcagtcaaatgatatgttaatatgaactggaatgcaaagtgcatactttttcattcaaaatgggtattcttgatttcctcagaactgataaaaaataatgcaacatcaccaacagatcctgttatttcctctgcaggatacagttcaatatgatgcatgaaaaatgctccacatttaaaggacatacccgtgtatgttatgaaaacatggtttgatactttgtttatactaccctcagctgaacccctatatatgaattccgttttcattgtcaagaatgttactgtagtattctctagaacttcaatgtctttgtggacattgttgtgaaattggtgactatgtatagctgtcgttagtctttttgggagactgttaggaacagtttgtacagtatatacttgctaaatgagttcattatgacagtcacattgctgatgcttactgagaactattacctactcttggctcctgttactccgtaggcttcttaatcttccaggcattacagcagcacagtgttctactttttacatcatttctatgttcggttgtttttaggcataaacaatgtgtattgcagtgcatttcggcatttgtgccatactgaaagaatcaaaaacaaatcatccaaattaaatttcaaacattatttcagagaacacagggcaagacacatacagtgccttcagatattaagcattccacaacatcgtgcattctgtatcagctggtccagtccattctgggtcctagattactgtcattgtctaaaagtaacttttaaaaagcagagttcatgaaaactgcaatgctgggaaaagaaggaaacatgaaaataaaaataagacagtttattagaaatagcatttcctcataagcataaaaagaaaatctttgttgccaactgaagcacatgatgattttgtggtcctttatggtttctattacattcagtaagaaagatgtcaacatgctagaaaattaattttaaaactaagttattccaacactaaaagcatacaacagcatgccaacagtaatatattattctccaagactttacctatgtaagtgttcaaaactctgcagcattaaacaacgtgtatgcaaattgttatggatacatttcagaatctaagaaatcaggcaagtgcttaaaaggccaacggtccaagggattacatctgcagtttaaaaagtaaatatatattctatcgtattcataaacaatatctatcaaatgggttacctccaaatatgaaaatctataacaacctatggttgaaggaatgctcagtttcatttgccaataaattggtttctcataacttgcatcaagtttaattttaagtaaagctttttatatgtagatattttgttgaatttgtaaatacacttaaaatgtagatgctatatgcttataggtgttacatacaaataaacatgcaatgtttatgttgtactgtataagaggtaagctaattaatgcagtgaatgggattggaaagcatctacttaaatatctattgggttcccccctccccccaccttttttgctgtgaaactgaaatagtgaacttttctacgtattgacagcagatttttcgatgaaatcttcagagctttgcctatggggcacagtaggcctagtaacctggcatgtttgatatatgtaggtaaagcataatttaaagtaatcccaggtaaagatggccctaaatactttcatgtctctatattcatttttcacagatccacctgtctcttgaaaatataaaaagacaaaacaggtttgccttggcatcagagagcacaaagattaaaagttactttaaatttgccaatattttgggagaacaataaaactacattttttcctcttccatactggtagatgcgaaatttatctgtgcatgaaagggtcacttctgtaatagtgcaacagatttggtattaaaaattaaatgtggttttaaaagttcctctctcttttgtaatttatgttcccaattgagtgtgaatgtccaagtaatggtgtatgtaatggtacaggcaaatgtgactggatttccctcaaaaaagtaactattaaacagtcttgatctctttgtgacttttaactttttcaaacata

SEQ ID NO: 14106 - DNA, 3564 bp, Homo sapiens
  source 1..3564: mol_type = unassigned DNA
acatttgtgtttcaggtgtagagaggagagagagtgaacagggagcggggcttttgtctgttggtctccctggactgaagagagggagaatagaagcccaagactaagattctcaaaatggtttattacccagaactctttgtctgggtcagtcaagaaccatttccaaacaaggacatggagggaaggcttcctaaggaaacttctctgtcccctttcatggagtcataacaatggaagaggttcaggagaaaggaatcagctccttgcaaggtttctgatactgtccttcctgaaatgaagagctcctctaccttaacccagcctgctaagactgctacagcaagattgacagctggtcagattgctgtcctcataaaagcatggtcatcaccttcagctgggctctcaaatggaacagccgggcaatctttgtttccctgattgtaacattggaataaaggaaaatgtacaagactcatgaagagctgaaatgttcacgaatatcgagcaaaaccagagttaactaaatggactgaactcagaaagctgaagaaacctttttacttttgcttggaatattggtgatccttttttagtttttcagagccaaggaaacttattttgagctatttatggcctttaataattaagtaaggtatacactcctgtgatcaagatttggagcatgtttgtttctctctgcctggtttctctagaatttggaaactgtgagtattcttatggcaatatagttgtttgcatcagtgcagtaagactccatttttcttttgcaacaggacacagttggaaaaactggtaattttaccaaggctttgactggaagggtatgcttccctttcaggagtcaatctagatttgcagagtcaataaaagcctagtggggaaactagcctcatactatcacctacacagtccctgtacagggttactgacctgtggtcagtaaagaatgtcactaacagctctaggagcttcaagtttatcttgggaccttaagaggagaggatcacccaactcacaggtatttgaggatacaaacccatggttgggcttggctttaaaaggtcttatctgagattccttgtggaacagaattccatcaaagccaatccaaaaggcctatgtagaaataattattcttgctgcactttatgcaaataatcaggccaagtataaagctaaagtctgttttgcaaaccactcagttcctatgatgatttgttttttaataaatatgaggactggagagagagaaatcatatttgaaaacttatcatacatttgtcattaaattctaaactcactagttgtttttaagtctttgcctacattttaggtttgctcctgtgaatcaactagcaatccctggctgcagctcagaaagaacaaaaggggtgggtaatatagaaattcggatcaatattctagttctgagcaattatcctgcaaatactgccaggtgatgcacatcatgcgaaggtttcctttttgggaaaggaagaccaagggaactaaccaaagctaagcaccatgcacccaaatcctagcaagcataactatagccaccagttatctggatgtgtcacaagacatcctttcctcccccttgttggaggactcagttccacagtttcaccttagcatttggtttatgataaggagtccatacaaacacctccccactattccccaactcctccagacacatttttgtcccagactcaattccaagcttcaggtcaaagccctaggaaagaaaactggatctaagggatccagaggcaaatgacaacagaggttaaaaagcacagtgcaggtgagcatggctgattcctgtcaattaagccaaccccaagcttcctatttcatggataaaggccatgttagtatccatggcataaatgaggcctagggaatccaagaccactgacagcaggggagatagggcatatgtgggtaagagcagatgattcctaccccctaggcccccctgcttcatgggtacaagctgctttggcactcatggtgggacctgacaaggtcaccaggactcggggatgcaaggatggaagagggaaagaggatgctcttccttctttccctcatgtaccctgggtatctgctaggaagagaagggaaccaaggatgcctgctcccttctttctagatgggtagccattcatcttcagtctgttcccctttagaatgcatcctgaacccctgggacttctttgaaaaatacaccttctttttattcctttctcttcttttgttgtctcttcgccaataggtaatcatgtctccatattacaagacactcccctcagatgcaccctccaaattggaaagagttaattccccaaaccttaaactggttggcttagggctggggcccacaggaagtgaacccagacacctgatatgcagcaaaagggtaaagttttttttgccagttgggcttttggccttcctctccctgagcaaactggtaaaaggcctcagaatttttgagctgtctttacccctccccttgttttgttttgatacatgttttctaataacctggtttgtcggttcttgccttcaggccaccaaactccaaacagtcatgcaactggaacctctgacaatggccccttttgctggggacccttatatcagcctctgagagagctctgactgctgtttccccaaaacaacaccccctgtcagcaggaaggatttaagatcggtctttgtccttgtccttaatccaatggcagttagatgtacttctttagaggggagaatgagacagccaggtgggagggagtccctggagaaactccaaacagcctgcccactgaggtggagcctcaggaagttcataatgtttgcagcagggaggaacctggtccctcgccttcctgtgtggaacctgggattcaaactgccaggagggaagcactctaacagagggactctggccttgcaagagtccctgttcctcaggtttttcccttttcacccaataaaaccctactttactcaccctttaagccatctgacagcccaaattttcatggccgtgggacagagaagaaccctgtctttagctgaactaaagaaaagtcctgcaacagtttcctatccccctgtattattcaccacacttgcaatacctggtttagtgcctgtacaaagatcccatgaaggtatctgtcttctttacccttttacacttcagaacctagtatggtccttggcagacagaatgcctccaataaatatttgtgaaataaataagaatctaagcgttcctttctggagtcttacaatcattttaatttctttatcactgctttgctctggaattacttcagttatccttatttttttctagaagaaaaatgttttataatctgagaatatggaatgcttaacaaaattggattgtaccctgagtagataatgtacttcaaaagtgtattcaatggtcagtagataatgtacttcaaaagtgtattaaaaagaaatcaatgttacttctaatttgaaaaa

SEQ ID NO: 14107 - DNA, 987 bp, Homo sapiens
  source 1..987: mol_type = unassigned DNA
acatttgtgtttcaggtgtagagaggagagagagtgaacagggagcggggcttttgtctgttggtctccctggactgaagagagggagaatagaagcccaagactaagattctcaaaatggtttattacccagaactctttgtctgggtcagtcaagaaccatttccaaacaaggacatggagggaaggcttcctaaggaaacttctctgtcccctttcatggagtcataacaatggaagaggttcaggagaaaggaatcagctccttgcaaggtttctgatactgtccttcctgaaatgaagagctcctctaccttaacccagcctgctaagactgctacagcaagattgacagctggtcagattgctgtcctcataaaagcatggtcatcaccttcagctgggctctcaaatggaacagccgggcaatctttgtttccctggtcagtttgtcttcccatttccatgtcaaaattcctgtcaaacttctgaatctctcacctatctcagcaaatgggaagtctccacatctctacacctacctgttctcatgctcctgtcctgcttcgctcctcacatttgacaaggagctcctcctcctatgaaaggccacttgtcccatagctttcttccatcccatcgtgtctcagcatctcagggatcttgcactgatcattgtcccattttcagagccggtccaagaggcagattacctgagcagcagcctggcatgccaatttgtaagaagtgaagagcatccttgaaataattagagaagaacagtaacagttaatttaggttttcctatataaacaaagcataaattggcctgtttcttactgaatagaaatttaaaccaaacaaaatgaaacaaagaagcatattcctctgactctggtccatcacaaatgagtttttgtgatctttcccgttgcaggatgcaaggatgtataagtagaatcgcagtgttgccaacaatgaagttgg

SEQ ID NO: 14108 - DNA, 2581 bp, Homo sapiens
  source 1..2581: mol_type = unassigned DNA
cggggcgcagagctgcgggtccgctttgtctccccggggcgccgcgcggtgcagtggggacggcgcggcgagcggggcgcccggggcgcgggtgcggggtgtcggggcgcgcgcgcctgttggccgctcgccgacggggcccagagccgccgattcctgccgagtgtagagaggagagagagtgaacagggagcggggcttttgtctgttggtctccctggactgaagagagggagaatagaagcccaagactaagattctcaaaatggtttattacccagaactctttgtctgggtcagtcaagaaccatttccaaacaaggacatggagggaaggcttcctaagggaagacttcctgtcccaaaggaagtgaaccgcaagaagaacgatgagacaaacgctgcctccctgactccactgggcagcagtgaactccgctccccaagaatcagttacctccactttttttaatcgtaacacctccatttgtattacatatggtgtatgggtattgatgaggtcatggtatcatatatgggatttttttctgtgtaaatcatcaagtataagaagaaactatgggactctgagccttgctttagagaatttacagtggacaaataggtgtcatcaaaccagtttttaatcattctgactcaagtgaaaacgctcagaatttcacactgtgaatccacgtttacaacccttacaggtgggccttcaggcctggttcgctacaacaatgtcttccacaactcaaactcccaccgcgctcacacaaccggtccactcctgccttttcactcacacagctcccgactgcttcttgcagaggctgagagtcccccccccaccttttttttcatttagatgtaacaaacctagtagtttatgttcatcaattgtctgtatatctctatattttatccatgtactcttttgatgtatagaagtagtttgaaactcattgtttccttgtggtaagtgaccgagatgctgccacaggacctgagacactgatgaatggtgctattttggactttcaacatgctccttggcgaggtagctctgatggagttattttttatttccatgttctaagaaggtgttggtactctgtttccctgaatgttgttctctagactggattgacttgttttccttgtgtcttcagtgtggctttcttcctcagtgttgtaggttgagcgaatgctaccagagtgtgagagaccattgtctcgttggctggcgctcacggacatgcagtcacggtagcgggagcaatcacaaaactgtaatttacttaccaaatctcttcctttccgtagcctcgcctgcctgacttagagaaagaaaagcaataattttacaggcattttgaggtgtctctttgggttctttctgtttgaaaggatatttgtcgaaaaaaagagcaaaaccgttttaaataaactccccctggaaaaaaacccaaaacactggcatctgagtgggaatatgaaaatgacaccttttccaaatattaaattggaaaacaaggtctacaaaatcatgatacttttttaaaaggcagagcattcttttttcggcaattttgataagcaaggtgtagatttacatttttgtccttgctcccaacgaaatggataaacaaaaataaattaccatctactcatggaatgttgttgtgttagccagtctgaaagcccaccttaatttttatataactgtctttagctcttcttttgacagggcaggccttgttctgaactgtttcgcttctgactgttaaacaccgatgacgcatgcactgcacttcttcgttttcttcttgctcccccattggcctgagtttcttgtgcattactcctctccctccttcgttagaataggtatatcagctgtgtaaatagagcaagaaaacagtattctgcatctgtggcatttatgtagagttgcagttgtgtactgctgaaaatgcaggcttttgtaacagtgtgatctttactgatgcactcatgacaagtacccaatgtattttagctattttagtagtatttgttcaataaatacgcaagctgtaaggtaactgtctgatttggctcatcattgaagaggcctagttttgaatgtcttctctggttcttgctaattcatgtgtttccagagccccagaagtcaggccagcaaacccaagggcaaatatcaaaagagagagaatcagctctgcctttcatgcgttttcccttttgaggattttatgagattaggggctaggcagtggctcattaagatggtatttgcagagctgcctctggacacaaagcagaattagaccaagatccttttatttctacactttttctcccttccaaggcattcccatacgcttcaaaacttactctttctcactccttgccattaagacccactctgtggtattctttaagacccactctgtggtattctttctttttccctgccaaaagagatctgacctcccttcttcatggaatatgtgcacttttcctcagacaaaaagcttaaacttttgtaagaggataaaaatttgagacagaa

SEQ ID NO: 14109 - DNA, 2013 bp, Homo sapiens
  source 1..2013: mol_type = unassigned DNA
ctccctcccccaatcccccctccccccccaatctgtctttctagcatgttgccctttttcaaccacatttgtgtttcaggtgtagagaggagagagagtgaacagggagcggggcttttgtctgttggtctccctggactgaagagagggagaatagaagcccaagactaagattctcaaaatggtttattacccagaactctttgtctgggtcagtcaagaaccatttccaaacaaggacatggagggaaggcttcctaagggaagacttcctgtcccaaaggaagtgaaccgcaagaagaacgatgagacaaacgctgcctccctgactccactgggcagcagtgaactccgctccccaagaatcagttacctccactttttttaatcgtaacacctccatttgtattacatatggtgtatgggtattgatgaggtcatggtatcatatatgggatttttttctgtgtaaatcatcaagtataagaagaaactatgggactctgagccttgctttagagaatttacagtggacaaataggtgtcatcaaaccagtttttaatcattctgactcaagtgaaaacgctcagaatttcacactgtgaatccacgtttacaacccttacaggtgggccttcaggcctggttcgctacaacaatgtcttccacaactcaaactcccaccgcgctcacacaaccggtccactcctgccttttcactcacacagctcccgactgcttcttgcagaggctgagagtcccccccccaccttttttttcatttagatgtaacaaacctagtagtttatgttcatcaattgtctgtatatctctatattttatccatgtactcttttgatgtatagaagtagtttgaaactcattgtttccttgtggtaagtgaccgagatgctgccacaggacctgagacactgatgaatggtgctattttggactttcaacatgctccttggcgaggtagctctgatggagttattttttatttccatgttctaagaaggtgttggtactctgtttccctgaatgttgttctctagactggattgacttgttttccttgtgtcttcagtgtggctttcttcctcagtgttgtaggttgagcgaatgctaccagagtgtgagagaccattgtctcgttggctggcgctcacggacatgcagtcacggtagcgggagcaatcacaaaactgtaatttacttaccaaatctcttcctttccgtagcctcgcctgcctgacttagagaaagaaaagcaataattttacaggcattttgaggtgtctctttgggttctttctgtttgaaaggatatttgtcgaaaaaaagagcaaaaccgttttaaataaactccccctggaaaaaaacccaaaacactggcatctgagtgggaatatgaaaatgacaccttttccaaatattaaattggaaaacaaggtctacaaaatcatgatacttttttaaaaggcagagcattcttttttcggcaattttgataagcaaggtgtagatttacatttttgtccttgctcccaacgaaatggataaacaaaaataaattaccatctactcatggaatgttgttgtgttagccagtctgaaagcccaccttaatttttatataactgtctttagctcttcttttgacagggcaggccttgttctgaactgtttcgcttctgactgttaaacaccgatgacgcatgcactgcacttcttcgttttcttcttgctcccccattggcctgagtttcttgtgcattactcctctccctccttcgttagaataggtatatcagctgtgtaaatagagcaagaaaacagtattctgcatctgtggcatttatgtagagttgcagttgtgtactgctgaaaatgcaggcttttgtaacagtgtgatctttactgatgcactcatgacaagtacccaatgtattttagctattttagtagtatttgttcaataaatacgcaagctgtaaggtaactgtctg

SEQ ID NO: 14110 - DNA, 2065 bp, Homo sapiens
  source 1..2065: mol_type = unassigned DNA
actagcaccctagcgggagagagagggaaagggagagagagagactcttagagaaagagagagacacacacactcttggagagagagcgcgaggcagggagatgatctcctcctcctttttccaaggctgcacttcttggaagtgaagccggtgtagagaggagagagagtgaacagggagcggggcttttgtctgttggtctccctggactgaagagagggagaatagaagcccaagactaagattctcaaaatggtttattacccagaactctttgtctgggtcagtcaagaaccatttccaaacaaggacatggagggaaggcttcctaagggaagacttcctgtcccaaaggaagtgaaccgcaagaagaacgatgagacaaacgctgcctccctgactccactgggcagcagtgaactccgctccccaagaatcagttacctccactttttttaatcgtaacacctccatttgtattacatatggtgtatgggtattgatgaggtcatggtatcatatatgggatttttttctgtgtaaatcatcaagtataagaagaaactatgggactctgagccttgctttagagaatttacagtggacaaataggtgtcatcaaaccagtttttaatcattctgactcaagtgaaaacgctcagaatttcacactgtgaatccacgtttacaacccttacaggtgggccttcaggcctggttcgctacaacaatgtcttccacaactcaaactcccaccgcgctcacacaaccggtccactcctgccttttcactcacacagctcccgactgcttcttgcagaggctgagagtcccccccccaccttttttttcatttagatgtaacaaacctagtagtttatgttcatcaattgtctgtatatctctatattttatccatgtactcttttgatgtatagaagtagtttgaaactcattgtttccttgtggtaagtgaccgagatgctgccacaggacctgagacactgatgaatggtgctattttggactttcaacatgctccttggcgaggtagctctgatggagttattttttatttccatgttctaagaaggtgttggtactctgtttccctgaatgttgttctctagactggattgacttgttttccttgtgtcttcagtgtggctttcttcctcagtgttgtaggttgagcgaatgctaccagagtgtgagagaccattgtctcgttggctggcgctcacggacatgcagtcacggtagcgggagcaatcacaaaactgtaatttacttaccaaatctcttcctttccgtagcctcgcctgcctgacttagagaaagaaaagcaataattttacaggcattttgaggtgtctctttgggttctttctgtttgaaaggatatttgtcgaaaaaaagagcaaaaccgttttaaataaactccccctggaaaaaaacccaaaacactggcatctgagtgggaatatgaaaatgacaccttttccaaatattaaattggaaaacaaggtctacaaaatcatgatacttttttaaaaggcagagcattcttttttcggcaattttgataagcaaggtgtagatttacatttttgtccttgctcccaacgaaatggataaacaaaaataaattaccatctactcatggaatgttgttgtgttagccagtctgaaagcccaccttaatttttatataactgtctttagctcttcttttgacagggcaggccttgttctgaactgtttcgcttctgactgttaaacaccgatgacgcatgcactgcacttcttcgttttcttcttgctcccccattggcctgagtttcttgtgcattactcctctccctccttcgttagaataggtatatcagctgtgtaaatagagcaagaaaacagtattctgcatctgtggcatttatgtagagttgcagttgtgtactgctgaaaatgcaggcttttgtaacagtgtgatctttactgatgcactcatgacaagtacccaatgtattttagctattttagtagtatttgttcaataaatacgca

SEQ ID NO: 14111 - DNA, 1468 bp, Homo sapiens
  source 1..1468: mol_type = unassigned DNA
agaatgactgttgccagcatctagaaggaattacttttccaggcagtgcaatcatgctatttatcaaaagaaacattggacaatcagaatgggctgcagagctgtgtcctgagctgtctggccaactcccggcaagaagcttctttgtcctttaaagactgaactttatcctcaagcagtaacaggactggaatgaaaggagtttggaattattctgctttgagccgaagagaagatgaaacacgaacccagaggagcaggatgacagacagagtcccttgttccaaatgtttccaggttcactgccagatttctgttctgaattgtgtttattacccagaactctttgtctgggtcagtcaagaaccatttccaaacaaggacatggagggaaggcttcctaagggaagacttcctgtcccaaaggaagtgaaccgcaagaagaacgatgagacaaacgctgcctccctgactccactgggcagcagtgaactccgctccccaagaatcagttacctccactttttttaatcgtaacacctccatttgtattacatatggtgtatgggtattgatgaggtcatggtatcatatatgggatttttttctgtgtaaatcatcaagtataagaagaaactatgggactctgagccttgctttagagaatttacagtggacaaataggtgtcatcaaaccagtttttaatcattctgactcaagtgaaaacgctcagaatttcacactgtgaatccacgtttacaacccttacaggtgggccttcaggcctggttcgctacaacaatgtcttccacaactcaaactcccaccgcgctcacacaaccggtccactcctgccttttcactcacacagctcccgactgcttcttgcagaggctgagagtcccccccccaccttttttttcatttagatgtaacaaacctagtagtttatgttcatcaattgtctgtatatctctatattttatccatgtactcttttgatgtatagaagtagtttgaaactcattgtttccttgtggtaagtgaccgagatgctgccacaggacctgagacactgatgaatggtgctattttggactttcaacatgctccttggcgaggtagctctgatggagttattttttatttccatgttctaagaaggtgttggtactctgtttccctgaatgttgttctctagactggattgacttgttttccttgtgtcttcagtgtggctttcttcctcagtgttgtaggttgagcgaatgctaccagagtgtgagagaccattgtctcgttggctggcgctcacggacatgcagtcacggtagcgggagcaatcacaaaactgtaatttacttaccaaatctcttcctttccgtagcctcgcctgcctgacttagagaaagaaaagcaataattttacaggcattttgaggtgtctctttgggttctttctgtttg

SEQ ID NO: 14112 - DNA, 801 bp, Homo sapiens
  source 1..801: mol_type = unassigned DNA
acatttgtgtttcaggtgtagagaggagagagagtgaacagggagcggggcttttgtctgttggtctccctggactgaagagagggagaatagaagcccaagactaagattctcaaaatggtttattacccagaactctttgtctgggtcagtcaagaaccatttccaaacaaggacatggagggaaggcttcctaagttaagaaagaaaaacagaatccactgaaaataaaatttctatttgaaagtttcataagtgtaattgactaacgggaagacttcctgtcccaaaggaagtgaaccgcaagaagaacgatgagacaaacgctgcctccctgactccactgggcagcagtgaactccgctccccaagaatcagttacctccactttttttaatcgtaacacctccatttgtattacatatggtgtatgggtattgatgaggtcatggtatcatatatgggatttttttctgtgtaaatcatcaagtataagaagaaactatgggactctgagccttgctttagagaatttacagtggacaaataggtgtcatcaaaccagtttttaatcattctgactcaagtgaaaacgctcagaatttcacactgtgaatccacgtttacaacccttacaggtgggccttcaggcctggttcgctacaacaatgtcttccacaactcaaactcccaccgcgctcacacaaccggtccactcctgccttttcactcacacagctcccgactgcttcttgcagaggctgagagtcccccccccaccttttttttcatttagatgta

SEQ ID NO: 14113 - DNA, 577 bp, Homo sapiens
  source 1..577: mol_type = unassigned DNA
aatctgtctttctagcatgttgccctttttcaaccacatttgtgtttcaggtgtagagaggagagagagtgaacagggagcggggcttttgtctgtttattacccagaactctttgtctgggtcagtcaagaaccatttccaaacaaggacatggagggaaggcttcctaagggaagacttcctgtcccaaaggaagtgaaccgcaagaagaacgatgagacaaacgctgcctccctgactccactgggcagcagtgaactccgctccccaagaatcagttacctccactttttttaatcgtaacacctccatttgtattacatatggtgtatgggtattgatgaggtcatggtatcatatatgggatttttttctgtgtaaatcatcaagtataagaagaaactatgggactctgagccttgctttagagaatttacagtggacaaataggtgtcatcaaaccagtttttaatcattctgactcaagtgaaaacgctcagaatttcacactgtgaatccacgtttacaacccttacaggtgggccttcaggcctggttcgctacaacaatgtcttc

SEQ ID NO: 14114 - DNA, 771 bp, Homo sapiens
  source 1..771: mol_type = unassigned DNA
gtgtgtctgagcgcggctccgcgccgccgcaggcaccattttctgcttcgctcaggacaggcacataaaaggaaggcggctgccgcccgtcgccgtcctcttttcctcagatgccctctgctgcaggtgtagagaggagagagagtgaacagggagcggggcttttgtctgttggtctccctggactgaagagagggagaatagaagcccaagactaagattctcaaaatggtttattacccagaactctttgtctgggtcagtcaagaaccatttccaaacaaggacatggagggaaggcttcctaagttaagaaagaaaaacagaatccactgaaaataaaatttctatttgaaagtttcataagtgtaattgactaacgggaagacttcctgtcccaaaggaagtgaaccgcaagaagaacgatgagacaaacgctgcctccctgactccactgggcagcagtgaactccgctccccaagaatcagttacctccactttttttaatcgtaacacctccatttgtattacatatggtgtatgggtattgatgaggtcatggtatcatatatgggatttttttctgtgtaaatcatcaagtataagaagaaactatgggactctgagccttgctttagagaatttacagtggacaaataggtgtcatcaaaccagtttttaatcattctgactcaagtgaaaacgctcagaatttcacactgtgaatccacgtttacaacccttacaggtgggccttcaggcctggttcg

SEQ ID NO: 14115 - DNA, 636 bp, Homo sapiens
  source 1..636: mol_type = unassigned DNA
aggaagtcaactatccaccatcttgtcggatccatgcagtcttagcagactttcttcacaccatggatgattgaatccactactctttgcatgtttaaagacagagaaggcagattctctgcagagagacgtgaagagaaggttggtctccctggactgaagagagggagaatagaagcccaagactaagattctcaaaatggtttattacccagaactctttgtctgggtcagtcaagaaccatttccaaacaaggacatggagggaaggcttcctaagggaagacttcctgtcccaaaggaagtgaaccgcaagaagaacgatgagacaaacgctgcctccctgactccactgggcagcagtgaactccgctccccaagaatcagttacctccactttttttaatcgtaacacctccatttgtattacatatggtgtatgggtattgatgaggtcatggtatcatatatgggatttttttctgtgtaaatcatcaagtataagaagaaactatgggactctgagccttgctttagagaatttacagtggacaaataggtgtcatcaaaccagtttttaatcattctgactcaagtgaaaacgctcagaatttcacactgtgaatccacgtttac

SEQ ID NO: 14116 - DNA, 704 bp, Homo sapiens
  source 1..704: mol_type = unassigned DNA
agtctggctcctaggcggctgcacagtggcagcaaggctggggcgctggctccgcgccagctccatcagaattagctcattgttcactagcaccctagcgggagagagagggaaagggagagagagagactcttagagaaagagagagacacacacactcttggagagagagcgcgaggtgtagagaggagagagagtgaacagggagcggggcttttgtctgttggtctccctggactgaagagagggagaatagaagcccaagactaagattctcaaaatggtttattacccagaactctttgtctgggtcagtcaagaaccatttccaaacaaggacatggagggaaggcttcctaagggaagacttcctgtcccaaaggaagtgaaccgcaagaagaacgatgagacaaacgctgcctccctgactccactgggcagcagtgaactccgctccccaagaatcagttacctccactttttttaatcgtaacacctccatttgtattacatatggtgtatgggtattgatgaggtcatggtatcatatatgggatttttttctgtgtaaatcatcaagtataagaagaaactatgggactctgagccttgctttagagaatttacagtggacaaataggtgtcatcaaaccagtttttaatcattctgactcaagtgaaaacgctcagaatttcacactgtg

SEQ ID NO: 14117 - DNA, 587 bp, Homo sapiens
  source 1..587: mol_type = unassigned DNA
agacacacacactcttggagagagagcgcgaggcagggagatgatctcctcctcctttttccaaggctgcacttcttggaagtgtagagaggagagagagtgaacagggagcggggcttttgtctgttggtctccctggactgaagagagggagaatagaagcccaagactaagattctcaaaatggtttattacccagaactctttgtctgggtcagtcaagaaccatttccaaacaaggacatggagggaaggcttcctaagggaagacttcctgtcccaaaggaagtgaaccgcaagaagaacgatgagacaaacgctgcctccctgactccactgggcagcagtgaactccgctccccaagaatcagttacctccactttttttaatcgtaacacctccatttgtattacatatggtgtatgggtattgatgaggtcatggtatcatatatgggatttttttctgtgtaaatcatcaagtataagaagaaactatgggactctgagccttgctttagagaatttacagtggacaaataggtgtcatcaaaccagtttttaatcattctgactcaagtgaaaac

SEQ ID NO: 14118 - DNA, 559 bp, Homo sapiens
  source 1..559: mol_type = unassigned DNA
acactcttggagagagagcgcgaggcagggagatgatctcctcctcctttttccaaggctgcacttcttggaagtgaagccgagaggagagagagtgaacagggagcggggcttttgtctgttggtctccctggactgaagagagggagaatagaagcccaagactaagattctcaaaatggtttattacccagaactctttgtctgggtcagtcaagaaccatttccaaacaaggacatggagggaaggcttcctaagggaagacttcctgtcccaaaggaagtgaaccgcaagaagaacgatgagacaaacgctgcctccctgactccactgggcagcagtgaactccgctccccaagaatcagttacctccactttttttaatcgtaacacctccatttgtattacatatggtgtatgggtattgatgaggtcatggtatcatatatgggatttttttctgtgtaaatcatcaagtataagaagaaactatgggactctgagccttgctttagagaatttacagtggacaaataggtgtcatcaaaccagttttta

SEQ ID NO: 14119 - DNA, 698 bp, Homo sapiens
  source 1..698: mol_type = unassigned DNA
acgcgcagccacaggacctctgggcccggccttcaggggcgctccccgccccgggcttccccgcggaagggagtggggcgcgcgtacccagctgaggggcagggtccgacccgaggccgtgtgcaaatgcatccttcgcggactctttgtgtgtctgagcgcggctccgcgccgccgcaggcaccattttctgcttcgctcaggacaggcacataaaaggaaggcggctgccgcccgtcgccgtcctcttttcctcagatgccctctgctgcaggtgtagagaggagagagagtgaacagggagcggggcttttgtctgttggtctccctggactgaagagagggagaatagaagcccaagactaagattctcaaaatggtttattacccagaactctttgtctgggtcagtcaagaaccatttccaaacaaggacatggagggaaggcttcctaagggaagacttcctgtcccaaaggaagtgaaccgcaagaagaacgatgagacaaacgctgcctccctgactccactgggcagcagtgaactccgctccccaagaatcagttacctccactttttttaatcgtaacacctccatttgtattacatatggtgtatgggtattgatgaggtcatggtatcatatatgggatttttttctgtgtaaatcatcaagtataagaagaaactatgggact

SEQ ID NO: 14120 - DNA, 540 bp, Homo sapiens
  source 1..540: mol_type = unassigned DNA
cggggcgcgggtgcggggtgtcggggcgcgcgcgcctgttggccgctcgccgacggggcccagagccgccgattcctgccgagtgtagagaggagagagagtgaacagggagcggggcttttgtctaaaatggttattcgtctgtaacctctaaagaggcatttttcgtttgctgacctgtggtgaggcgatgtgtctactgtatttaaacatattttgcaggttggtctccctggactgaagagagggagaatagaagcccaagactaagattctcaaaatggtttattacccagaactctttgtctgggtcagtcaagaaccatttccaaacaaggacatggagggaaggcttcctaagggaagacttcctgtcccaaaggaagtgaaccgcaagaagaacgatgagacaaacgctgcctccctgactccactgggcagcagtgaactccgctccccaagaatcagttacctccactttttttaatcgtaacacctccatttgtattacatatggtgtatgggtattgatgaggtcat

SEQ ID NO: 14121 - DNA, 557 bp, Homo sapiens
  source 1..557: mol_type = unassigned DNA
aaatgcatccttcgcggactctttgtgtgtctgagcgcggctccgcgccgccgcaggcaccattttctgcttcgctcaggacaggcacataaaaggaaggcggctgccgcccgtcgccgtcctcttttcctcagatgccctctgctgcaggtttattattacagtgtagagaggagagagagtgaacagggagcggggcttttgtctaaaatggttattcgtctgtaacctctaaagaggcatttttcgtttgctgacctgtggtgaggcgatgtgtctactgtatttaaacatattttgcaggttggtctccctggactgaagagagggagaatagaagcccaagactaagattctcaaaatggtttattacccagaactctttgtctgggtcagtcaagaaccatttccaaacaaggacatggagggaaggcttcctaagggaagacttcctgtcccaaaggaagtgaaccgcaagaagaacgatgagacaaacgctgcctccctgactccactgggcagcagtgaactccgctccccaagaatcagttacctcc

SEQ ID NO: 14122 - DNA, 653 bp, Homo sapiens
  source 1..653: mol_type = unassigned DNA
actctgaggcattacactacacggtggaaggctgattcctattctgtcgtcttgattgcaaatatactgccagtagtatgtctgggaacaaagagcagccagaaaacaatctatttttatcacttggttctacttttaagttgctaaaccttttgaactcatgcaatttaaagatgaaccaaacactaagaatagcccaggactctgcaaagccaagtaccagggattcctttgtcccttagttaagcctataggccacttggaaagctctttcagaaatcccagtagttaacaataatttgcatgtaacttatcttaaccacagaaaatggttattcgtctgtaacctctaaagaggcatttttcgtttgctgacctgtggtgaggcgatgtgtctactgtatttaaacatattttgcaggttggtctccctggactgaagagagggagaatagaagcccaagactaagattctcaaaatggtttattacccagaactctttgtctgggtcagtcaagaaccatttccaaacaaggacatggagggaaggcttcctaagggaagacttcctgtcccaaaggaagtgaaccgcaagaagaacgatgagacaaacgctgcctccctgactccactgggcagcagtgaactccgc

SEQ ID NO: 14123 - DNA, 475 bp, Homo sapiens
  source 1..475: mol_type = unassigned DNA
acctctgggcccggccttcaggggcgctccccgccccgggcttccccgcggaagggagtggggcgcgcgtacccagctgaggggcagggtccgacccgaggccgtgtgcaaatgcatccttcgcggactctttgtgtgtctgagcgcggctccgcgccgccgcaggcaccattttctgcttcgctcaggacaggcacataaaaggaaggcggctgccgcccgtcgccgtcctcttttcctcagatgccctctgctgcaggtttattattacagtgtagagaggagagagagtgaacagggagcggggcttttgtctgttggtctccctggactgaagagagggagaatagaagcccaagactaagattctcaaaatggtttattacccagaactctttgtctgggtcagtcaagaaccatttccaaacaaggacatggagggaaggcttcctaagggaagacttcctgtcccaaa

SEQ ID NO: 14124 - DNA, 1079 bp, Homo sapiens
  source 1..1079: mol_type = unassigned DNA
acatttgtgtttcaggtgtagagaggagagagagtgaacagggagcggggcttttgtctgtttattacccagaactctttgtctgggtcagtcaagaaccatttccaaacaaggacatggagggaaggcttcctaaggtaagatccttagatgccatattgttaacactattttcaatatagaaacaattgttttaaaatatcagagctttttcatttgaatacccattataggctgctataacaatccattaatctgatactatgatgaccttggaaataatgtacttttaaaaaatatcctaaagtcctatgacttaaagttcacattatcttccttcataaatgaaaaattttcatttaaaacatggaatcagtttatcaaagtacagtttacaggttttaagtctgttccatttctggttagacaaactcaaatacaatgatcaaactaaaagatttcttaaaagtatgatgactattaattgtctgctaatgaagtctgaaggtctgataagattatccatgaagcaaaagggaggaacaaaaaaactgttacatttctttcttctaatttttgagcctaaaaaccattttttataaacgtggtttcattgttctgacatcttaggtgtggcagttctctgcctcaagaaaatttgtaaaatttatattttagattttagcataatttctgaaacaaacaataacaactacttaccagtttttactgtagatactggactttgcctcttagggtgaatacttgtttgacttcaagcggggagagtatactttttaaccaatgacttgctgattttgcagttaagaaagaaaaacagaatccactgaaaataaaatttctatttgaaagtttcataagtgtaattgactaacggtgagtcctcccccagctgttactggtatttcaatgtttaagaaattattttatttacactaaatagtatcaacaattccctatcttatactggcaggcagaaactgaagaggttgtatcaactggcagtttgcactgaaagaaaacaatcttaaatcacttttaatcttgcagagcatttt

SEQ ID NO: 14125 - DNA, 701 bp, Homo sapiens
  source 1..701: mol_type = unassigned DNA
gtgcggggtgtcggggcgcgcgcgcctgttggccgctcgccgacggggcccagagccgccgattcctgccgagtgtagagaggagagagagtgaacagggagcggggcttttgtctgttggtctccctggactgaagagagggagaatagaagcccaagactaagattctcaaaatggtttattacccagaactctttgtctgggtcagtcaagaaccatttccaaacaaggacatggagggaaggcttcctaaggtaagatccttagatgccatattgttaacactattttcaatatagaaacaattgttttaaaatatcagagctttttcatttgaatacccattataggctgctataacaatccattaatctgatactatgatgaccttggaaataatgtacttttaaaaaatatcctaaagtcctatgacttaaagttcacattatcttccttcataaatgaaaaattttcatttaaaacatggaatcagtttatcaaagtacagtttacaggttttaagtctgttccatttctggttagacaaactcaaatacaatgatcaaactaaaagatttcttaaaagtatgatgactattaattgtctgctaatgaagtctgaaggtctgataagattatccatgaagcaaaagggaggaacaaaaaaactgttacatttctttcttctaatttttgagcc

SEQ ID NO: 14126 - DNA, 311 bp, Homo sapiens
  source 1..311: mol_type = unassigned DNA
gcaggcaccattttctgcttcgctcaggacaggcacataaaaggaaggcggctgccgcccgtcgccgtcctcttttcctcagatgccctctgctgcaggtgtagagaggagagagagtgaacagggagcggggcttttgtctaaaatggttattcgtctgtaacctctaaagaggcatttttcgtttgctgacctgtggtgaggcgatgtgtctactgtatttaaacatattttgcaggttggtctccctggactgaagagagggagaatagaagcccaagactaagattctcaaaatggtttattaccca

SEQ ID NO: 14127 - DNA, 503 bp, Homo sapiens
  source 1..503: mol_type = unassigned DNA
agagtgaacagggagcggggcttttgtctgttggtctccctggactgaagagagggagaatagaagcccaagactaagattctcaaaatggtaagacttggtcatcagaggagattctcagtacttcttaccagtctgttacatataaatatcaaccacccatcttcatccgcctcaacccttcattgttctacaccccatctgacctttaaaaggttctatctccagttcctgggagcgttgcagtacagcaatttatgtgaattggatgtggcaaattagttctttgacttgcaattattttgaatagaaaactaaaattcctctttcagaagtgaggatttatttaatttgaacaacagaaactattcggttctttaagaagagtgatgtgttgtgacacgcatggaggtggtgacagcagtagggctcaaacaaagccttgggtcttagagctaggccgaagttacccaaaactgaggagtctgtccagctgatcaaac

SEQ ID NO: 14128 - DNA, 2304 bp, Homo sapiens
  source 1..2304: mol_type = unassigned DNA
actctgaggcattacactacacggtggaaggctgattcctattctgtcgtcttgattgcaaatatactgccagtagtatgtctgggaacaaagagcagccagaaaacaatctatttttatcacttggttctacttttaagttgctaaaccttttgaactcatgcaatttaaagatgaaccaaacactaagaatagcccaggactctgcaaagccaagtaccagggattcctttgtcccttagttaagcctataggccacttggaaagctctttcagaaatcccagtagttaacaataatttgcatgtaacttatcttaaccacagaaaatggttattcgtctgtaacctctaaagaggcatttttcgtttgctgacctgtggtgaggcgatgtgtctactgtatttaaacatattttgcaggttggtctccctggactgaagagagggagaatagaagcccaagactaagattctcaaaatggtttattacccagaactctttgtctgggtcagtcaagaaccatttccaaacaaggacatggagggaaggcttcctaagggaagacttcctgtcccaaaggaagtgaaccgcaagaagaacgatgagacaaacgctgcctccctgactccactgggcagcagtgaactccgctccccaagaatcagttacctccactttttttaatcgtaacacctccatttgtattacatatggtgtatgggtattgatgaggtcatggtatcatatatgggatttttttctgtgtaaatcatcaagtataagaagaaactatgggactctgagccttgctttagagaatttacagtggacaaataggtgtcatcaaaccagtttttaatcattctgactcaagtgaaaacgctcagaatttcacactgtgaatccacgtttacaacccttacaggtgggccttcaggcctggttcgctacaacaatgtcttccacaactcaaactcccaccgcgctcacacaaccggtccactcctgccttttcactcacacagctcccgactgcttcttgcagaggctgagagtcccccccccaccttttttttcatttagatgtaacaaacctagtagtttatgttcatcaattgtctgtatatctctatattttatccatgtactcttttgatgtatagaagtagtttgaaactcattgtttccttgtggtaagtgaccgagatgctgccacaggacctgagacactgatgaatggtgctattttggactttcaacatgctccttggcgaggtagctctgatggagttattttttatttccatgttctaagaaggtgttggtactctgtttccctgaatgttgttctctagactggattgacttgttttccttgtgtcttcagtgtggctttcttcctcagtgttgtaggttgagcgaatgctaccagagtgtgagagaccattgtctcgttggctggcgctcacggacatgcagtcacggtagcgggagcaatcacaaaactgtaatttacttaccaaatctcttcctttccgtagcctcgcctgcctgacttagagaaagaaaagcaataattttacaggcattttgaggtgtctctttgggttctttctgtttgaaaggatatttgtcgaaaaaaagagcaaaaccgttttaaataaactccccctggaaaaaaacccaaaacactggcatctgagtgggaatatgaaaatgacaccttttccaaatattaaattggaaaacaaggtctacaaaatcatgatacttttttaaaaggcagagcattcttttttcggcaattttgataagcaaggtgtagatttacatttttgtccttgctcccaacgaaatggataaacaaaaataaattaccatctactcatggaatgttgttgtgttagccagtctgaaagcccaccttaatttttatataactgtctttagctcttcttttgacagggcaggccttgttctgaactgtttcgcttctgactgttaaacaccgatgacgcatgcactgcacttcttcgttttcttcttgctcccccattggcctgagtttcttgtgcattactcctctccctccttcgttagaataggtatatcagctgtgtaaatagagcaagaaaacagtattctgcatctgtggcatttatgtagagttgcagttgtgtactgctgaaaatgcaggcttttgtaacagtgtgatctttactgatgcactcatgacaagtacccaatgtattttagctattttagtagtatttgttcaataaatacgcaagctgtaaggtaa

SEQ ID NO: 14129 - DNA, 1453 bp, Homo sapiens
  source 1..1453: mol_type = unassigned DNA
ggcagcagcatggggaaaggacgcgcgggccgagttggcaccacagccttgcctccccgattgaaagagatgaaaagccaggaatcggctgcaggttccaaactagtccttcggtgtgaaaccagttctgaatactcctctctcagattcaagtggttcaagaatgggaatgaattgaatcgaaaaaacaaaccacaaaatatcaagatacaaaaaaagccagggaagtcagaacttcgcattaacaaagcatcactggctgattctggagagtatatgtgcaaagtgatcagcaaattaggaaatgacagtgcctctgccaatatcaccatcgtggaatcaaacgagatcatcactggtatgccagcctcaactgaaggagcatatgtgtcttcagctacatctacatccaccactgggacaagccatcttgtaaaatgtgcggagaaggagaaaactttctgtgtgaatggaggggagtgcttcatggtgaaagacctttcaaacccctcgagatacttgtgcaagtgcccaaatgagtttactggtgatcgctgccaaaactacgtaatggccagcttctacaagcatcttgggattgaatttatggaggcggaggagctgtaccagaagagagtgctgaccataaccggcatctgcatcgccctccttgtggtcggcatcatgtgtgtggtggcctactgcaaaaccaagaaacagcggaaaaagctgcatgaccgtcttcggcagagccttcggtctgaacgaaacaatatgatgaacattgccaatgggcctcaccatcctaacccaccccccgagaatgtccagctggtgaatcaatacgtatctaaaaacgtcatctccagtgagcatattgttgagagagaagcagagacatccttttccaccagtcactatacttccacagcccatcactccactactgtcacccagactcctagccacagctggagcaacggacacactgaaagcatcctttccgaaagccactctgtaatcgtgatgtcatccgtagaaaacagtaggcacagcagcccaactgggggcccaagaggacgtcttaatggcacaggaggccctcgtgaatgtaacagcttcctcaggcatgccagagaaacccctgattcctaccgagactctcctcatagtgaaaggtatgtgtcagccatgaccaccccggctcgtatgtcacctgtagatttccacacgccaagctcccccaaatcgcccccttcggaaatgtctccacccgtgtccagcatgacggtgtccatgccttccatggcggtcagccccttcatggaagaagagagacctctacttctcgtgacaccaccaaggctgcgggagaagaagtttgaccatcaccctcagcagttcagctccttccaccacaaccccgcgcatgacagtaacagcctccctgcta

SEQ ID NO: 14130 - DNA, 1785 bp, Homo sapiens
  source 1..1785: mol_type = unassigned DNA
ggcagcagcatggggaaaggacgcgcgggccgagttggcaccacagccttgcctccccgattgaaagagatgaaaagccaggaatcggctgcaggttccaaactagtccttcggtgtgaaaccagttctgaatactcctctctcagattcaagtggttcaagaatgggaatgaattgaatcgaaaaaacaaaccacaaaatatcaagatacaaaaaaagccagggaagtcagaacttcgcattaacaaagcatcactggctgattctggagagtatatgtgcaaagtgatcagcaaattaggaaatgacagtgcctctgccaatatcaccatcgtggaatcaaacgctacatctacatccaccactgggacaagccatcttgtaaaatgtgcggagaaggagaaaactttctgtgtgaatggaggggagtgcttcatggtgaaagacctttcaaacccctcgagatacttgtgcaagtgcccaaatgagtttactggtgatcgctgccaaaactacgtaatggccagcttctacaagcatcttgggattgaatttatggaggcggaggagctgtaccagaagagagtgctgaccataaccggcatctgcatcgccctccttgtggtcggcatcatgtgtgtggtggcctactgcaaaaccaagaaacagcggaaaaagctgcatgaccgtcttcggcagagccttcggtctgaacgaaacaatatgatgaacattgccaatgggcctcaccatcctaacccaccccccgagaatgtccagctggtgaatcaatacgtatctaaaaacgtcatctccagtgagcatattgttgagagagaagcagagacatccttttccaccagtcactatacttccacagcccatcactccactactgtcacccagactcctagccacagctggagcaacggacacactgaaagcatcctttccgaaagccactctgtaatcgtgatgtcatccgtagaaaacagtaggcacagcagcccaactgggggcccaagaggacgtcttaatggcacaggaggccctcgtgaatgtaacagcttcctcaggcatgccagagaaacccctgattcctaccgagactctcctcatagtgaaaggtatgtgtcagccatgaccaccccggctcgtatgtcacctgtagatttccacacgccaagctcccccaaatcgcccccttcggaaatgtctccacccgtgtccagcatgacggtgtccatgccttccatggcggtcagccccttcatggaagaagagagacctctacttctcgtgacaccaccaaggctgcgggagaagaagtttgaccatcaccctcagcagttcagctccttccaccacaaccccgcgcatgacagtaacagcctccctgctagccccttgaggatagtggaggatgaggagtatgaaacgacccaagagtacgagccagcccaagagcctgttaagaaactcgccaatagccggcgggccaaaagaaccaagcccaatggccacattgctaacagattggaagtggacagcaacacaagctcccagagcagtaactcagagagtgaaacagaagatgaaagagtaggtgaagatacgcctttcctgggcatacagaaccccctggcagccagtcttgaggcaacacctgccttccgcctggctgacagcaggactaacccagcaggccgcttctcgacacaggaagaaatccaggccaggctgtctagtgtaattgctaaccaagaccctattgctgtataaaac

SEQ ID NO: 14131 - DNA, 1955 bp, Homo sapiens
  source 1..1955: mol_type = unassigned DNA
ttttttttgcccttatacctcttcgcctttctgtggttccatccacttcttccccctcctcctcccataaacaactctcctacccctgcacccccaataaataaataaaaggaggagggcaaggggggaggaggaggagtggtgctgcgaggggaaggaaaagggaggcagcgcgagagagccgggcagagtccgaaccgacagccagaagcccgcacgcacctcgcaccatgagatggcgacgcgccccgcgccgctccgggcgtcccggcccccgggcccagcgccccggctccgccgcccgctcgtcgccgccgctgccgctgctgccactactgctgctgctggggaccgcggccctggcgccgggggcggcggccggcaacgaggcggctcccgcgggggcctcggtgtgctactcgtccccgcccagcgtgggatcggtgcaggagctagctcagcgcgccgcggtggtgatcgagggaaaggtgcacccgcagcggcggcagcagggggcactcgacaggaaggcggcggcggcggcgggcgaggcaggggcgtggggcggcgatcgcgagccgccagccgcgggcccacgggcgctggggccgcccgccgaggagccgctgctcgccgccaacgggaccgtgccctcttggcccaccgccccggtgcccagcgccggcgagcccggggaggaggcgccctatctggtgaaggtgcaccaggtgtgggcggtgaaagccgggggcttgaagaaggactcgctgctcaccgtgcgcctggggacctggggccaccccgccttcccctcctgcgggaggctcaaggaggacagcaggtacatcttcttcatggagcccgacgccaacagcaccagccgcgcgccggccgccttccgagcctctttcccccctctggagacgggccggaacctcaagaaggaggtcagccgggtgctgtgcaagcggtgcgccttgcctccccgattgaaagagatgaaaagccaggaatcggctgcaggttccaaactagtccttcggtgtgaaaccagttctgaatactcctctctcagattcaagtggttcaagaatgggaatgaattgaatcgaaaaaacaaaccacaaaatatcaagatacaaaaaaagccagggaagtcagaacttcgcattaacaaagcatcactggctgattctggagagtatatgtgcaaagtgatcagcaaattaggaaatgacagtgcctctgccaatatcaccatcgtggaatcaaacgctacatctacatccaccactgggacaagccatcttgtaaaatgtgcggagaaggagaaaactttctgtgtgaatggaggggagtgcttcatggtgaaagacctttcaaacccctcgagatacttgtgcaagtgcccaaatgagtttactggtgatcgctgccaaaactacgtaatggccagcttctacagtacgtccactccctttctgtctctgcctgaataggagcatgctcagttggtgctgctttcttgttgctgcatctcccctcagattccacctagagctagatgtgtcttaccagatctaatattgactgcctctgcctgtcgcatgagaacattaacaaaagcaattgtattacttcctctgttcgcgactagttggctctgagatactaataggtgtgtgaggctccggatgtttctggaattgatattgaatgatgtgatacaaattgatagtcaatatcaagcagtgaaatatgataataaaggcatttcaaagtctcacttttattgataaaataaaaatcattctactgaacagtccatcttctttatacaatgaccacatcctgaaaagggtgttgctaagctgtaaccgatatgcacttgaaatgatggtaagttaattttgattcagaatgtgttatttgtcacaaataaacataataaaagg

SEQ ID NO: 14132 - DNA, 2516 bp, Homo sapiens
  source 1..2516: mol_type = unassigned DNA
gtgcccagcgccggcgagcccggggaggaggcgccctatctggtgaaggtgcaccaggtgtgggcggtgaaagccgggggcttgaagaaggactcgctgctcaccgtgcgcctggggacctggggccaccccgccttcccctcctgcgggaggctcaaggaggacagcaggtacatcttcttcatggagcccgacgccaacagcaccagccgcgcgccggccgccttccgagcctctttcccccctctggagacgggccggaacctcaagaaggaggtcagccgggtgctgtgcaagcggtgcgccttgcctccccgattgaaagagatgaaaagccaggaatcggctgcaggttccaaactagtccttcggtgtgaaaccagttctgaatactcctctctcagattcaagtggttcaagaatgggaatgaattgaatcgaaaaaacaaaccacaaaatatcaagatacaaaaaaagccagggaagtcagaacttcgcattaacaaagcatcactggctgattctggagagtatatgtgcaaagtgatcagcaaattaggaaatgacagtgcctctgccaatatcaccatcgtggaatcaaacgagatcatcactggtatgccagcctcaactgaaggagcatatgtgtcttcagagtctcccattagaatatcagtatccacagaaggagcaaatacttcttcatctacatctacatccaccactgggacaagccatcttgtaaaatgtgcggagaaggagaaaactttctgtgtgaatggaggggagtgcttcatggtgaaagacctttcaaacccctcgagatacttgtgcaagtgcccaaatgagtttactggtgatcgctgccaaaactacgtaatggccagcttctacaagcatcttgggattgaatttatggaggcggaggagctgtaccagaagagagtgctgaccataaccggcatctgcatcgccctccttgtggtcggcatcatgtgtgtggtggcctactgcaaaaccaagaaacagcggaaaaagctgcatgaccgtcttcggcagagccttcggtctgaacgaaacaatatgatgaacattgccaatgggcctcaccatcctaacccaccccccgagaatgtccagctggtgaatcaatacgtatctaaaaacgtcatctccagtgagcatattgttgagagagaagcagagacatccttttccaccagtcactatacttccacagcccatcactccactactgtcacccagactcctagccacagctggagcaacggacacactgaaagcatcctttccgaaagccactctgtaatcgtgatgtcatccgtagaaaacagtaggcacagcagcccaactgggggcccaagaggacgtcttaatggcacaggaggccctcgtgaatgtaacagcttcctcaggcatgccagagaaacccctgattcctaccgagactctcctcatagtgaaaggtatgtgtcagccatgaccaccccggctcgtatgtcacctgtagatttccacacgccaagctcccccaaatcgcccccttcggaaatgtctccacccgtgtccagcatgacggtgtccatgccttccatggcggtcagccccttcatggaagaagagagacctctacttctcgtgacaccaccaaggctgcgggagaagaagtttgaccatcaccctcagcagttcagctccttccaccacaaccccgcgcatgacagtaacagcctccctgctagccccttgaggatagtggaggatgaggagtatgaaacgacccaagagtacgagccagcccaagagcctgttaagaaactcgccaatagccggcgggccaaaagaaccaagcccaatggccacattgctaacagattggaagtggacagcaacacaagctcccagagcagtaactcagagagtgaaacagaagatgaaagagtaggtgaagatacgcctttcctgggcatacagaaccccctggcagccagtcttgaggcaacacctgccttccgcctggctgacagcaggactaacccagcaggccgcttctcgacacaggaagaaatccaggccaggctgtctagtgtaattgctaaccaagaccctattgctgtataaaacctaaataaacacatagattcacctgtaaaactttattttatataataaagtattccaccttaaattaaacaatttattttattttagcagttctgcaaatagaaaacaggaaaaaaacttttataaattaaatatatgtatgtaaaaatgtgttatgtgccatatgtagcaattttttacagtatttcaaaacgagaaagatatcaatggtgcctttatgttatgttatgtcgagagcaagttttgtacagttacagtgattgcttttccacagtatttctgcaaaacctctcatagattcagtttttgctggcttcttgtgcattgcattatgatgttgactggatgtatgatttgcaagacttgcaact

SEQ ID NO: 14133 - DNA, 543 bp, Homo sapiens
  source 1..543: mol_type = unassigned DNA
gaataggaagagctccagtctagagctcccagcatgagcgacgcagaagacaggtgatttctgcatttccaactgaggtatttcttcataacaacgcaaatgaactaagacaacaagtctctgtgttctccttcatctatcatactacccgaggtttgtttacgtggtaaagacaaggttcggagagaaatggttgaaaccagcatagcttcttgagacacaatgacacttatgccacatgctattggccagagcaagtcacagaacatctggattcaagaggagggaaatggattccacaccttgatggaggagatgcaaagtcatatcacttgggacatggatacagggaggggtgcaatttgggatgtttttgcaattaacctaccacaggcttaaggaggcttttaggatttaccttctgctctaatgagtttcaaccaccatggcttagagaacatttcttaaaactcagtcatctttcatgtatccattgttctccaaagggactaagttttgttccatggtcagtcttttccatgt

SEQ ID NO: 14134 - DNA, 553 bp, Homo sapiens
  source 1..553: mol_type = unassigned DNA
atgcaattcatcacagtccacaaagcacagttcctaacagattctgaaaacgtgattttaaaaaaaatgagatttatccgtaaacgagggctaggctacagttggtagggcggctgtcaattcttctacggagttttaacctacactcaatggatgcatgaaaaaaagaaatgaaatgatttttttagctactttaaaaaataaaggtatttcttcataacaacgcaaatgaactaagacaacaagtctctgtgttctccttcatctatcatactacccgaggtttgtttacgtggtaaagacaaggttcggagagaaatggttgaaaccagcatagcttcttgagacacaatgacacttatgccacatgctattggccagagcaagtcacagaacatctggattcaagaggagggaaatggattccacaccttgatggaggagatgcaaagtcatatcacttgggacatggatacagggaggggtgcaatttgggatgtttttgcaattaacctaccacaggcttaaggaggcttttaggatttaccttctg

SEQ ID NO: 14135 - DNA, 623 bp, Homo sapiens
  source 1..623: mol_type = unassigned DNA
tgtcaattcttctacggagttttaacctacactcaatggatgcatgaaaaaaagaaatgaaatgatttttttagctactttaaaaaataaagccttgcctccccgattgaaagagatgaaaagccaggaatcggctgcaggttccaaactagtccttcggtgtgaaaccagttctgaatactcctctctcagattcaagtggttcaagaatgggaatgaattgaatcgaaaaaacaaaccacaaaatatcaagatacaaaaaaagccagggaagtcagaacttcgcattaacaaagcatcactggctgattctggagagtatatgtgcaaagtgatcagcaaattaggaaatgacagtgcctctgccaatatcaccatcgtggaatcaaacgagatcatcactggtatgccagcctcaactgaaggagcatatgtgtcttcagagtctcccattagaatatcagtatccacagaaggagcaaatacttcttcatctacatctacatccaccactgggacaagccatcttgtaaaatgtgcggagaaggagaaaactttctgtgtgaatggaggggagtgcttcatggtgaaagacctttcaaacccctcgagatacttgtgca

SEQ ID NO: 14136 - DNA, 2359 bp, Homo sapiens
  source 1..2359: mol_type = unassigned DNA
gaggccaggggagggtgcgaaggaggcgcctgcctccaacctgcgggcgggaggtgggtggctgcggggcaattgaaaaagagccggcgaggagttccccgaaacttgttggaactccgggctcgcgcggaggccaggagctgagcggcggcggctgccggacgatgggagcgtgagcaggacggtgataacctctccccgatcgggttgcgagggcgccgggcagaggccaggacgcgagccgccagcggtgggacccatcgacgacttcccggggcgacaggagcagccccgagagccagggcgagcgcccgttccaggtggccggaccgcccgccgcgtccgcgccgcgctccctgcaggcaacgggagacgcccccgcgcagcgcgagcgcctcagcgcggccgctcgctctccccctcgagggacaaacttttcccaaacccgatccgagcccttggaccaaactcgcctgcgccgagagccgtccgcgtagagcgctccgtctccggcgagatgtccgagcgcaaagaaggcagaggcaaagggaagggcaagaagaaggagcgaggctccggcaagaagccggagtccgcggcgggcagccagagcccagccttgcctccccgattgaaagagatgaaaagccaggaatcggctgcaggttccaaactagtccttcggtgtgaaaccagttctgaatactcctctctcagattcaagtggttcaagaatgggaatgaattgaatcgaaaaaacaaaccacaaaatatcaagatacaaaaaaagccagggaagtcagaacttcgcattaacaaagcatcactggctgattctggagagtatatgtgcaaagtgatcagcaaattaggaaatgacagtgcctctgccaatatcaccatcgtggaatcaaacgagatcatcactggtatgccagcctcaactgaaggagcatatgtgtcttcagagtctcccattagaatatcagtatccacagaaggagcaaatacttcttcatctacatctacatccaccactgggacaagccatcttgtaaaatgtgcggagaaggagaaaactttctgtgtgaatggaggggagtgcttcatggtgaaagacctttcaaacccctcgagatacttgtgcaagtgcccaaatgagtttactggtgatcgctgccaaaactacgtaatggccagcttctacaaggcggaggagctgtaccagaagagagtgctgaccataaccggcatctgcatcgccctccttgtggtcggcatcatgtgtgtggtggcctactgcaaaaccaagaaacagcggaaaaagctgcatgaccgtcttcggcagagccttcggtctgaacgaaacaatatgatgaacattgccaatgggcctcaccatcctaacccaccccccgagaatgtccagctggtgaatcaatacgtatctaaaaacgtcatctccagtgagcatattgttgagagagaagcagagacatccttttccaccagtcactatacttccacagcccatcactccactactgtcacccagactcctagccacagctggagcaacggacacactgaaagcatcctttccgaaagccactctgtaatcgtgatgtcatccgtagaaaacagtaggcacagcagcccaactgggggcccaagaggacgtcttaatggcacaggaggccctcgtgaatgtaacagcttcctcaggcatgccagagaaacccctgattcctaccgagactctcctcatagtgaaaggtaaaaccgaagggcaaagctactgcagaggagaaactcagtcagagaatccctgtgagcacctgcggtctcacctcaggaaatctactctaatcagaataaggggcggcagttacctgttctaggagtgctcctagttgatgaagtcatctctttgtttgacggaacttatttcttctgagcttctctcgtcgtcccagtgactgacaggcaacagactcttaaagagctgggatgctttgatgcggaaggtgcagcacatggagtttccagctctggccatgggctcagacccactcggggtctcagtgtcctcagttgtaacattagagagatggcatcaatgcttgataaggacccttctataattccaattgccagttatccaaactctgattcggtggtcgagctggcctcgtgttcttatctgctaaccctgtcttaccttccagcctcagttaagtcaaatcaagggctatgtcattgctgaatgtcatggggggcaactgcttgccctccaccctatagtatctattttatgaaattccaagaagggatgaataaataaatctcttggatgctg

SEQ ID NO: 14137 - DNA, 5931 bp, Homo sapiens
  source 1..5931: mol_type = unassigned DNA
gtggctgcggggcaattgaaaaagagccggcgaggagttccccgaaacttgttggaactccgggctcgcgcggaggccaggagctgagcggcggcggctgccggacgatgggagcgtgagcaggacggtgataacctctccccgatcgggttgcgagggcgccgggcagaggccaggacgcgagccgccagcggtgggacccatcgacgacttcccggggcgacaggagcagccccgagagccagggcgagcgcccgttccaggtggccggaccgcccgccgcgtccgcgccgcgctccctgcaggcaacgggagacgcccccgcgcagcgcgagcgcctcagcgcggccgctcgctctccccctcgagggacaaacttttcccaaacccgatccgagcccttggaccaaactcgcctgcgccgagagccgtccgcgtagagcgctccgtctccggcgagatgtccgagcgcaaagaaggcagaggcaaagggaagggcaagaagaaggagcgaggctccggcaagaagccggagtccgcggcgggcagccagagcccagccttgcctccccgattgaaagagatgaaaagccaggaatcggctgcaggttccaaactagtccttcggtgtgaaaccagttctgaatactcctctctcagattcaagtggttcaagaatgggaatgaattgaatcgaaaaaacaaaccacaaaatatcaagatacaaaaaaagccagggaagtcagaacttcgcattaacaaagcatcactggctgattctggagagtatatgtgcaaagtgatcagcaaattaggaaatgacagtgcctctgccaatatcaccatcgtggaatcaaacgagatcatcactggtatgccagcctcaactgaaggagcatatgtgtcttcagagtctcccattagaatatcagtatccacagaaggagcaaatacttcttcatctacatctacatccaccactgggacaagccatcttgtaaaatgtgcggagaaggagaaaactttctgtgtgaatggaggggagtgcttcatggtgaaagacctttcaaacccctcgagatacttgtgcaagtgcccaaatgagtttactggtgatcgctgccaaaactacgtaatggccagcttctacaaggcggaggagctgtaccagaagagagtgctgaccataaccggcatctgcatcgccctccttgtggtcggcatcatgtgtgtggtggcctactgcaaaaccaagaaacagcggaaaaagctgcatgaccgtcttcggcagagccttcggtctgaacgaaacaatatgatgaacattgccaatgggcctcaccatcctaacccaccccccgagaatgtccagctggtgaatcaatacgtatctaaaaacgtcatctccagtgagcatattgttgagagagaagcagagacatccttttccaccagtcactatacttccacagcccatcactccactactgtcacccagactcctagccacagctggagcaacggacacactgaaagcatcctttccgaaagccactctgtaatcgtgatgtcatccgtagaaaacagtaggcacagcagcccaactgggggcccaagaggacgtcttaatggcacaggaggccctcgtgaatgtaacagcttcctcaggcatgccagagaaacccctgattcctaccgagactctcctcatagtgaaaggtatgtgtcagccatgaccaccccggctcgtatgtcacctgtagatttccacacgccaagctcccccaaatcgcccccttcggaaatgtctccacccgtgtccagcatgacggtgtccatgccttccatggcggtcagccccttcatggaagaagagagacctctacttctcgtgacaccaccaaggctgcgggagaagaagtttgaccatcaccctcagcagttcagctccttccaccacaaccccgcgcatgacagtaacagcctccctgctagccccttgaggatagtggaggatgaggagtatgaaacgacccaagagtacgagccagcccaagagcctgttaagaaactcgccaatagccggcgggccaaaagaaccaagcccaatggccacattgctaacagattggaagtggacagcaacacaagctcccagagcagtaactcagagagtgaaacagaagatgaaagagtaggtgaagatacgcctttcctgggcatacagaaccccctggcagccagtcttgaggcaacacctgccttccgcctggctgacagcaggactaacccagcaggccgcttctcgacacaggaagaaatccaggccaggctgtctagtgtaattgctaaccaagaccctattgctgtataaaacctaaataaacacatagattcacctgtaaaactttattttatataataaagtattccaccttaaattaaacaatttattttattttagcagttctgcaaatagaaaacaggaaaaaaacttttataaattaaatatatgtatgtaaaaatgtgttatgtgccatatgtagcaattttttacagtatttcaaaacgagaaagatatcaatggtgcctttatgttatgttatgtcgagagcaagttttgtacagttacagtgattgcttttccacagtatttctgcaaaacctctcatagattcagtttttgctggcttcttgtgcattgcattatgatgttgactggatgtatgatttgcaagacttgcaactgtccctctgtttgcttgtagtagcacccgatcagtatgtcttgtaatggcacatccatccagatatgcctctcttgtgtatgaagttttctttgctttcagaatatgaaatgagttgtgtctactctgccagccaaaggtttgcctcattgggctctgagataatagtagatccaacagcatgctactattaaatacagcaagaaactgcattaagtaatgttaaatattaggaagaaagtaatactgtgatttaaaaaaaactatattattaatcagaagacagcttgctcttactaaaaggagctctcatttactttatttgattttatttttcttgacaaaaagcaacagttttagggatagcttagaaaatgggttctggcttgctatcagggtaaatctaacaccttacaagaggactgagtgtcactttctctctgggggaatgatccagcagcttatctagttgacaatcaaaacacggctgataaaggtgcaatcatttctgacatgtatttttcactgattttgaagctagtgattggttgtgtcttcttggctcaaaaagaagcatattacggcacaaaaagcccagcccagacagcacatgcagcattttgtctgaaatacttctagagtcaaacgtgcctgctgtacatagcgatgacttgtcatcatagggaagtatttccatcgtagagtgttcagaaggagtgactgtataggtggagagaagcttagtgactccgttgaaattttaaaatgtggatgaccacccctttctcccccttatttttcttttatctttccatgttgccttgatcaggtcataactatgcatgaacattttttatcaggaatggccgatgtgtatgtgatttgtaatcacaagtaatgattcatcaggaaatgtcaatcctgttggaaagattgcacctttacttgcagaagtgacccccacctgtgtcctgacctctccatttacaggctctctcacccatttcccccacctcctttaatttttgctttactgtcataaagtaggactaagattggtctaagcattgcatgttcttttgtgatggtaaatccaaaggaaggcctataagtattaacatttgaaataactgctaattcaggaaaatggaagaaaaaaaattatttgaaacacagaacccatttcatggcctgcctgatatctgtgaaatcagggctggagctttacttaggattcacatggcctcctaggaaccatgggacaaatgggaaacaggttatcgggggattcatgaagtcagtgagagtaattgcttcttttttgcgggtgaactgaatgtatttcttcaccaaatcttgatgttaacaattaaaaagaagaaatgacatgcaagtaggtcttagcagaaaaatgcaggctgggcatgagtcatgttgttaccctcccacatgctcctacaatccacagagatgcctgtctgcaggttcttgaagttattgttagtatttggtatctcaaatttttcgtcactgttcacatgccactttctctgtgcacagtggtatcctcatttgctttttaacctacactgaggagtctttgtcaggttgcactgattttccaattctgcagtaatgagtaagctcacggcatggggaagaagacagtcagtccaatgaagttctctaaattattttaacattgcctttgaaggccttgactcatccttagctatttcaatgaagaaattcctaccatgaatttaaaaccctaaaaattctgtttcaaattctttgggcattggggtactcagatatcccattgtggaagaattttaagaataaatagaagtttctgttgagaaccatgagcaacatgtttcttacaatgagaattgctatgcattttaaaattgcaaatatatatgaaaattgaagacaagaggaaattgtatttctaacttgattctgatcactcacagaggtggcatattattatagttgggacatcctttgcacccttcataaaaaaggccagctgactgctcagcatcacctgccaaggccactagatttgtgtttacaggggtatctctgtgatgcttgtcacatcactcttgaccacctctgttaataaattccgacagtgcagtggcgatcggagtgtgaacttatgttcccagcatatggaaagctatcttaggttttaaggtagtagaaattgcccaggagtttgacagcaactttgtttcccgggtctaaaatcgtatcccactgaggtgtatgcagtggagcataatacatgcaaatacatgcaaaactccttttgtttcacctaagattcactttctatcttactttcccttcctgcctagtgtgacttttgcccccaagagtgcctggacagcattctagtttctacaaaatggtcctctgtgtaggtgaatgtgtcccaaacctgctatcactttcttgtttcagtgtgactgtcttgttagaggtgaagtttatccagggtaacttgctcactaactattcctttttatggcctggggttaaagggcgcatggctcacactggtgaaaataaggaaggcctggtcttatcttgtattaataatactggctgcattccaccagccagagatttctatctgcgaagacctatgaaacactgaagagaaatgtaggcagaaggaaatggccacatatcacaagttctattatatattcttttgtaaatacatattgtatattacttggatgttttcttatatcatttactgtctttttgagttaatgtcagtttttactctctcaacttactatgtaacattgtaaataacataatgtcctttattatttatatttaagcatctaacatatagagttgttttcatataagtttaagataaatgtcaaaaatatatgttcttttgtttttctttgctttaaaattatgtatcttttccttttcttttttttaagaataatttattgttcaggagaaagaatgtatatgtaactgaaactatctgaagaatgcacattgaaggccgtgaggtactgataaactaaagaatttattattcaaaatactaagcaataagtaattgtgatttatttaaagttttgtccattttccatgaaagacatactgcaataaaaatgctactctgtggaga

SEQ ID NO: 14138 - DNA, 1769 bp, Homo sapiens
  source 1..1769: mol_type = unassigned DNA
tcgctctccccctcgagggacaaacttttcccaaacccgatccgagcccttggaccaaactcgcctgcgccgagagccgtccgcgtagagcgctccgtctccggcgagatgtccgagcgcaaagaaggcagaggcaaagggaagggcaagaagaaggagcgaggctccggcaagaagccggagtccgcggcgggcagccagagcccagccttgcctccccgattgaaagagatgaaaagccaggaatcggctgcaggttccaaactagtccttcggtgtgaaaccagttctgaatactcctctctcagattcaagtggttcaagaatgggaatgaattgaatcgaaaaaacaaaccacaaaatatcaagatacaaaaaaagccagggaagtcagaacttcgcattaacaaagcatcactggctgattctggagagtatatgtgcaaagtgatcagcaaattaggaaatgacagtgcctctgccaatatcaccatcgtggaatcaaacgagatcatcactggtatgccagcctcaactgaaggagcatatgtgtcttcagagtctcccattagaatatcagtatccacagaaggagcaaatacttcttcatctacatctacatccaccactgggacaagccatcttgtaaaatgtgcggagaaggagaaaactttctgtgtgaatggaggggagtgcttcatggtgaaagacctttcaaacccctcgagatacttgtgcaagtgccaacctggattcactggagcaagatgtactgagaatgtgcccatgaaagtccaaaaccaagaaaaggcggaggagctgtaccagaagagagtgctgaccataaccggcatctgcatcgccctccttgtggtcggcatcatgtgtgtggtggcctactgcaaaaccaagaaacagcggaaaaagctgcatgaccgtcttcggcagagccttcggtctgaacgaaacaatatgatgaacattgccaatgggcctcaccatcctaacccaccccccgagaatgtccagctggtgaatcaatacgtatctaaaaacgtcatctccagtgagcatattgttgagagagaagcagagacatccttttccaccagtcactatacttccacagcccatcactccactactgtcacccagactcctagccacagctggagcaacggacacactgaaagcatcctttccgaaagccactctgtaatcgtgatgtcatccgtagaaaacagtaggcacagcagcccaactgggggcccaagaggacgtcttaatggcacaggaggccctcgtgaatgtaacagcttcctcaggcatgccagagaaacccctgattcctaccgagactctcctcatagtgaaagacataaccttatagctgagctaaggagaaacaaggcacacagatccaaatgcatgcagatccagctatcagcaactcatcttagatcttcttccattccccatttgggcttcattctctaagaccccttggcctttaggaaggtatgtgtcagccatgaccaccccggctcgtatgtcacctgtagatttccacacgccaagctcccccaaatcgcccccttcggaaatgtctccacccgtgtccagcatgacggtgtccatgccttccatggcggtcagccccttcatggaagaagagagacctctacttctcgtgacaccaccaaggctgcgggagaagaagtttgaccatcaccctcagcagttcagctccttccaccacaaccccgcgc

SEQ ID NO: 14139 - DNA, 2035 bp, Homo sapiens
  source 1..2035: mol_type = unassigned DNA
gggacaaacttttcccaaacccgatccgagcccttggaccaaactcgcctgcgccgagagccgtccgcgtagagcgctccgtctccggcgagatgtccgagcgcaaagaaggcagaggcaaagggaagggcaagaagaaggagcgaggctccggcaagaagccggagtccgcggcgggcagccagagcccagccttgcctccccgattgaaagagatgaaaagccaggaatcggctgcaggttccaaactagtccttcggtgtgaaaccagttctgaatactcctctctcagattcaagtggttcaagaatgggaatgaattgaatcgaaaaaacaaaccacaaaatatcaagatacaaaaaaagccagggaagtcagaacttcgcattaacaaagcatcactggctgattctggagagtatatgtgcaaagtgatcagcaaattaggaaatgacagtgcctctgccaatatcaccatcgtggaatcaaacgagatcatcactggtatgccagcctcaactgaaggagcatatgtgtcttcagagtctcccattagaatatcagtatccacagaaggagcaaatacttcttcatctacatctacatccaccactgggacaagccatcttgtaaaatgtgcggagaaggagaaaactttctgtgtgaatggaggggagtgcttcatggtgaaagacctttcaaacccctcgagatacttgtgcaagtgcccaaatgagtttactggtgatcgctgccaaaactacgtaatggccagcttctacaagcatcttgggattgaatttatggaggcggaggagctgtaccagaagagagtgctgaccataaccggcatctgcatcgccctccttgtggtcggcatcatgtgtgtggtggcctactgcaaaaccaagaaacagcggaaaaagctgcatgaccgtcttcggcagagccttcggtctgaacgaaacaatatgatgaacattgccaatgggcctcaccatcctaacccaccccccgagaatgtccagctggtgaatcaatacgtatctaaaaacgtcatctccagtgagcatattgttgagagagaagcagagacatccttttccaccagtcactatacttccacagcccatcactccactactgtcacccagactcctagccacagctggagcaacggacacactgaaagcatcctttccgaaagccactctgtaatcgtgatgtcatccgtagaaaacagtaggcacagcagcccaactgggggcccaagaggacgtcttaatggcacaggaggccctcgtgaatgtaacagcttcctcaggcatgccagagaaacccctgattcctaccgagactctcctcatagtgaaaggtatgtgtcagccatgaccaccccggctcgtatgtcacctgtagatttccacacgccaagctcccccaaatcgcccccttcggaaatgtctccacccgtgtccagcatgacggtgtccatgccttccatggcggtcagccccttcatggaagaagagagacctctacttctcgtgacaccaccaaggctgcgggagaagaagtttgaccatcaccctcagcagttcagctccttccaccacaaccccgcgcatgacagtaacagcctccctgctagccccttgaggatagtggaggatgaggagtatgaaacgacccaagagtacgagccagcccaagagcctgttaagaaactcgccaatagccggcgggccaaaagaaccaagcccaatggccacattgctaacagattggaagtggacagcaacacaagctcccagagcagtaactcagagagtgaaacagaagatgaaagagtaggtgaagatacgcctttcctgggcatacagaaccccctggcagccagtcttgaggcaacacctgccttccgcctggctgacagcaggactaacccagcaggccgcttctcgacacaggaagaaatccaggccaggctgtctagtgtaattgctaaccaagaccctattgctgtataaaacct

SEQ ID NO: 14140 - DNA, 1992 bp, Homo sapiens
  source 1..1992: mol_type = unassigned DNA
atgtccgagcgcaaagaaggcagaggcaaagggaagggcaagaagaaggagcgaggctccggcaagaagccggagtccgcggcgggcagccagagcccagccttgcctccccgattgaaagagatgaaaagccaggaatcggctgcaggttccaaactagtccttcggtgtgaaaccagttctgaatactcctctctcagattcaagtggttcaagaatgggaatgaattgaatcgaaaaaacaaaccacaaaatatcaagatacaaaaaaagccagggaagtcagaacttcgcattaacaaagcatcactggctgattctggagagtatatgtgcaaagtgatcagcaaattaggaaatgacagtgcctctgccaatatcaccatcgtggaatcaaacgagatcatcactggtatgccagcctcaactgaaggagcatatgtgtcttcagagtctcccattagaatatcagtatccacagaaggagcaaatacttcttcatctacatctacatccaccactgggacaagccatcttgtaaaatgtgcggagaaggagaaaactttctgtgtgaatggaggggagtgcttcatggtgaaagacctttcaaacccctcgagatacttgtgcaagtgccaacctggattcactggagcaagatgtactgagaatgtgcccatgaaagtccaaaaccaagaaaaggcggaggagctgtaccagaagagagtgctgaccataaccggcatctgcatcgccctccttgtggtcggcatcatgtgtgtggtggcctactgcaaaaccaagaaacagcggaaaaagctgcatgaccgtcttcggcagagccttcggtctgaacgaaacaatatgatgaacattgccaatgggcctcaccatcctaacccaccccccgagaatgtccagctggtgaatcaatacgtatctaaaaacgtcatctccagtgagcatattgttgagagagaagcagagacatccttttccaccagtcactatacttccacagcccatcactccactactgtcacccagactcctagccacagctggagcaacggacacactgaaagcatcctttccgaaagccactctgtaatcgtgatgtcatccgtagaaaacagtaggcacagcagcccaactgggggcccaagaggacgtcttaatggcacaggaggccctcgtgaatgtaacagcttcctcaggcatgccagagaaacccctgattcctaccgagactctcctcatagtgaaaggtatgtgtcagccatgaccaccccggctcgtatgtcacctgtagatttccacacgccaagctcccccaaatcgcccccttcggaaatgtctccacccgtgtccagcatgacggtgtccatgccttccatggcggtcagccccttcatggaagaagagagacctctacttctcgtgacaccaccaaggctgcgggagaagaagtttgaccatcaccctcagcagttcagctccttccaccacaaccccgcgcatgacagtaacagcctccctgctagccccttgaggatagtggaggatgaggagtatgaaacgacccaagagtacgagccagcccaagagcctgttaagaaactcgccaatagccggcgggccaaaagaaccaagcccaatggccacattgctaacagattggaagtggacagcaacacaagctcccagagcagtaactcagagagtgaaacagaagatgaaagagtaggtgaagatacgcctttcctgggcatacagaaccccctggcagccagtcttgaggcaacacctgccttccgcctggctgacagcaggactaacccagcaggccgcttctcgacacaggaagaaatccaggccaggctgtctagtgtaattgctaaccaagaccctattgctgtataaaacctaaataaacacatagattcacctgtaaaactttattttatataataaagtattccaccttaaatt

SEQ ID NO: 14141 - DNA, 886 bp, Homo sapiens
  source 1..886: mol_type = unassigned DNA
gtgcctctgccaatatcaccatcgtggaatcaaacgagatcatcactggtatgccagcctcaactgaaggagcatatgtgtcttcagagtctcccattagaatatcagtatccacagaaggagcaaatacttcttcatctacatctacatccaccactgggacaagccatcttgtaaaatgtgcggagaaggagaaaactttctgtgtgaatggaggggagtgcttcatggtgaaagacctttcaaacccctcgagatacttgtgcaagtgccaacctggattcactggagcaagatgtactgagaatgtgcccatgaaagtccaaaaccaagaaagtgcccaaatgagtttactggtgatcgctgccaaaactacgtaatggccagcttctacagtacgtccactccctttctgtctctgcctgaataggagcatgctcagttggtgctgctttcttgttgctgcatctcccctcagattccacctagagctagatgtgtcttaccagatctaatattgactgcctctgcctgtcgcatgagaacattaacaaaagcaattgtattacttcctctgttcgcgactagttggctctgagatactaataggtgtgtgaggctccggatgtttctggaattgatattgaatgatgtgatacaaattgatagtcaatatcaagcagtgaaatatgataataaaggcatttcaaagtctcacttttattgataaaataaaaatcattctactgaacagtccatcttctttatacaatgaccacatcctgaaaagggtgttgctaagctgtaaccgatatgcacttgaaatgatggtaagttaattttgattcagaatgtgttatttgtcacaaataaacataataaaagg

SEQ ID NO: 14142 - DNA, 659 bp, Homo sapiens
  source 1..659: mol_type = unassigned DNA
ggttaaagcctggacttttctcactcccttgcaatacttccttcctttacacttaacttttagttccaaggcaggctgtggtacctgctcccggcctcctgtttatatatcataatgtcctatcacctttttttttcagagatcatcactggtatgccagcctcaactgaaggagcatatgtgtcttcagagtctcccattagaatatcagtatccacagaaggagcaaatacttcttcatctacatctacatccaccactgggacaagccatcttgtaaaatgtgcggagaaggagaaaactttctgtgtgaatggaggggagtgcttcatggtgaaagacctttcaaacccctcgagatacttgtgcaagtgcccaaatgagtttactggtgatcgctgccaaaactacgtaatggccagcttctacaaggcggaggagctgtaccagaagagagtgctgaccataaccggcatctgcatcgccctccttgtggtcggcatcatgtgtgtggtggcctactgcaaaaccaagaaacagcggaaaaagctgcatgaccgtcttcggcagagccttcggtctgaacgaaacaatatgatgaacattgccaatgggcctcaccatcctaacccaccccccgagaatgtccagctggtgaa

SEQ ID NO: 14143 - DNA, 1330 bp, Homo sapiens
  source 1..1330: mol_type = unassigned DNA
atggagatttattccccagacatgtctgaggtcgccgccgagaggtcctccagcccctccactcagctgagtgcagacccatctcttgatgggcttccggcagcagaagacatgccagagccccagactgaagatgggagaacccctggactcgtgggcctggccgtgccctgctgtgcgtgcctagaagctgagcgcctgagaggttgcctcaactcagagaaaatctgcattgtccccatcctggcttgcctggtcagcctctgcctctgcatcgccggcctcaagtgggtatttgtggacaagatctttgaatatgactctcctactcaccttgaccctggggggttaggccaggaccctattatttctctggacgcaactgctgcctcagctgtgtgggtgtcgtctgaggcatacacttcacctgtctctagggctcaatctgaaagtgaggttcaagttacagtgcaaggtgacaaggctgttgtctcctttgaaccatcagcggcaccgacaccgaagaatcgtatttttgccttttctttcttgccgtccactgcgccatccttcccttcacccacccggaaccctgaggtgagaacgcccaagtcagcaactcagccacaaacaacagaaactaatctccaaactgctcctaaactttctacatctacatccaccactgggacaagccatcttgtaaaatgtgcggagaaggagaaaactttctgtgtgaatggaggggagtgcttcatggtgaaagacctttcaaacccctcgagatacttgtgcaagtgcccaaatgagtttactggtgatcgctgccaaaactacgtaatggccagcttctacagtacgtccactccctttctgtctctgcctgaataggagcatgctcagttggtgctgctttcttgttgctgcatctcccctcagattccacctagagctagatgtgtcttaccagatctaatattgactgcctctgcctgtcgcatgagaacattaacaaaagcaattgtattacttcctctgttcgcgactagttggctctgagatactaataggtgtgtgaggctccggatgtttctggaattgatattgaatgatgtgatacaaattgatagtcaatatcaagcagtgaaatatgataataaaggcatttcaaagtctcacttttattgataaaataaaaatcattctactgaacagtccatcttctttatacaatgaccacatcctgaaaagggtgttgctaagctgtaaccgatatgcacttgaaatgatggtaagttaattttgattcagaatgtgttatttgtcacaa

SEQ ID NO: 14144 - DNA, 1094 bp, Homo sapiens
  source 1..1094: mol_type = unassigned DNA
ccccagactgaagatgggagaacccctggactcgtgggcctggccgtgccctgctgtgcgtgcctagaagctgagcgcctgagaggttgcctcaactcagagaaaatctgcattgtccccatcctggcttgcctggtcagcctctgcctctgcatcgccggcctcaagtgggtatttgtggacaagatctttgaatatgactctcctactcaccttgaccctggggggttaggccaggaccctattatttctctggacgcaactgctgcctcagctgtgtgggtgtcgtctgaggcatacacttcacctgtctctagggctcaatctgaaagtgaggttcaagttacagtgcaaggtgacaaggctgttgtctcctttgaaccatcagcggcaccgacaccgaagaatcgtatttttgccttttctttcttgccgtccactgcgccatccttcccttcacccacccggaaccctgaggtgagaacgcccaagtcagcaactcagccacaaacaacagaaactaatctccaaactgctcctaaactttgtgcccaaatgagtttactggtgatcgctgccaaaactacgtaatggccagcttctacagtacgtccactccctttctgtctctgcctgaataggagcatgctcagttggtgctgctttcttgttgctgcatctcccctcagattccacctagagctagatgtgtcttaccagatctaatattgactgcctctgcctgtcgcatgagaacattaacaaaagcaattgtattacttcctctgttcgcgactagttggctctgagatactaataggtgtgtgaggctccggatgtttctggaattgatattgaatgatgtgatacaaattgatagtcaatatcaagcagtgaaatatgataataaaggcatttcaaagtctcacttttattgataaaataaaaatcattctactgaacagtccatcttctttatacaatgaccacatcctgaaaagggtgttgctaagctgtaaccgatatgcacttgaaatgatggtaagttaattttgattcagaatgtgttatttgtcacaaataaacataataaa

SEQ ID NO: 14145 - DNA, 555 bp, Homo sapiens
  source 1..555: mol_type = unassigned DNA
tctgaacctttcctttggaaaactaatgactccacctatcattcccttggcatctagagaagctacattaggtggcacagctctttctgctcagcttctgctccagagcttcatcttcaggaaccacctaagcatttttttccccagtaggagttcagtctgctcattatacctaattgcaaaggagctatattcagagcaagaataataatttcagattttttaactggacttcaaagagcaggaaagtatgcagattcctaaacacataagcattgaagatattacagctacatctacatccaccactgggacaagccatcttgtaaaatgtgcggagaaggagaaaactttctgtgtgaatggaggggagtgcttcatggtgaaagacctttcaaacccctcgagatacttgtgcaagtgcccaaatgagtttactggtgatcgctgccaaaactacgtaatggccagcttctacaagcatcttgggattgaatttatggaggcggaggagctgtaccagaagagagtgctgaccataaccggcatctgcat

SEQ ID NO: 14146 - DNA, 570 bp, Homo sapiens
  source 1..570: mol_type = unassigned DNA
attaggtggcacagctctttctgctcagcttctgctccagagcttcatcttcaggaaccacctaagcatttttttccccagtaggagttcagtctgctcattatacctaattgcaaaggagctatattcagagcaagaataataatttcagattttttaactggacttcaaagagcaggaaagtatgcagattcctaaacacataagcattgaagatattacagctacatctacatccaccactgggacaagccatcttgtaaaatgtgcggagaaggagaaaactttctgtgtgaatggaggggagtgcttcatggtgaaagacctttcaaacccctcgagatacttgtgcaagtgccaacctggattcactggagcaagatgtactgagaatgtgcccatgaaagtccaaaaccaagaaaaggcggaggagctgtaccagaagagagtgctgaccataaccggcatctgcatcgccctccttgtggtcggcatcatgtgtgtggtggcctactgcaaaaccaagaaacagcggaaaaagctgcatgaccgtcttcggcagagccttcg

SEQ ID NO: 14147 - DNA, 563 bp, Homo sapiens
  source 1..563: mol_type = unassigned DNA
agcttctgctccagagcttcatcttcaggaaccacctaagcatttttttccccagtaggagttcagtctgctcattatacctaattgcaaaggagctatattcagagcaagaataataatttcagattttttaactggacttcaaagagcaggaaagtatgcagattcctaaacacataagcattgaagatattacagctacatctacatccaccactgggacaagccatcttgtaaaatgtgcggagaaggagaaaactttctgtgtgaatggaggggagtgcttcatggtgaaagacctttcaaacccctcgagatacttgtgcaagtgcccaaatgagtttactggtgatcgctgccaaaactacgtaatggccagcttctacaaggcggaggagctgtaccagaagagagtgctgaccataaccggcatctgcatcgccctccttgtggtcggcatcatgtgtgtggtggcctactgcaaaaccaagaaacagcggaaaaagctgcatgaccgtcttcggcagagccttcggtctgaacgaaacaatatgatgaacatt

SEQ ID NO: 14148 - DNA, 1173 bp, Homo sapiens
  source 1..1173: mol_type = unassigned DNA
agaacttatatgagaaaaactagaaggagtctccagtgtcccaagcccctgtttggggttttggggcagaagcatttgttgctttctgtgaatgaaacagacaagtgatgaggaaagtggaagattagaagaagtaaaagagatacagctaagaaaataattagataaccaatgagcaagaagtatttgaggccagctacccacaatcaaaaatccaagtccaacctgataacattttcagaccaaattaccatcctcttggcttctgctcctgcctctgccaatgggtgtctttgggtaaaaattaattaattaattaatttaattaaataaaattcacctccttggaactttgcttctgccttttaaaaaaaggaatgaaatagtatcaaatgccttttctgattataaagataatctttccattcccacacaaggaaataatttaggggatagttcagcgacagaacttctccctcagtaaggtcttttaagggttaataaagacacagtgtgctggtattttgcacacctcataaaaagagacgttccctatgtgaactcacagaggcgtacctgagcactgcttcttaaccacacaccatttgtctggttcaatgtgcatgcacagagagccataatagtcatgtgtaatgtgttttggagtgcagtgtattgctcttttctgaaactttttccctttctttcttttttttgtcaactttctgcattggcagagcatcttgggattgaatttatgggtatggaccaatcatcattccttttagcctgcagaatttagagcctatgagctgaaatctttttcccttcctactcttacctttcagttcctaactaatttcctttttctttagaagggatcatacagctataacaatgatttctctgccttcaatctatgattagtttactgaaatgttactgagtgcagcaggttttagattcctaagcatccttcacttagagtttaaaagtaccctacctgctgcaaattcacatatatcccacgctgcttaacccactgattggatctagctctgctgttatataaaagctgggtaaagtgaaagacagttgagatatataacttccccctcagtaagatcttctatgggttagaaaagacacagggggctgctatccgcatgcttc

SEQ ID NO: 14149 - DNA, 2401 bp, Homo sapiens
  source 1..2401: mol_type = unassigned DNA
ctctttctgctcagcttctgctccagagcttcatcttcaggaaccacctaagcatttttttccccagtaggagttcagtctgctcattatacctaattgcaaaggagctatattcagagcaagaataataatttcagattttttaactggacttcaaagagcaggaaagtatgcagattcctaaacacataagcattgaagatattacagctacatctacatccaccactgggacaagccatcttgtaaaatgtgcggagaaggagaaaactttctgtgtgaatggaggggagtgcttcatggtgaaagacctttcaaacccctcgagatacttgtgcaagtgccaacctggattcactggagcaagatgtactgagaatgtgcccatgaaagtccaaaaccaagaaaaggcggaggagctgtaccagaagagagtgctgaccataaccggcatctgcatcgccctccttgtggtcggcatcatgtgtgtggtggcctactgcaaaaccaagaaacagcggaaaaagctgcatgaccgtcttcggcagagccttcggtctgaacgaaacaatatgatgaacattgccaatgggcctcaccatcctaacccaccccccgagaatgtccagctggtgaatcaatacgtatctaaaaacgtcatctccagtgagcatattgttgagagagaagcagagacatccttttccaccagtcactatacttccacagcccatcactccactactgtcacccagactcctagccacagctggagcaacggacacactgaaagcatcctttccgaaagccactctgtaatcgtgatgtcatccgtagaaaacagtaggcacagcagcccaactgggggcccaagaggacgtcttaatggcacaggaggccctcgtgaatgtaacagcttcctcaggcatgccagagaaacccctgattcctaccgagactctcctcatagtgaaagacataaccttatagctgagctaaggagaaacaaggcacacagatccaaatgcatgcagatccagctatcagcaactcatcttagatcttcttccattccccatttgggcttcattctctaagaccccttggcctttaggaaggtatgtgtcagccatgaccaccccggctcgtatgtcacctgtagatttccacacgccaagctcccccaaatcgcccccttcggaaatgtctccacccgtgtccagcatgacggtgtccatgccttccatggcggtcagccccttcatggaagaagagagacctctacttctcgtgacaccaccaaggctgcgggagaagaagtttgaccatcaccctcagcagttcagctccttccaccacaaccccgcgcatgacagtaacagcctccctgctagccccttgaggatagtggaggatgaggagtatgaaacgacccaagagtacgagccagcccaagagcctgttaagaaactcgccaatagccggcgggccaaaagaaccaagcccaatggccacattgctaacagattggaagtggacagcaacacaagctcccagagcagtaactcagagagtgaaacagaagatgaaagagtaggtgaagatacgcctttcctgggcatacagaaccccctggcagccagtcttgaggcaacacctgccttccgcctggctgacagcaggactaacccagcaggccgcttctcgacacaggaagaaatccaggccaggctgtctagtgtaattgctaaccaagaccctattgctgtataaaacctaaataaacacatagattcacctgtaaaactttattttatataataaagtattccaccttaaattaaacaatttattttattttagcagttctgcaaatagaaaacaggaaaaaaacttttataaattaaatatatgtatgtaaaaatgtgttatgtgccatatgtagcaattttttacagtatttcaaaacgagaaagatatcaatggtgcctttatgttatgttatgtcgagagcaagttttgtacagttacagtgattgcttttccacagtatttctgcaaaacctctcatagattcagtttttgctggcttcttgtgcattgcattatgatgttgactggatgtatgatttgcaagacttgcaactgtccctctgtttgcttgtagtagcacccgatcagtatgtcttgtaatggcacatccatccagatatgcctctcttgtgtatgaagttttctttgctttcagaatatgaaatgagttgtgtctactctgccagccaaaggtttgcctcattgggctctgagataatagtagatccaacagcatgctactattaaatacagcaagaaactgcattaagtaatgttaaatattaggaagaaagtaatactgtgattt

SEQ ID NO: 14150 - DNA, 762 bp, Homo sapiens
  source 1..762: mol_type = unassigned DNA
atgagatggcgacgcgccccgcgccgctccgggcgtcccggcccccgggcccagcgccccggctccgccgcccgctcgtcgccgccgctgccgctgctgccactactgctgctgctggggaccgcggccctggcgccgggggcggcggccggcaacgaggcggctcccgcgggggcctcggtgtgctactcgtccccgcccagcgtgggatcggtgcaggagctagctcagcgcgccgcggtggtgatcgagggaaaggtgcacccgcagcggcggcagcagggggcactcgacaggaaggcggcggcggcggcgggcgaggcaggggcgtggggcggcgatcgcgagccgccagccgcgggcccacgggcgctggggccgcccgccgaggagccgctgctcgccgccaacgggaccgtgccctcttggcccaccgccccggtgcccagcgccggcgagcccggggaggaggcgccctatctggtgaaggtgcaccaggtgtgggcggtgaaagccgggggcttgaagaaggactcgctgctcaccgtgcgcctggggacctggggccaccccgccttcccctcctgcgggaggctcaaggaggacagcaggtacatcttcttcatggagcccgacgccaacagcaccagccgcgcgccggccgccttccgagcctctttcccccctctggagacgggccggaacctcaagaaggaggtcagccgggtgctgtgcaagcggtgcgcttttccccctggtctt

SEQ ID NO: 14151 - DNA, 2923 bp, Homo sapiens
  source 1..2923: mol_type = unassigned DNA
cggttttccagcgggctctgtttcccctcccaaggcggcggcggctgagcggcggagccccccaaatggcctggccagatgcggcaggtttgctgctcagcgctgccgccgccgccactggagaagggtcggtgcagcagctacagcgacagcagcagcagcagcagcgagaggagcagcagcagcagcagcagcagcagcgagagcggcagcagcagcaggagcagcagcaacaacagcagcatctctcgtcccgctgcgcccccagagccgcggccgcagcaacagccgcagccccgcagccccgcagcccggagagccgccgcccgttcgcgagccgcagccgccggcggcatgaggcgcgacccggcccccggcttctccatgctgctcttcggtgtgtcgctcgcctgctactcgcccagcctcaagtcagtgcaggaccaggcgtacaaggcacccgtggtggtggagggcaaggtacaggggctggtcccagccggcggctccagctccaacagcacccgagagccgcccgcctcgggtcgggtggcgttggtaaaggtgctggacaagtggccgctccggagcggggggctgcagcgcgagcaggtgatcagcgtgggctcctgtgtgccgctcgaaaggaaccagcgctacatctttttcctggagcccacggaacagcccttagtctttaagacggcctttgcccccctcgataccaacggcaaaaatctcaagaaagaggtgggcaagatcctgtgcactgactgcgccacccggcccaagttgaagaagatgaagagccagacgggacaggtgggtgagaagcaatcgctgaagtgtgaggcagcagccggtaatccccagccttcctaccgttggttcaaggatggcaaggagctcaaccgcagccgagacattcgcatcaaatatggcaacggcagaaagaactcacgactacagttcaacaaggtgaaggtggaggacgctggggagtatgtctgcgaggccgagaacatcctggggaaggacaccgtccggggccggctttacgtcaacagcgtgagcaccaccctgtcatcctggtcggggcacgcccggaagtgcaacgagacagccaagtcctattgcgtcaatggaggcgtctgctactacatcgagggcatcaaccagctctcctgcaaatgtccaaatggattcttcggacagagatgtttggagaaactgcctttgcgattgtacatgccagatcctaagcaaaagcaccttggatttgaattaaaggaagccgaggagctgtaccagaagagggtcctgaccatcacgggcatctgcgtggctctgctggtcgtgggcatcgtctgtgtggtggcctactgcaagaccaaaaaacagcggaagcagatgcacaaccacctccggcagaacatgtgcccggcccatcagaaccggagcttggccaatgggcccagccacccccggctggacccagaggagatccagatggcagattatatttccaagaacgtgccagccacagaccatgtcatcaggagagaaactgagaccaccttctctgggagccactcctgttctccttctcaccactgctccacagccacacccacctccagccacagacacgagagccacacgtggagcctggaacgttctgagagcctgacttctgactcccagtcggggatcatgctatcatcagtgggtaccagcaaatgcaacagcccagcatgtgtggaggcccgggcaaggcgggcagcagcctacaacctggaggagcggcgcagggccaccgcgccaccctatcacgattccgtggactcccttcgcgactccccacacagcgagaggtacgtgtcggccctgaccacgcccgcgcgcctctcgcccgtggacttccactactcgctggccacgcaggtgccaactttcgagatcacgtcccccaactcggcgcacgccgtgtcgctgccgccggcggcgcccatcagttaccgcctggccgagcagcagccgttactgcggcacccggcgccccccggcccgggacccggacccgggcccgggcccgggcccggcgcagacatgcagcgcagctatgacagctactattaccccgcggcggggcccggaccgcggcgcgggacctgcgcgctcggcggcagcctgggcagcctgcctgccagccccttccgcatccccgaggacgacgagtacgagaccacgcaggagtgcgcgcccccgccgccgccgcggccgcgcgcgcgcggtgcgtcccgcaggacgtcggcggggccccggcgctggcgccgctcgcgcctcaacgggctggcggcgcagcgcgcacgggcggcgagggactcgctgtcgctgagcagcggctcgggcggcggctcagcctcggcgtcggacgacgacgcggacgacgcggacggggcgctggcggccgagagcacacctttcctgggcctgcgtggggcgcacgacgcgctgcgctcggactcgccgccactgtgcccggcggccgacagcaggacttactactcactggacagccacagcacgcgggccagcagcagacacagccgcgggccgcccccgcgggccaagcaggactcggcgccactctagggccccgccgcgcgcccctccgccccgcccgccccactatctttaaggagaccagagaccgcctactggagagaaaggaggaaaaaagaaataaaaatatttttattttctataaaaggaaaaaagtataacaaaatgttttattttcattttagcaaaaattgtcttataatactagctaacggcaaaggcgtttttatagggaaactatttatatgtaacatcctgatttacagcttcggaaaaaaaaaagaaacaacaaaaaaaa

SEQ ID NO: 14152 - DNA, 3020 bp, Homo sapiens
  source 1..3020: mol_type = unassigned DNA
cctccaggtcctggcgcacagggtgggagcgctgcgctgcgccgcgctgcgcatcgcggcccgcttgccgcctgccccctgccctagctgggccacctccccgggctgccggtggagggctaagaggcgctaacgttacgctgtttccggttttccagcgggctctgtttcccctcccaaggcggcggcggctgagcggcggagccccccaaatggcctggccagatgcggcaggtttgctgctcagcgctgccgccgccgccactggagaagggtcggtgcagcagctacagcgacagcagcagcagcagcagcgagaggagcagcagcagcagcagcagcagcagcgagagcggcagcagcagcaggagcagcagcaacaacagcagcatctctcgtcccgctgcgcccccagagccgcggccgcagcaacagccgcagccccgcagccccgcagcccggagagccgccgcccgttcgcgagccgcagccgccggcggcatgaggcgcgacccggcccccggcttctccatgctgctcttcggtgtgtcgctcgcctgctactcgcccagcctcaagtcagtgcaggaccaggcgtacaaggcacccgtggtggtggagggcaaggtacaggggctggtcccagccggcggctccagctccaacagcacccgagagccgcccgcctcgggtcgggtggcgttggtaaaggtgctggacaagtggccgctccggagcggggggctgcagcgcgagcaggtgatcagcgtgggctcctgtgtgccgctcgaaaggaaccagcgctacatctttttcctggagcccacggaacagcccttagtctttaagacggcctttgcccccctcgataccaacggcaaaaatctcaagaaagaggtgggcaagatcctgtgcactgactgcgccacccggcccaagttgaagaagatgaagagccagacgggacaggtgggtgagaagcaatcgctgaagtgtgaggcagcagccggtaatccccagccttcctaccgttggttcaaggatggcaaggagctcaaccgcagccgagacattcgcatcaaatatggcaacggcagaaagaactcacgactacagttcaacaaggtgaaggtggaggacgctggggagtatgtctgcgaggccgagaacatcctggggaaggacaccgtccggggccggctttacgtcaacagcgtgagcaccaccctgtcatcctggtcggggcacgcccggaagtgcaacgagacagccaagtcctattgcgtcaatggaggcgtctgctactacatcgagggcatcaaccagctctcctgcaaatgtccaaatggattcttcggacagagatgtttggagaaactgcctttgcgattgtacatgccagatcctaagcaaaaagccgaggagctgtaccagaagagggtcctgaccatcacgggcatctgcgtggctctgctggtcgtgggcatcgtctgtgtggtggcctactgcaagaccaaaaaacagcggaagcagatgcacaaccacctccggcagaacatgtgcccggcccatcagaaccggagcttggccaatgggcccagccacccccggctggacccagaggagatccagatggcagattatatttccaagaacgtgccagccacagaccatgtcatcaggagagaaactgagaccaccttctctgggagccactcctgttctccttctcaccactgctccacagccacacccacctccagccacagacacgagagccacacgtggagcctggaacgttctgagagcctgacttctgactcccagtcggggatcatgctatcatcagtgggtaccagcaaatgcaacagcccagcatgtgtggaggcccgggcaaggcgggcagcagcctacaacctggaggagcggcgcagggccaccgcgccaccctatcacgattccgtggactcccttcgcgactccccacacagcgagaggtacgtgtcggccctgaccacgcccgcgcgcctctcgcccgtggacttccactactcgctggccacgcaggtgccaactttcgagatcacgtcccccaactcggcgcacgccgtgtcgctgccgccggcggcgcccatcagttaccgcctggccgagcagcagccgttactgcggcacccggcgccccccggcccgggacccggacccgggcccgggcccgggcccggcgcagacatgcagcgcagctatgacagctactattaccccgcggcggggcccggaccgcggcgcgggacctgcgcgctcggcggcagcctgggcagcctgcctgccagccccttccgcatccccgaggacgacgagtacgagaccacgcaggagtgcgcgcccccgccgccgccgcggccgcgcgcgcgcggtgcgtcccgcaggacgtcggcggggccccggcgctggcgccgctcgcgcctcaacgggctggcggcgcagcgcgcacgggcggcgagggactcgctgtcgctgagcagcggctcgggcggcggctcagcctcggcgtcggacgacgacgcggacgacgcggacggggcgctggcggccgagagcacacctttcctgggcctgcgtggggcgcacgacgcgctgcgctcggactcgccgccactgtgcccggcggccgacagcaggacttactactcactggacagccacagcacgcgggccagcagcagacacagccgcgggccgcccccgcgggccaagcaggactcggcgccactctagggccccgccgcgcgcccctccgccccgcccgccccactatctttaaggagaccagagaccgcctactggagagaaaggaggaaaaaagaaataaaaatatttttattttctataaaaggaaaaaagtataacaaaatgttttattttcattttagcaaaaattgtcttataatactagctaacggcaaaggcgtttttatagggaaactatttatatgtaacatcctgatttacagcttcgg

SEQ ID NO: 14153 - DNA, 1944 bp, Homo sapiens
  source 1..1944: mol_type = unassigned DNA
atgtcggagtccaggaggaggggccgcggccgcggcaagaagcacccagaggggaggaagcgggagagggagcccgatcccggggagaaagccacccggcccaagttgaagaagatgaagagccagacgggacaggtgggtgagaagcaatcgctgaagtgtgaggcagcagccggtaatccccagccttcctaccgttggttcaaggatggcaaggagctcaaccgcagccgagacattcgcatcaaatatggcaacggcagaaagaactcacgactacagttcaacaaggtgaaggtggaggacgctggggagtatgtctgcgaggccgagaacatcctggggaaggacaccgtccggggccggctttacgtcaacagcgtgagcaccaccctgtcatcctggtcggggcacgcccggaagtgcaacgagacagccaagtcctattgcgtcaatggaggcgtctgctactacatcgagggcatcaaccagctctcctgcaaatgtccaaatggattcttcggacagagatgtttggagaaactgcctttgcgattgtacatgccagatcctaagcaaaaagccgaggagctgtaccagaagagggtcctgaccatcacgggcatctgcgtggctctgctggtcgtgggcatcgtctgtgtggtggcctactgcaagaccaaaaaacagcggaagcagatgcacaaccacctccggcagaacatgtgcccggcccatcagaaccggagcttggccaatgggcccagccacccccggctggacccagaggagatccagatggcagattatatttccaagaacgtgccagccacagaccatgtcatcaggagagaaactgagaccaccttctctgggagccactcctgttctccttctcaccactgctccacagccacacccacctccagccacagacacgagagccacacgtggagcctggaacgttctgagagcctgacttctgactcccagtcggggatcatgctatcatcagtgggtaccagcaaatgcaacagcccagcatgtgtggaggcccgggcaaggcgggcagcagcctacaacctggaggagcggcgcagggccaccgcgccaccctatcacgattccgtggactcccttcgcgactccccacacagcgagaggtacgtgtcggccctgaccacgcccgcgcgcctctcgcccgtggacttccactactcgctggccacgcaggtgccaactttcgagatcacgtcccccaactcggcgcacgccgtgtcgctgccgccggcggcgcccatcagttaccgcctggccgagcagcagccgttactgcggcacccggcgccccccggcccgggacccggacccgggcccgggcccgggcccggcgcagacatgcagcgcagctatgacagctactattaccccgcggcggggcccggaccgcggcgcgggacctgcgcgctcggcggcagcctgggcagcctgcctgccagccccttccgcatccccgaggacgacgagtacgagaccacgcaggagtgcgcgcccccgccgccgccgcggccgcgcgcgcgcggtgcgtcccgcaggacgtcggcggggccccggcgctggcgccgctcgcgcctcaacgggctggcggcgcagcgcgcacgggcggcgagggactcgctgtcgctgagcagcggctcgggcggcggctcagcctcggcgtcggacgacgacgcggacgacgcggacggggcgctggcggccgagagcacacctttcctgggcctgcgtggggcgcacgacgcgctgcgctcggactcgccgccactgtgcccggcggccgacagcaggacttactactcactggacagccacagcacgcgggccagcagcagacacagccgcgggccgcccccgcgggccaagcaggactcggcgccactctag

SEQ ID NO: 14154 - DNA, 2535 bp, Homo sapiens
  source 1..2535: mol_type = unassigned DNA
atgcggcaggtttgctgctcagcgctgccgccgccgccactggagaagggtcggtgcagcagctacagcgacagcagcagcagcagcagcgagaggagcagcagcagcagcagcagcagcagcgagagcggcagcagcagcaggagcagcagcaacaacagcagcatctctcgtcccgctgcgcccccagagccgcggccgcagcaacagccgcagccccgcagccccgcagcccggagagccgccgcccgttcgcgagccgcagccgccggcggcatgaggcgcgacccggcccccggcttctccatgctgctcttcggtgtgtcgctcgcctgctactcgcccagcctcaagtcagtgcaggaccaggcgtacaaggcacccgtggtggtggagggcaaggtacaggggctggtcccagccggcggctccagctccaacagcacccgagagccgcccgcctcgggtcgggtggcgttggtaaaggtgctggacaagtggccgctccggagcggggggctgcagcgcgagcaggtgatcagcgtgggctcctgtgtgccgctcgaaaggaaccagcgctacatctttttcctggagcccacggaacagcccttagtctttaagacggcctttgcccccctcgataccaacggcaaaaatctcaagaaagaggtgggcaagatcctgtgcactgactgcgccacccggcccaagttgaagaagatgaagagccagacgggacaggtgggtgagaagcaatcgctgaagtgtgaggcagcagccggtaatccccagccttcctaccgttggttcaaggatggcaaggagctcaaccgcagccgagacattcgcatcaaatatggcaacggcagaaagaactcacgactacagttcaacaaggtgaaggtggaggacgctggggagtatgtctgcgaggccgagaacatcctggggaaggacaccgtccggggccggctttacgtcaacagcgtgagcaccaccctgtcatcctggtcggggcacgcccggaagtgcaacgagacagccaagtcctattgcgtcaatggaggcgtctgctactacatcgagggcatcaaccagctctcctgcaagtgtcctgtgggatacaccggggacaggtgtcagcagttcgcaatggtcaacttctccaaagccgaggagctgtaccagaagagggtcctgaccatcacgggcatctgcgtggctctgctggtcgtgggcatcgtctgtgtggtggcctactgcaagaccaaaaaacagcggaagcagatgcacaaccacctccggcagaacatgtgcccggcccatcagaaccggagcttggccaatgggcccagccacccccggctggacccagaggagatccagatggcagattatatttccaagaacgtgccagccacagaccatgtcatcaggagagaaactgagaccaccttctctgggagccactcctgttctccttctcaccactgctccacagccacacccacctccagccacagacacgagagccacacgtggagcctggaacgttctgagagcctgacttctgactcccagtcggggatcatgctatcatcagtgggtaccagcaaatgcaacagcccagcatgtgtggaggcccgggcaaggcgggcagcagcctacaacctggaggagcggcgcagggccaccgcgccaccctatcacgattccgtggactcccttcgcgactccccacacagcgagaggtacgtgtcggccctgaccacgcccgcgcgcctctcgcccgtggacttccactactcgctggccacgcaggtgccaactttcgagatcacgtcccccaactcggcgcacgccgtgtcgctgccgccggcggcgcccatcagttaccgcctggccgagcagcagccgttactgcggcacccggcgccccccggcccgggacccggacccgggcccgggcccgggcccggcgcagacatgcagcgcagctatgacagctactattaccccgcggcggggcccggaccgcggcgcgggacctgcgcgctcggcggcagcctgggcagcctgcctgccagccccttccgcatccccgaggacgacgagtacgagaccacgcaggagtgcgcgcccccgccgccgccgcggccgcgcgcgcgcggtgcgtcccgcaggacgtcggcggggccccggcgctggcgccgctcgcgcctcaacgggctggcggcgcagcgcgcacgggcggcgagggactcgctgtcgctgagcagcggctcgggcggcggctcagcctcggcgtcggacgacgacgcggacgacgcggacggggcgctggcggccgagagcacacctttcctgggcctgcgtggggcgcacgacgcgctgcgctcggactcgccgccactgtgcccggcggccgacagcaggacttactactcactggacagccacagcacgcgggccagcagcagacacagccgcgggccgcccccgcgggccaagcaggactcggcgccactctag

SEQ ID NO: 14155 - DNA, 2559 bp, Homo sapiens
  source 1..2559: mol_type = unassigned DNA
atgcggcaggtttgctgctcagcgctgccgccgccgccactggagaagggtcggtgcagcagctacagcgacagcagcagcagcagcagcgagaggagcagcagcagcagcagcagcagcagcgagagcggcagcagcagcaggagcagcagcaacaacagcagcatctctcgtcccgctgcgcccccagagccgcggccgcagcaacagccgcagccccgcagccccgcagcccggagagccgccgcccgttcgcgagccgcagccgccggcggcatgaggcgcgacccggcccccggcttctccatgctgctcttcggtgtgtcgctcgcctgctactcgcccagcctcaagtcagtgcaggaccaggcgtacaaggcacccgtggtggtggagggcaaggtacaggggctggtcccagccggcggctccagctccaacagcacccgagagccgcccgcctcgggtcgggtggcgttggtaaaggtgctggacaagtggccgctccggagcggggggctgcagcgcgagcaggtgatcagcgtgggctcctgtgtgccgctcgaaaggaaccagcgctacatctttttcctggagcccacggaacagcccttagtctttaagacggcctttgcccccctcgataccaacggcaaaaatctcaagaaagaggtgggcaagatcctgtgcactgactgcgccacccggcccaagttgaagaagatgaagagccagacgggacaggtgggtgagaagcaatcgctgaagtgtgaggcagcagccggtaatccccagccttcctaccgttggttcaaggatggcaaggagctcaaccgcagccgagacattcgcatcaaatatggcaacggcagaaagaactcacgactacagttcaacaaggtgaaggtggaggacgctggggagtatgtctgcgaggccgagaacatcctggggaaggacaccgtccggggccggctttacgtcaacagcgtgagcaccaccctgtcatcctggtcggggcacgcccggaagtgcaacgagacagccaagtcctattgcgtcaatggaggcgtctgctactacatcgagggcatcaaccagctctcctgcaagtgtcctgtgggatacaccggggacaggtgtcagcagttcgcaatggtcaacttctccaagcaccttggatttgaattaaaggaagccgaggagctgtaccagaagagggtcctgaccatcacgggcatctgcgtggctctgctggtcgtgggcatcgtctgtgtggtggcctactgcaagaccaaaaaacagcggaagcagatgcacaaccacctccggcagaacatgtgcccggcccatcagaaccggagcttggccaatgggcccagccacccccggctggacccagaggagatccagatggcagattatatttccaagaacgtgccagccacagaccatgtcatcaggagagaaactgagaccaccttctctgggagccactcctgttctccttctcaccactgctccacagccacacccacctccagccacagacacgagagccacacgtggagcctggaacgttctgagagcctgacttctgactcccagtcggggatcatgctatcatcagtgggtaccagcaaatgcaacagcccagcatgtgtggaggcccgggcaaggcgggcagcagcctacaacctggaggagcggcgcagggccaccgcgccaccctatcacgattccgtggactcccttcgcgactccccacacagcgagaggtacgtgtcggccctgaccacgcccgcgcgcctctcgcccgtggacttccactactcgctggccacgcaggtgccaactttcgagatcacgtcccccaactcggcgcacgccgtgtcgctgccgccggcggcgcccatcagttaccgcctggccgagcagcagccgttactgcggcacccggcgccccccggcccgggacccggacccgggcccgggcccgggcccggcgcagacatgcagcgcagctatgacagctactattaccccgcggcggggcccggaccgcggcgcgggacctgcgcgctcggcggcagcctgggcagcctgcctgccagccccttccgcatccccgaggacgacgagtacgagaccacgcaggagtgcgcgcccccgccgccgccgcggccgcgcgcgcgcggtgcgtcccgcaggacgtcggcggggccccggcgctggcgccgctcgcgcctcaacgggctggcggcgcagcgcgcacgggcggcgagggactcgctgtcgctgagcagcggctcgggcggcggctcagcctcggcgtcggacgacgacgcggacgacgcggacggggcgctggcggccgagagcacacctttcctgggcctgcgtggggcgcacgacgcgctgcgctcggactcgccgccactgtgcccggcggccgacagcaggacttactactcactggacagccacagcacgcgggccagcagcagacacagccgcgggccgcccccgcgggccaagcaggactcggcgccactctag

SEQ ID NO: 14156 - DNA, 1682 bp, Homo sapiens
  source 1..1682: mol_type = unassigned DNA
atgcggcaggtttgctgctcagcgctgccgccgccgccactggagaagggtcggtgcagcagctacagcgacagcagcagcagcagcagcgagaggagcagcagcagcagcagcagcagcagcgagagcggcagcagcagcaggagcagcagcaacaacagcagcatctctcgtcccgctgcgcccccagagccgcggccgcagcaacagccgcagccccgcagccccgcagcccggagagccgccgcccgttcgcgagccgcagccgccggcggcatgaggcgcgacccggcccccggcttctccatgctgctcttcggtgtgtcgctcgcctgctactcgcccagcctcaagtcagtgcaggaccaggcgtacaaggcacccgtggtggtggagggcaaggtacaggggctggtcccagccggcggctccagctccaacagcacccgagagccgcccgcctcgggtcgggtggcgttggtaaaggtgctggacaagtggccgctccggagcggggggctgcagcgcgagcaggtgatcagcgtgggctcctgtgtgccgctcgaaaggaaccagcgctacatctttttcctggagcccacggaacagcccttagtctttaagacggcctttgcccccctcgataccaacggcaaaaatctcaagaaagaggtgggcaagatcctgtgcactgactgcgccacccggcccaagttgaagaagatgaagagccagacgggacaggtgggtgagaagcaatcgctgaagtgtgaggcagcagccggtaatccccagccttcctaccgttggttcaaggatggcaaggagctcaaccgcagccgagacattcgcatcaaatatggcaacggcagaaagaactcacgactacagttcaacaaggtgaaggtggaggacgctggggagtatgtctgcgaggccgagaacatcctggggaaggacaccgtccggggccggctttacgtcaacagcgtgagcaccaccctgtcatcctggtcggggcacgcccggaagtgcaacgagacagccaagtcctattgcgtcaatggaggcgtctgctactacatcgagggcatcaaccagctctcctgcaaatgtccaaatggattcttcggacagagatgtttggagaaactgcctttgcgattgtacatgccagatcctaagcaaagtgtcctgtgggatacaccggggacaggtgtcagcagttcgcaatggtcaacttctccaaagccgaggagctgtaccagaagagggtcctgaccatcacgggcatctgcgtggctctgctggtcgtgggcatcgtctgtgtggtggcctactgcaagaccaaaaaacagcggaagcagatgcacaaccacctccggcagaacatgtgcccggcccatcagaaccggagcttggccaatgggcccagccacccccggctggacccagaggagatccagatggcagattatatttccaagaacgtgccagccacagaccatgtcatcaggagagaaactgagaccaccttctctgggagccactcctgttctccttctcaccactgctccacagccacacccacctccagccacagacacgagagccacacgtggagcctggaacgttctgagagcctgacttctgactcccagtcggggatcatgctatcatca

SEQ ID NO: 14157 - DNA, 508 bp, Homo sapiens
  source 1..508: mol_type = unassigned DNA
aagtgcaacgagacagccaagtcctattgcgtcaatggaggcgtctgctactacatcgagggcatcaaccagctctcctgcaagaccccattgtacaaagatgccatccctgggtgctgcctgtgtcccttcagcccctagcccccactccatgggatgaggggataccagcaaggacactactctagggcacctgggctgcactgcttagaacttggtacccagagccaccacttccccatctcagcctcccctggttccagccaaggttcctggaaccaacttccccaacaccctttgtcagccctcgggggagagggcagccctggtggagatgcggtcagaacaccaggtcctcagagctgtgctggagaagggcaggggggtggggggcagggcagagcccagaggccattctgcgggtggacgagctgggagggaaggtgggcaggcctcttggggttcctgatgacacctgaatggaataaaaaggaaagaacttaggaaa

SEQ ID NO: 14158 - DNA, 597 bp, Homo sapiens
  source 1..597: mol_type = unassigned DNA
aaagccacccggcccaagttgaagaagatgaagagccagacgggacaggtgggtgagaagcaatcgctgaagtgtgaggcagcagccggtaatccccagccttcctaccgttggttcaaggatggcaaggagctcaaccgcagccgagacattcgcatcaaatatggcaacggcagaaagaactcacgactacagttcaacaaggtgaaggtggaggacgctggggagtatgtctgcgaggccgagaacatcctggggaaggacaccgtccggggccggctttacgtcaacagcgtgagcaccaccctgtcatcctggtcggggcacgcccggaagtgcaacgagacagccaagtcctattgcgtcaatggaggcgtctgctactacatcgagggcatcaaccagctctcctgcaaggcacctgggctgcactgcttagaacttggtacccagagccaccacttccccatctcagcctcccctggttccagccaaggttcctggaaccaacttccccaacaccctttgtcagccctcgggggagagggcagccctggtggagatgcggtcagaacaccaggtcctcagagctgtgct

SEQ ID NO: 14159 - DNA, 3723 bp, Homo sapiens
  source 1..3723: mol_type = unassigned DNA
atcctcctccaggtcctggcgcacagggtgggagcgctgcgctgcgccgcgctgcgcatcgcggcccgcttgccgcctgccccctgccctagctgggccacctccccgggctgccggtggagggctaagaggcgctaacgttacgctgtttccggttttccagcgggctctgtttcccctcccaaggcggcggcggctgagcggcggagccccccaaatggcctggccagatgcggcaggtttgctgctcagcgctgccgccgccgccactggagaagggtcggtgcagcagctacagcgacagcagcagcagcagcagcgagaggagcagcagcagcagcagcagcagcagcgagagcggcagcagcagcaggagcagcagcaacaacagcagcatctctcgtcccgctgcgcccccagagccgcggccgcagcaacagccgcagccccgcagccccgcagcccggagagccgccgcccgttcgcgagccgcagccgccggcggcatgaggcgcgacccggcccccggcttctccatgctgctcttcggtgtgtcgctcgcctgctactcgcccagcctcaagtcagtgcaggaccaggcgtacaaggcacccgtggtggtggagggcaaggtacaggggctggtcccagccggcggctccagctccaacagcacccgagagccgcccgcctcgggtcgggtggcgttggtaaaggtgctggacaagtggccgctccggagcggggggctgcagcgcgagcaggtgatcagcgtgggctcctgtgtgccgctcgaaaggaaccagcgctacatctttttcctggagcccacggaacagcccttagtctttaagacggcctttgcccccctcgataccaacggcaaaaatctcaagaaagaggtgggcaagatcctgtgcactgactgcgccacccggcccaagttgaagaagatgaagagccagacgggacaggtgggtgagaagcaatcgctgaagtgtgaggcagcagccggtaatccccagccttcctaccgttggttcaaggatggcaaggagctcaaccgcagccgagacattcgcatcaaatatggcaacggcagaaagaactcacgactacagttcaacaaggtgaaggtggaggacgctggggagtatgtctgcgaggccgagaacatcctggggaaggacaccgtccggggccggctttacgtcaacagcgaagccgaggagctgtaccagaagagggtcctgaccatcacgggcatctgcgtggctctgctggtcgtgggcatcgtctgtgtggtggcctactgcaagaccaaaaaacagcggaagcagatgcacaaccacctccggcagaacatgtgcccggcccatcagaaccggagcttggccaatgggcccagccacccccggctggacccagaggagatccagatggcagattatatttccaagaacgtgccagccacagaccatgtcatcaggagagaaactgagaccaccttctctgggagccactcctgttctccttctcaccactgctccacagccacacccacctccagccacagacacgagagccacacgtggagcctggaacgttctgagagcctgacttctgactcccagtcggggatcatgctatcatcagtgggtaccagcaaatgcaacagcccagcatgtgtggaggcccgggcaaggcgggcagcagcctacaacctggaggagcggcgcagggccaccgcgccaccctatcacgattccgtggactcccttcgcgactccccacacagcgagaggtacgtgtcggccctgaccacgcccgcgcgcctctcgcccgtggacttccactactcgctggccacgcaggtgccaactttcgagatcacgtcccccaactcggcgcacgccgtgtcgctgccgccggcggcgcccatcagttaccgcctggccgagcagcagccgttactgcggcacccggcgccccccggcccgggacccggacccgggcccgggcccgggcccggcgcagacatgcagcgcagctatgacagctactattaccccgcggcggggcccggaccgcggcgcgggacctgcgcgctcggcggcagcctgggcagcctgcctgccagccccttccgcatccccgaggacgacgagtacgagaccacgcaggagtgcgcgcccccgccgccgccgcggccgcgcgcgcgcggtgcgtcccgcaggacgtcggcggggccccggcgctggcgccgctcgcgcctcaacgggctggcggcgcagcgcgcacgggcggcgagggactcgctgtcgctgagcagcggctcgggcggcggctcagcctcggcgtcggacgacgacgcggacgacgcggacggggcgctggcggccgagagcacacctttcctgggcctgcgtggggcgcacgacgcgctgcgctcggactcgccgccactgtgcccggcggccgacagcaggacttactactcactggacagccacagcacgcgggccagcagcagacacagccgcgggccgcccccgcgggccaagcaggactcggcgccactctagggccccgccgcgcgcccctccgccccgcccgccccactatctttaaggagaccagagaccgcctactggagagaaaggaggaaaaaagaaataaaaatatttttattttctataaaaggaaaaaagtataacaaaatgttttattttcattttagcaaaaattgtcttataatactagctaacggcaaaggcgtttttatagggaaactatttatatgtaacatcctgatttacagcttcggaaaaaaaaaagaaacaacaaaaaaaaaagagagatgggccaattttttgactctttaatagaaacctattttgtggtgccttttgctgtatgctcatctggggctccgggggacaggtctgggttgtggggtgctgagagtgacagctgggagagaagaggtgcgggttctgttgggggcgagggtggggggcggtggggggttggccctaaggaagaactgaggacggaagtagctttgctcccaggcaagagctgaagttcccgacccctgggaggagagggccaggaccctaggcttggagctggagctggggtaacttccagggggagataaagacacagctacccgaatggggaagccctggctactcacagctgttaaaggagggggggcagagaaacgtttccccaagagcctgagcccagggaggtggcagctctgccaggggcccaatgttggcggctcctgtcccccacagcctccaggacgcccctccgtcctctgcagcaccttcgtttacaggtcgtcttttctattttacacctgcatgtcctttgcatttcagattctttagattggatgcatggtcacgctgggaccgagaagagccactcgacagtgtattccccttttagcaataaagtaacaccatttccttctcacaggctgcctcctagcccccaacccacctatgacatccactcgtctccagtcctgccctcccacccccaaaaactgggtccactgctaatttgtcaaaaaggtaattgtttaaaaaaaaaaaaaatcccaaacagaaacagatgggaatcctgtcctgaaatgtctgaacacctgactgttgacacttgaacatttttatattataaataaaatcagaaataactcctgtt

SEQ ID NO: 14160 - DNA, 2158 bp, Homo sapiens
  source 1..2158: mol_type = unassigned DNA
gggcgaaggtgaagaccggctcctaggatgagtgaaggggcggccgctgcctcgccacctggtgccgcttcggcagccgccgcctcggccgaggagggcaccgcggcggctgcggcggcggcagcggcgggcgggggcccggacggcggcggcgaaggggcggccgagcccccccgggagttacgctgtagcgactgcatcgtgtggaaccggcagcagacgtggctgtgcgtggtacctctgttcatcggcttcatcggcctggggctcagcctcatgcttctcaaatggatcgtggtgggctccgtcaaggagtacgtgcccaccgacctagtggactccaaggggatgggccaggaccccttcttcctctccaagcccagctctttccccaaggccatggagaccaccaccactaccacttccaccacgtcccccgccaccccctccgccgggggtgccgcctcctccaggacgcccaaccggattagcactcgcctgaccaccatcacgcgggcgcccactcgcttccccgggcaccgggtgcccatccgggccagcccgcgctccaccacagcacggaacactgcggcccctgcgacggtcccgtccaccacggccccgttcttcagtagcagcacgctgggctcccgacccccggtgccaggaactccaagtacccaggcaatgccctcctggcctactgcggcatacgctacctcctcctaccttcacgattctactccctcctggaccctgtctccctttcaggatgctgcctcctcttcttcctcttcttcctcctccgctaccaccaccacaccagaaactagcaccagccccaaatttcatacgacgacatattccacagagcgatccgagcacttcaaaccctgccgagacaaggaccttgcatactgtctcaatgatggcgagtgctttgtgatcgaaaccctgaccggatcccataaacactgtcggtgcaaagaaggctaccaaggagtccgttgtgatcaatttctgccgaaaactgattccatcttatcggatccaacagaccacttggggattgaattcatggagagtgaagaagtttatcaaaggcaggtgctgtcaatttcatgtatcatctttggaattgtcatcgtgggcatgttctgtgcagcattctacttcaaaagcaagaaacaagctaaacaaatccaagagcagctgaaagtgccacaaaatggtaaaagctacagtctcaaagcatccagcacaatggcaaagtcagagaacttggtgaagagccatgtccagctgcaaaattattcaaaggtggaaaggcatcctgtgactgcattggagaaaatgatggagtcaagttttgtcggcccccagtcattccctgaggtcccttctcctgacagaggaagccagtctgtcaaacaccacaggagtctatcctcttgctgcagcccagggcaaagaagtggcatgctccataggaatgccttcagaaggacacccccgtcaccccgaagtaggctaggtggaattgtgggaccagcatatcagcaactcgaagaatcaaggatcccagaccaggatacgataccttgccaagggtattcatccagtggtttaaaaacccaacgaaatacatcaataaatatgcaactgccttcaagagagacaaacccctattttaatagcttggagcaaaaggacctggtgggctattcatccacaagggccagttctgtgcccatcatcccttcagtgggtttagaggaaacctgcctgcaaatgccagggatttctgaagtcaaaagcatcaaatggtgcaaaaactcctattcagctgacgttgtcaatgtgagtattccagtcagcgattgtcttatagcagaacaacaagaagtgaaaatattgctagaaactgtccaggagcagatccgaattctgactgatgccagacggtcagaagactacgaactggccagcgtagaaaccgaggacagtgcaagcgaaaacacagcctttctccccctgagtcccacagccaaatcagaacgagaggcgcaatttgtcttaagaaatgaaatacaaagagactctgcattgaccaagtgacttgagatgtaggaatctgtgcattctatgctttgctcaa

SEQ ID NO: 14161 - DNA, 2163 bp, Homo sapiens
  source 1..2163: mol_type = unassigned DNA
atgagtgaaggggcggccgctgcctcgccacctggtgccgcttcggcagccgccgcctcggccgaggagggcaccgcggcggctgcggcggcggcagcggcgggcgggggcccggacggcggcggcgaaggggcggccgagcccccccgggagttacgctgtagcgactgcatcgtgtggaaccggcagcagacgtggctgtgcgtggtacctctgttcatcggcttcatcggcctggggctcagcctcatgcttctcaaatggatcgtggtgggctccgtcaaggagtacgtgcccaccgacctagtggactccaaggggatgggccaggaccccttcttcctctccaagcccagctctttccccaaggccatggagaccaccaccactaccacttccaccacgtcccccgccaccccctccgccgggggtgccgcctcctccaggacgcccaaccggattagcactcgcctgaccaccatcacgcgggcgcccactcgcttccccgggcaccgggtgcccatccgggccagcccgcgctccaccacagcacggaacactgcggcccctgcgacggtcccgtccaccacggccccgttcttcagtagcagcacgctgggctcccgacccccggtgccaggaactccaagtacccaggcaatgccctcctggcctactgcggcatacgctacctcctcctaccttcacgattctactccctcctggaccctgtctccctttcaggatgctgcctcctcttcttcctcttcttcctcctccgctaccaccaccacaccagaaactagcaccagccccaaatttcatacgacgacatattccacagagcgatccgagcacttcaaaccctgccgagacaaggaccttgcatactgtctcaatgatggcgagtgctttgtgatcgaaaccctgaccggatcccataaacactgtcggtgcaaagaaggctaccaaggagtccgttgtgatcaatttctgccgaaaactgattccatcttatcggatccaacagaccacttggggattgaattcatggagagtgaagaagtttatcaaaggcaggtgctgtcaatttcatgtatcatctttggaattgtcatcgtgggcatgttctgtgcagcattctacttcaaaagcaagaaacaagctaaacaaatccaagagcagctgaaagtgccacaaaatggtaaaagctacagtctcaaagcatccagcacaatggcaaagtcagagaacttggtgaagagccatgtccagctgcaaaattattcaaaggtggaaaggcatcctgtgactgcattggagaaaatgatggagtcaagttttgtcggcccccagtcattccctgaggtcccttctcctgacagaggaagccagtctgtcaaacaccacaggagtctatcctcttgctgcagcccagggcaaagaagtggcatgctccataggaatgccttcagaaggacacccccgtcaccccgaagtaggctaggtggaattgtgggaccagcatatcagcaactcgaagaatcaaggatcccagaccaggatacgataccttgccaagggatagaggtcaggaagactatatcccacctgcctatacagctgtggtgtgttgaaagacccctggacttaaagtattcatccagtggtttaaaaacccaacgaaatacatcaataaatatgcaactgccttcaagagagacaaacccctattttaatagcttggagcaaaaggacctggtgggctattcatccacaagggccagttctgtgcccatcatcccttcagtgggtttagaggaaacctgcctgcaaatgccagggatttctgaagtcaaaagcatcaaatggtgcaaaaactcctattcagctgacgttgtcaatgtgagtattccagtcagcgattgtcttatagcagaacaacaagaagtgaaaatattgctagaaactgtccaggagcagatccgaattctgactgatgccagacggtcagaagactacgaactggccagcgtagaaaccgaggacagtgcaagcgaaaacacagcctttctccccctgagtcccacagccaaatcagaacgagaggcgcaatttgtcttaagaaatgaaatacaaagagactctgcattgaccaagtga

SEQ ID NO: 14162 - DNA, 3136 bp, Homo sapiens
  source 1..3136: mol_type = unassigned DNA
caggaaggagggaaggaaggaatctgccacaaaccagaatggcagtagagccagtaacttgctgcttctctctcctttggctgaagcagtcatttttgagagcacattttcccaggaggtgtttagagcctccactcaacaaatctagcttgtgttttgtagaaggataaaggattcatgagtgtatgtgtgaacatattcaatggattgaaaatgagtctaccctgaagaccccagatttttgatctgctcttttgatgcagttgatagaataatggagtgtggtatacctccaacccttgtatgcgttgggagaggagggggactacacacgatcaatataatcatctggtattattttccttctgcctggaggacttgctttaacatttcaagtagtgtgggtctgctgctgacgaattcatacaaattttatacgacgacatattccacagagcgatccgagcacttcaaaccctgccgagacaaggaccttgcatactgtctcaatgatggcgagtgctttgtgatcgaaaccctgaccggatcccataaacactgtcggtgcaaagaaggctaccaaggagtccgttgtgatcaatttctgccgaaaactgattccatcttatcggatccaacagaccacttggggattgaattcatggagagtgaagaagtttatcaaaggcaggtgctgtcaatttcatgtatcatctttggaattgtcatcgtgggcatgttctgtgcagcattctacttcaaaagcaagaaacaagctaaacaaatccaagagcagctgaaagtgccacaaaatggtaaaagctacagtctcaaagcatccagcacaatggcaaagtcagagaacttggtgaagagccatgtccagctgcaaaattattcaaaggtggaaaggcatcctgtgactgcattggagaaaatgatggagtcaagttttgtcggcccccagtcattccctgaggtcccttctcctgacagaggaagccagtctgtcaaacaccacaggagtctatcctcttgctgcagcccagggcaaagaagtggcatgctccataggaatgccttcagaaggacacccccgtcaccccgaagtaggctaggtggaattgtgggaccagcatatcagcaactcgaagaatcaaggatcccagaccaggatacgataccttgccaagggatagaggtcaggaagactatatcccacctgcctatacagctgtggtgtgttgaaagacccctggacttaaagtattcatccagtggtttaaaaacccaacgaaatacatcaataaatatgcaactgccttcaagagagacaaacccctattttaatagcttggagcaaaaggacctggtgggctattcatccacaagggccagttctgtgcccatcatcccttcagtgggtttagaggaaacctgcctgcaaatgccagggatttctgaagtcaaaagcatcaaatggtgcaaaaactcctattcagctgacgttgtcaatgtgagtattccagtcagcgattgtcttatagcagaacaacaagaagtgaaaatattgctagaaactgtccaggagcagatccgaattctgactgatgccagacggtcagaagactacgaactggccagcgtagaaaccgaggacagtgcaagcgaaaacacagcctttctccccctgagtcccacagccaaatcagaacgagaggcgcaatttgtcttaagaaatgaaatacaaagagactctgcattgaccaagtgacttgagatgtaggaatctgtgcattctatgctttgctcaacaggaaagagaggaaatcaaatacaaattatttatatgcattaatttaagagcatctacttagaagaaaccaaatagtctatcgccctcatatcatagtgttttttaacaaaatatttttttaagggaaagaaatgtttcaggagggataaagcttaccattaaagcttttgggtagaattctgaatccaatttcgtttagtcccaacactgtcctctttggctcttagaagatgtgggcaattcagacccttggccccacagtgccagtgtctcattaaaaaacactggcagttacctggtttcaaaaagaggagagctgcatcccgcaggtggatgcaccagtgagcaggtggctcttgccatttggcttgccagtcccaagccctaaatttctattcacccaatagcctcatcacaggttatgtcatgtcgacacatgtagtgttttctatttgatttttggagaatgccacaaaagactctgcaatgggaaggaggacaggagatagaaggagaaaccgggggcaatcttaactactcttgtgtgccaccttcctctgagatttgaatgcacagatctcagctggaggtatgaaattattacagaaaaagagacaaaaaaatccttatatcgtgtcactaaaatcatgctaatagaaatgtttttccttgagattgtttagaggctctggaggagcgtttctcagtttttgtgtgcctgtgtgcacatgtgtgtgcgagcgtgtgtgtgtgtggacttgctcacgcgggcacatatgctgtaagcacatgtgttcattgtgcgtatgtgtgtgcatgtgtgcgcgtattacgcttgctaaaatttgttctgaaacatcagggaatctactattcagaaaaattatttccctcttagatcttttcactttaaatttttccattaagtataaagttcagttagttcttaaatcaaggtcacttgcatggtggggtcgtataaaactcttgacactgtctagaccattttctgatgtgaatacttttgagaggatcaactattggctcattaatgatatcagtatcataaggtgagttcatcaaggatgtgtgtttattttgaatcatgcctacttaaattattaatacaagacaattaacaaattgacagttaccatttgctttctcatcatcctcattaccatttattttatagcaagtctgctatgtgtggaccaaggcttcggcttctgtggttagtatgggaagaataaattgttgaaataaaaatacccagactattcagttcacaagaagccccccaaaagaacagtaaattgt

SEQ ID NO: 14163 - DNA, 3530 bp, Homo sapiens
  source 1..3530: mol_type = unassigned DNA
aaaatgagtctaccctgaagaccccagatttttgatctgctcttttgatgcagttgatagaataatggagtgtggtatacctccaacccttgtatgcgttgggagaggagggggactacacacggtttttcagaggcaaaaactcctttatgaattgattgccacatcacccttctggttccatctgaggtcttctttgcagaagccactcagcaccttttggaattgaatgctgacatcgcatcagattcaaaaggaatgctgctgttgattcctttctgtactcatcacatggtgaggaatatgctgggagtctgtataagatgaggctcttgcacggcctgccagagagtgcctgtcatggactggagaactgcatccgttcatttacatatcggcagctaaaattagtggagtcacccacgtttttcaccctaaagaagaaccttcagataagaatccagttcatcactctcgcctgctcaggcttacttggttgctccttgttaccagacagaggggctatagcgctgtgtaagagcaaatgttaaattagtattaatagccaatggcatctctcttctatttttcactgatcagatacgacgacatattccacagagcgatccgagcacttcaaaccctgccgagacaaggaccttgcatactgtctcaatgatggcgagtgctttgtgatcgaaaccctgaccggatcccataaacactgtcggtgcaaagaaggctaccaaggagtccgttgtgatcaatttctgccgaaaactgattccatcttatcggatccaaagacggggtttcaccgtgttaaccaggatggtctcaatttcctgacctcgtgatccgcctacctcggcctcccaaagtgctgggattacagaccacttggggattgaattcatggagagtgaagaagtttatcaaaggcaggtgctgtcaatttcatgtatcatctttggaattgtcatcgtgggcatgttctgtgcagcattctacttcaaaagcaagaaacaagctaaacaaatccaagagcagctgaaagtgccacaaaatggtaaaagctacagtctcaaagcatccagcacaatggcaaagtcagagaacttggtgaagagccatgtccagctgcaaaattattcaaaggtggaaaggcatcctgtgactgcattggagaaaatgatggagtcaagttttgtcggcccccagtcattccctgaggtcccttctcctgacagaggaagccagtctgtcaaacaccacaggagtctatcctcttgctgcagcccagggcaaagaagtggcatgctccataggaatgccttcagaaggacacccccgtcaccccgaagtaggctaggtggaattgtgggaccagcatatcagcaactcgaagaatcaaggatcccagaccaggatacgataccttgccaagggtattcatccagtggtttaaaaacccaacgaaatacatcaataaatatgcaactgccttcaagagagacaaacccctattttaatagcttggagcaaaaggacctggtgggctattcatccacaagggccagttctgtgcccatcatcccttcagtgggtttagaggaaacctgcctgcaaatgccagggatttctgaagtcaaaagcatcaaatggtgcaaaaactcctattcagctgacgttgtcaatgtgagtattccagtcagcgattgtcttatagcagaacaacaagaagtgaaaatattgctagaaactgtccaggagcagatccgaattctgactgatgccagacggtcagaagactacgaactggccagcgtagaaaccgaggacagtgcaagcgaaaacacagcctttctccccctgagtcccacagccaaatcagaacgagaggcgcaatttgtcttaagaaatgaaatacaaagagactctgcattgaccaagtgacttgagatgtaggaatctgtgcattctatgctttgctcaacaggaaagagaggaaatcaaatacaaattatttatatgcattaatttaagagcatctacttagaagaaaccaaatagtctatcgccctcatatcatagtgttttttaacaaaatatttttttaagggaaagaaatgtttcaggagggataaagcttaccattaaagcttttgggtagaattctgaatccaatttcgtttagtcccaacactgtcctctttggctcttagaagatgtgggcaattcagacccttggccccacagtgccagtgtctcattaaaaaacactggcagttacctggtttcaaaaagaggagagctgcatcccgcaggtggatgcaccagtgagcaggtggctcttgccatttggcttgccagtcccaagccctaaatttctattcacccaatagcctcatcacaggttatgtcatgtcgacacatgtagtgttttctatttgatttttggagaatgccacaaaagactctgcaatgggaaggaggacaggagatagaaggagaaaccgggggcaatcttaactactcttgtgtgccaccttcctctgagatttgaatgcacagatctcagctggaggtatgaaattattacagaaaaagagacaaaaaaatccttatatcgtgtcactaaaatcatgctaatagaaatgtttttccttgagattgtttagaggctctggaggagcgtttctcagtttttgtgtgcctgtgtgcacatgtgtgtgcgagcgtgtgtgtgtgtggacttgctcacgcgggcacatatgctgtaagcacatgtgttcattgtgcgtatgtgtgtgcatgtgtgcgcgtattacgcttgctaaaatttgttctgaaacatcagggaatctactattcagaaaaattatttccctcttagatcttttcactttaaatttttccattaagtataaagttcagttagttcttaaatcaaggtcacttgcatggtggggtcgtataaaactcttgacactgtctagaccattttctgatgtgaatacttttgagaggatcaactattggctcattaatgatatcagtatcataaggtgagttcatcaaggatgtgtgtttattttgaatcatgcctacttaaattattaatacaagacaattaacaaattgacagttaccatttgctttctcatcatcctcattaccatttattttatagcaagtctgctatgtgtggaccaaggcttcggcttctgtggttagtatgggaagaataaattgttgaaataaaaatacccagactattcagttcacaagaagccccccaaaagaacagtaaattgtgttgtatgttcatttggaataaagcaatatttttaccactgctaaggtgaactgaaacctctcctgaagatttgtctgtttatttaccctcactttcatgggacatatgaggaaattagtgttcacatatccagtctttttccaattattggtggtgttgagttgttatgtttacactgttttaaataaaaaggcaccgtatttgaaagcat

SEQ ID NO: 14164 - DNA, 1606 bp, Homo sapiens
  source 1..1606: mol_type = unassigned DNA
atggagtgtggtatacctccaacccttgtatgcgttgggagaggagggggactacacacggtaggggtatttcatgttctttctcaattgatttccttgtgtaccattccggaggtctttaaagaaaagcccaagatacgacgacatattccacagagcgatccgagcacttcaaaccctgccgagacaaggaccttgcatactgtctcaatgatggcgagtgctttgtgatcgaaaccctgaccggatcccataaacactgtcggtgcaaagaaggctaccaaggagtccgttgtgatcaatttctgccgaaaactgattccatcttatcggatccaaagacggggtttcaccgtgttaaccaggatggtctcaatttcctgacctcgtgatccgcctacctcggcctcccaaagtgctgggattacagaccacttggggattgaattcatggagagtgaagaagtttatcaaaggcaggtgctgtcaatttcatgtatcatctttggaattgtcatcgtgggcatgttctgtgcagcattctacttcaaaagcaaaaggaatattacagcaaattctgtgtctgaggaaagatggaaggaaacaagctaaacaaatccaagagcagctgaaagtgccacaaaatggtaaaagctacagtctcaaagcatccagcacaatggcaaagtcagagaacttggtgaagagccatgtccagctgcaaaattattcaaaggtggaaaggcatcctgtgactgcattggagaaaatgatggagtcaagttttgtcggcccccagtcattccctgaggtcccttctcctgacagaggaagccagtctgtcaaacaccacaggagtctatcctcttgctgcagcccagggcaaagaagtggcatgctccataggaatgccttcagaaggacacccccgtcaccccgaagtaggctaggtggaattgtgggaccagcatatcagcaactcgaagaatcaaggatcccagaccaggatacgataccttgccaagggatagaggtcaggaagactatatcccacctgcctatacagctgtggtgtgttgaaagacccctggacttaaagtattcatccagtggtttaaaaacccaacgaaatacatcaataaatatgcaactgccttcaagagagacaaacccctattttaatagcttggagcaaaaggacctggtgggctattcatccacaagggccagttctgtgcccatcatcccttcagtgggtttagaggaaacctgcctgcaaatgccagggatttctgaagtcaaaagcatcaaatggtgcaaaaactcctattcagctgacgttgtcaatgtgagtattccagtcagcgattgtcttatagcagaacaacaagaagtgaaaatattgctagaaactgtccaggagcagatccgaattctgactgatgccagacggtcagaagactacgaactggccagcgtagaaaccgaggacagtgcaagcgaaaacacagcctttctccccctgagtcccacagccaaatcagaacgagaggcgcaatttgtcttaagaaatgaaatacaaagagactctgcattgaccaagtga

SEQ ID NO: 14165 - DNA, 1503 bp, Homo sapiens
  source 1..1503: mol_type = unassigned DNA
atggagtgtggtatacctccaacccttgtatgcgttgggagaggagggggactacacacggtaggggtatttcatgttctttctcaattgatttccttgtgtaccattccggaggtctttaaagaaaagcccaagatcaatataatcatctggtattattttccttctgcctggaggacttgctttaacatttcaagtagtgtgggtctgctgctgacgaattcatacaaattttatacgacgacatattccacagagcgatccgagcacttcaaaccctgccgagacaaggaccttgcatactgtctcaatgatggcgagtgctttgtgatcgaaaccctgaccggatcccataaacactgtcggtgcaaagaaggctaccaaggagtccgttgtgatcaatttctgccgaaaactgattccatcttatcggatccaacagaccacttggggattgaattcatggagagtgaagaagtttatcaaaggcaggtgctgtcaatttcatgtatcatctttggaattgtcatcgtgggcatgttctgtgcagcattctacttcaaaagcaagaaacaagctaaacaaatccaagagcagctgaaagtgccacaaaatggtaaaagctacagtctcaaagcatccagcacaatggcaaagtcagagaacttggtgaagagccatgtccagctgcaaaattattcaaaggtggaaaggcatcctgtgactgcattggagaaaatgatggagtcaagttttgtcggcccccagtcattccctgaggtcccttctcctgacagaggaagccagtctgtcaaacaccacaggagtctatcctcttgctgcagcccagggcaaagaagtggcatgctccataggaatgccttcagaaggacacccccgtcaccccgaagtaggctaggtggaattgtgggaccagcatatcagcaactcgaagaatcaaggatcccagaccaggatacgataccttgccaagggtattcatccagtggtttaaaaacccaacgaaatacatcaataaatatgcaactgccttcaagagagacaaacccctattttaatagcttggagcaaaaggacctggtgggctattcatccacaagggccagttctgtgcccatcatcccttcagtgggtttagaggaaacctgcctgcaaatgccagggatttctgaagtcaaaagcatcaaatggtgcaaaaactcctattcagctgacgttgtcaatgtgagtattccagtcagcgattgtcttatagcagaacaacaagaagtgaaaatattgctagaaactgtccaggagcagatccgaattctgactgatgccagacggtcagaagactacgaactggccagcgtagaaaccgaggacagtgcaagcgaaaacacagcctttctccccctgagtcccacagccaaatcagaacgagaggcgcaatttgtcttaagaaatgaaatacaaagagactctgcattgaccaagtga

SEQ ID NO: 14166 - DNA, 1581 bp, Homo sapiens
  source 1..1581: mol_type = unassigned DNA
atggagtgtggtatacctccaacccttgtatgcgttgggagaggagggggactacacacggtaggggtatttcatgttctttctcaattgatttccttgtgtaccattccggaggtctttaaagaaaagcccaagatcaatataatcatctggtattattttccttctgcctggaggacttgctttaacatttcaagtagtgtgggtctgctgctgacgaattcatacaaattttgtcctagagacaggaggcatgccatacatggcaacatggggaagaccagagtggtcaggaggcagaaacaggagcaagatacgacgacatattccacagagcgatccgagcacttcaaaccctgccgagacaaggaccttgcatactgtctcaatgatggcgagtgctttgtgatcgaaaccctgaccggatcccataaacactgtcggtgcaaagaaggctaccaaggagtccgttgtgatcaatttctgccgaaaactgattccatcttatcggatccaacagaccacttggggattgaattcatggagagtgaagaagtttatcaaaggcaggtgctgtcaatttcatgtatcatctttggaattgtcatcgtgggcatgttctgtgcagcattctacttcaaaagcaagaaacaagctaaacaaatccaagagcagctgaaagtgccacaaaatggtaaaagctacagtctcaaagcatccagcacaatggcaaagtcagagaacttggtgaagagccatgtccagctgcaaaattattcaaaggtggaaaggcatcctgtgactgcattggagaaaatgatggagtcaagttttgtcggcccccagtcattccctgaggtcccttctcctgacagaggaagccagtctgtcaaacaccacaggagtctatcctcttgctgcagcccagggcaaagaagtggcatgctccataggaatgccttcagaaggacacccccgtcaccccgaagtaggctaggtggaattgtgggaccagcatatcagcaactcgaagaatcaaggatcccagaccaggatacgataccttgccaagggtattcatccagtggtttaaaaacccaacgaaatacatcaataaatatgcaactgccttcaagagagacaaacccctattttaatagcttggagcaaaaggacctggtgggctattcatccacaagggccagttctgtgcccatcatcccttcagtgggtttagaggaaacctgcctgcaaatgccagggatttctgaagtcaaaagcatcaaatggtgcaaaaactcctattcagctgacgttgtcaatgtgagtattccagtcagcgattgtcttatagcagaacaacaagaagtgaaaatattgctagaaactgtccaggagcagatccgaattctgactgatgccagacggtcagaagactacgaactggccagcgtagaaaccgaggacagtgcaagcgaaaacacagcctttctccccctgagtcccacagccaaatcagaacgagaggcgcaatttgtcttaagaaatgaaatacaaagagactctgcattgaccaagtga

SEQ ID NO: 14167 - DNA, 1174 bp, Homo sapiens
  source 1..1174: mol_type = unassigned DNA
actgtagcagacagtgtctccaggcagggtactgagcaaagaggatagtgaaaagggcagtgaaacatcggcctttttcactggcaacttcaagactcactgcctacaatcagaccacttggggattgaattcatggagagtgaagaagtttatcaaaggcaggtgctgtcaatttcatgtatcatctttggaattgtcatcgtgggcatgttctgtgcagcattctacttcaaaagcaagaaacaagctaaacaaatccaagagcagctgaaagtgccacaaaatggtaaaagctacagtctcaaagcatccagcacaatggcaaagtcagagaacttggtgaagagccatgtccagctgcaaaattattcaaaggtggaaaggcatcctgtgactgcattggagaaaatgatggagtcaagttttgtcggcccccagtcattccctgaggtcccttctcctgacagaggaagccagtctgtcaaacaccacaggagtctatcctcttgctgcagcccagggcaaagaagtggcatgctccataggaatgccttcagaaggacacccccgtcaccccgaagtaggctaggtggaattgtgggaccagcatatcagcaactcgaagaatcaaggatcccagaccaggatacgataccttgccaagggtattcatccagtggtttaaaaacccaacgaaatacatcaataaatatgcaactgccttcaagagagacaaacccctattttaatagcttggagcaaaaggacctggtgggctattcatccacaagggccagttctgtgcccatcatcccttcagtgggtttagaggaaacctgcctgcaaatgccagggatttctgaagtcaaaagcatcaaatggtgcaaaaactcctattcagctgacgttgtcaatgtgagtattccagtcagcgattgtcttatagcagaacaacaagaagtgaaaatattgctagaaactgtccaggagcagatccgaattctgactgatgccagacggtcagaagactacgaactggccagcgtagaaaccgaggacagtgcaagcgaaaacacagcctttctccccctgagtcccacagccaaatcagaacgagaggcgcaatttgtcttaagaaatgaaatacaaagagactctgcattgaccaagtga

SEQ ID NO: 14168 - DNA, 2713 bp, Homo sapiens
  source 1..2713: mol_type = unassigned DNA
ggtgcaaagaaggctaccaaggagtccgttgtgatcaatttctgccgaaaactgattccatcttatcggatccaacagaccacttggggattgaattcatggagagtgaagaagtttatcaaaggcaggtgctgtcaatttcatgtatcatctttggaattgtcatcgtgggcatgttctgtgcagcattctacttcaaaagcaagaaacaagctaaacaaatccaagagcagctgaaagtgccacaaaatggtaaaagctacagtctcaaagcatccagcacaatggcaaagtcagagaacttggtgaagagccatgtccagctgcaaaattattcaaaggtggaaaggcatcctgtgactgcattggagaaaatgatggagtcaagttttgtcggcccccagtcattccctgaggtcccttctcctgacagaggaagccagtctgtcaaacaccacaggagtctatcctcttgctgcagcccagggcaaagaagtggcatgctccataggaatgccttcagaaggacacccccgtcaccccgaagtaggctaggtggaattgtgggaccagcatatcagcaactcgaagaatcaaggatcccagaccaggatacgataccttgccaagggtattcatccagtggtttaaaaacccaacgaaatacatcaataaatatgcaactgccttcaagagagacaaacccctattttaatagcttggagcaaaaggacctggtgggctattcatccacaagggccagttctgtgcccatcatcccttcagtgggtttagaggaaacctgcctgcaaatgccagggatttctgaagtcaaaagcatcaaatggtgcaaaaactcctattcagctgacgttgtcaatgtgagtattccagtcagcgattgtcttatagcagaacaacaagaagtgaaaatattgctagaaactgtccaggagcagatccgaattctgactgatgccagacggtcagaagactacgaactggccagcgtagaaaccgaggacagtgcaagcgaaaacacagcctttctccccctgagtcccacagccaaatcagaacgagaggcgcaatttgtcttaagaaatgaaatacaaagagactctgcattgaccaagtgacttgagatgtaggaatctgtgcattctatgctttgctcaacaggaaagagaggaaatcaaatacaaattatttatatgcattaatttaagagcatctacttagaagaaaccaaatagtctatcgccctcatatcatagtgttttttaacaaaatatttttttaagggaaagaaatgtttcaggagggataaagcttaccattaaagcttttgggtagaattctgaatccaatttcgtttagtcccaacactgtcctctttggctcttagaagatgtgggcaattcagacccttggccccacagtgccagtgtctcattaaaaaacactggcagttacctggtttcaaaaagaggagagctgcatcccgcaggtggatgcaccagtgagcaggtggctcttgccatttggcttgccagtcccaagccctaaatttctattcacccaatagcctcatcacaggttatgtcatgtcgacacatgtagtgttttctatttgatttttggagaatgccacaaaagactctgcaatgggaaggaggacaggagatagaaggagaaaccgggggcaatcttaactactcttgtgtgccaccttcctctgagatttgaatgcacagatctcagctggaggtatgaaattattacagaaaaagagacaaaaaaatccttatatcgtgtcactaaaatcatgctaatagaaatgtttttccttgagattgtttagaggctctggaggagcgtttctcagtttttgtgtgcctgtgtgcacatgtgtgtgcgagcgtgtgtgtgtgtggacttgctcacgcgggcacatatgctgtaagcacatgtgttcattgtgcgtatgtgtgtgcatgtgtgcgcgtattacgcttgctaaaatttgttctgaaacatcagggaatctactattcagaaaaattatttccctcttagatcttttcactttaaatttttccattaagtataaagttcagttagttcttaaatcaaggtcacttgcatggtggggtcgtataaaactcttgacactgtctagaccattttctgatgtgaatacttttgagaggatcaactattggctcattaatgatatcagtatcataaggtgagttcatcaaggatgtgtgtttattttgaatcatgcctacttaaattattaatacaagacaattaacaaattgacagttaccatttgctttctcatcatcctcattaccatttattttatagcaagtctgctatgtgtggaccaaggcttcggcttctgtggttagtatgggaagaataaattgttgaaataaaaatacccagactattcagttcacaagaagccccccaaaagaacagtaaattgtgttgtatgttcatttggaataaagcaatatttttaccactgctaaggtgaactgaaacctctcctgaagatttgtctgtttatttaccctcactttcatgggacatatgaggaaattagtgttcacatatccagtctttttccaattattggtggtgttgagttgttatgtttacactgttttaaataaaaaggcaccgtatttgaaagcat

SEQ ID NO: 14169 - DNA, 1306 bp, Homo sapiens
  source 1..1306: mol_type = unassigned DNA
ctccacttctccccgcccaccctgccggaggctgctcctgattggcttcccggccgcggggctcaggttacattcgcgagcggagccgagcgcgggagaccggacccgagagcagagctgctgtttcggcgcgggtcggctggcggccgactgccccagagcccccacccggcaccacacagaccccacccccgccctgcgccagccttcgtccccgcagaggaccccccgacaccagcatggactgctgcaccgagaacgcctgctccaagccggacgacgacattctagacatcccgctggacgatcccggcgccaacgcggccgccgccaaaatccaggcgagttttcggggccacatggcgcggaagaagataaagagcggagagcgcggccggaagggcccgggccctggggggcctggcggagctggggtggcccggggaggcgcgggcggcggccccagcggagactaggccagaactgagcattttcaaagttcccgaggagagatggatgccgcgtccccttcgcagcgacgagacttccctgccgtgtttgtgaccccctcctgcccagcaacctgccagctacaggagccccctgcgtcccagagactccctcacccaggcaggctccgtcgcggagtcgctgagtccgtgcccttttagttagttctgcagtctagtatggtccccatttgcccttccactccaccccaccctaaaccatgcgctcccaatcttccttcttttgcttctcgcccacctcttcccgcacccagcatgcagctctgcctccgcagcctcagtgcgctttcctgcgcgcactgcggagggcgccctaagcgtcacccaagcacactcacttaaagaaaaaacgagttctttcgttctgtgcgcagctaaaaggggcgccctacatctccgtgccactcccgccccagcctagccccaagactttggatccggggcgagatgaagggaagagggttgttttggtttcggacgacccttgctctgaccggaagagaagtccctatcccacacctgcctgtcacgttccctcccctttccccagcgcactgttgagggcagcctctccagctctcttgtttatgcaaacgccgagcgcctgggaggctcggtaggaggagtcttccacggccccgccccgcccctgtcggtcccgccctcccccccgccgggctcctggggctgtggccgaaaggtttctgatctccgtgtgtgcatgtgactgtgctgggttggaatgtgaacaataaagaggaatgtccaagtgttca

SEQ ID NO: 14170 - DNA, 1106 bp, Homo sapiens
  source 1..1106: mol_type = unassigned DNA
cgccagccttcgtccccgcagaggaccccccgacaccagcatggactgctgcaccgagaacgcctgctccaagccggacgacgacattctagacatcccgctggacgatcccggcgccaacgcggccgccgccaaaatccaggcgagttttcggggccacatggcgcggaagaagataaagagcggagagcgcggccggaagggcccgggccctggggggcctggcggagctggggtggcccggggaggcgcgggcggcggccccagcggagactaggccagaagaactgagcattttcaaagttcccgaggagagatggatgccgcgtccccttcgcagcgacgagacttccctgccgtgtttgtgaccccctcctgcccagcaacctgccagctacaggagccccctgcgtcccagagactccctcacccaggcaggctccgtcgcggagtcgctgagtccgtgcccttttagttagttctgcagtctagtatggtccccatttgcccttccactccaccccaccctaaaccatgcgctcccaatcttccttcttttgcttctcgcccacctcttcccgcacccagcatgcagctctgcctccgcagcctcagtgcgctttcctgcgcgcactgcggagggcgccctaagcgtcacccaagcacactcacttaaagaaaaaacgagttctttcgttctgtgcgcagctaaaaggggcgccctacatctccgtgccactcccgccccagcctagccccaagactttggatccggggcgagatgaagggaagagggttgttttggtttcggacgacccttgctctgaccggaagagaagtccctatcccacacctgcctgtcacgttccctcccctttccccagcgcactgttgagggcagcctctccagctctcttgtttatgcaaacgccgagcgcctgggaggctcggtaggaggagtcttccacggccccgccccgcccctgtcggtcccgccctcccccccgccgggctcctggggctgtggccgaaaggtttctgatctccgtgtgtgcatgtgactgtgctgggttggaatgtgaacaataaagaggaatgtccaagtg

SEQ ID NO: 14171 - DNA, 3809 bp, Homo sapiens
  source 1..3809: mol_type = unassigned DNA
gcgacgtcacgctcggctataaaaggcgcggctcggggcccttgcggcgctggaggagctcgaggctgaggctgccggggggctgtgggctaccgggccgccggcgcctcagcgatgttttactcagggctcctcactgagggcggccgcaaggagaccgacatgcgggaggcggcgtcactgcgacagcagcgccggatgaagcaggcggtgcagttcatccacaaggactccgccgacctgctgcccctggacggcctcaagaagctgggctcgtccaaggacatgcaacctcataatattctgcagaggcgcctcatggaaaccaacctgtctaagctccgaagcggtccccgtgtcccttgggcctctaagacgaacaaactcaatcaggctaagtctgaggggctaaagaagtctgaggaggatgacatgattttggtttcttgccagtgtgctggaaaggatgtgaaagccttggttgacacaggctgcctatataatctcatctctttggcctgtgtggacagattgggactcaaggagcatgtcaaatcccacaagcatgaaggagaaaagctttctctaccccggcatctcaaagtagtgggccagattgagcacctagtgatcacactgggctccctccgcctggactgcccagcagctgtggttgatgacaatgagaaaaacttgtcccttggtctacagactctccgatctctgaagtgcatcataaacttggataagcaccggctgatcatggggaagacagacaaggaagaaatcccttttgtggagacagtctctttgaatgaagacaacacttcagaagcataactacagcctgcagcatgtctgcacgtgtgcatgcatacacaccgggttgacagatagagaaaactgggtttgaaccaaatgccgtagtgacttgctgtggaccaagtccttccatctaatagaagctccaggggctccttcccattcagacctctctagactatagtctatgcttagagatcttgtctggttatggccattgttttttactactttgatcacttaacttatagaccttttttgacactgccagtctcacttgtggcctatttctctgcttcttccaggaatttgcttttattagtcaagtataggggctgccaggttctgtgtctccatagatatatgtgcttcttttcctatagctaaatgtataataaacaggaacctgacctttacctcctttcagctgtttcaaacaggtgccaggatacctatgtcttagaattagagtttcttcaaattgattcattgatttctcaagtatggattatgtgaaagagcccagggacattatccattacagtttaactctttcatttaaaggtccagagaggcaagtgaattgtctaagttcatatattaggtcagtgactgaagggaccaagaacgcagacctgatttccaagccaagactcccatgctgcctcatttgtattcaagcctttaacaggagggcaaagaggtgagaatgtgttaaaaaaaaaaaaaaaaaggcagagcatgggaggaatattctctggagatggatgctaggatgatttgggtagctctccctcctgtgtgccaagcccagtaaaagttccttgccccaaactgtcacatttaggccctcatcttggtgcctaaaaacgagcgtacaaagatgaatgaaatggtttctcactgtgaacctcttggaggaaaggaggaaccacagacagaggaatattaatccctctctgatatggaattgaaggcttaagtaaatcagagtgtcactgtcagacgttgattactcccaagatccgatcagcatttctgcccatcctattatgtgtctgtcaaggactgaagtagctggaaaccaggagtagagaaagatggggggaaaaaaagagcaaggccagaatagaagggagtagactgagtagaatcagttggtggagaggcctatctagataaacctttctgggaggcagggaatgacattttcaggcagggaattgagatgttcagttctgtcctgatacaaggaaagaggcagagcaggagccggcaatgttaaggacaactttttataactgcccagtatttcctgacccctgtcaaaggttggggagaatacaaggtttcttgaagctttttgactggggtgtcacattaggcacacaggtgtctataatggaatctccccttcagtttggtcatagaagtgcttggacaagtcagaaaaatagctagctgtgggtatccctttaagatattcccaagtctaccctgtgtcatagcagtagttctcagagtgtttgtttaaaggatcccactttgaactttgccaagtactaccaactaccttgtctggtgttcagcaactgcccctactgaacagccctttggaactctgaatgatttgggcctcacagaagctccctaaagcctaggaacttggtgactatcatttgaacaactaggcagccatactgcagtcagttgtcatggggtcattccctaggcccccttcctatcagcctctacctaaagaagctagataggaagctaagcacagccatggttgggaggctatatctaaagctcatgaggggtgatcccggggttaccagccttcagcactccctctagcaacaccccattctcttacctagcggggatttgtacctttccactgaggcctctccatgctccttccctacctttcatggcaatactttggcctgcctcttatcctggtactaagttgaagtaaagctcaccctttacttccctacttgaaagttctactctgagccttgactcttagccacagtgaggcatgttgaaggttcctgctggtttattctttttttttttttttttttagacagagtctcactctgttgcccaggctggagtgcagtggcacgatctcggttcactgcaagctccgcctcccgggttcatgccattctcctgcctcagcctcccaagtagctgggactacaggcacctgccaccacgcctggctaattttttgtatttttagtagagacgggtttcaccgtgttagctaggatggtctcgatctcctgaccttgtggtccgcccacctcagcctcccaaagtgctgggattacaggcgtgagccaccgcacccggccttcattcactttctttaaatgcctccaagttgattattctcctagctcatatctccttgatgtgcatgagggagcactgggtctaatttttgggggctgagaaggtaagaaggtgaggtcagtttttcccaggagtcctaaaaaattctggtaccttacattgagggtgtgggagaaagggtgtcatagttctgaaaataggcagtagcatgaagcaccagacctgtctcattccttattagatgtctatctcaaataacagagtttgaaaaatattggttttatcatttgatatttccatgcctgactcgggaaaataacattttctgacttctttctattttcttgccctgcacagaccctacctggtacaattttctatttcttagctcaaagtgtctatacaatgggttgcctggtatgtcagctgccctcactcttgtgtaatagaaatatattgccaggctggggacgtggaggagacgaactggattcctccctcctcctgttgccaggcctctctgcattggcactttatcctttcagtgtttctggctgtgttgggttcatttgtgagactgatgtaacaataaagtgaaatcttcccctctg

SEQ ID NO: 14172 - DNA, 567 bp, Homo sapiens
  source 1..567: mol_type = unassigned DNA
cccttggtctacagactctccgatctctgaagtgcatcataaacttggataagcaccggctgatcatggggaagacagacaaggaagaaatcccttttgtggagacagtctctttgaatgaagacaagtccagagaggcaagtgaattgtctaagttcatatattaggtcagtgactgaagggaccaagaacgcagacctgatttccaagccaagactcccatgctgcctcatttgtattcaagcctttaacaggagggcaaagaggtgagaatgtgttaaaaaaaaaaaaaaaaaggcagagcatgggaggaatattctctggagatggatgctaggatgatttgggtagctctccctcctgtgtgccaagcccagtaaaagttccttgccccaaactgtcacatttaggccctcatcttggtgcctaaaaacgagcgtacaaagatgaatgaaatggtttctcactgtgaacctcttggaggaaaggaggaaccacagacagaggaatattaatccctctctgatatggaattgaaggcttaagtaaatcagagtgtcactgtca

SEQ ID NO: 14173 - DNA, 551 bp, Homo sapiens
  source 1..551: mol_type = unassigned DNA
atcacactgggctccctccgcctggactgcccagcagctgtggttgatgacaatgagaaaaacttgtcccttggtctacagactctccgatctctgaagtgcatcataaacttggataagcaccggctgatcatggggaagacagacaaggaagaaatcccttttgtggagacagtctctttgaatgaagacaagtgagtgcccaaatgggtcagatcaagtcacatccatttgtcatcagctgcgagcagggtggtggtggttctcagacaggacatggggttgtatcctgtctttggctttcaattatactacaaatccacccttccccacacccagagttcatcaccccacaaaactctgtagtgcacacatcagaatgagcaatggtgatgccacacagagtggtagggaaatgactagctttgaaagcaaaattttacttgccttcagcttaactttttttgaatttggcattatttctcctgatatttatttctcatttcagcacttcagaagcataactacagcctgcagcatgtctgcacgtg

SEQ ID NO: 14174 - DNA, 980 bp, Homo sapiens
  source 1..980: mol_type = unassigned DNA
gcgacgtcacgctcggctataaaaggcgcggctcggggcccttgcggcgctggaggagctcgaggctgaggctgccggggggctgtgggctaccgggccgccggcgcctcagcgatgttttactcagggctcctcactgagggcggccgcaaggagaccgacatgcgggaggcggcgtcactgcgacagcagcgccggatgaagcaggcggtgcagttcatccacaaggactccgccgacctgctgcccctggacggcctcaagaagctgggctcgtccaaggacatgcaacctcataatattctgcagaggcgcctcatggaaaccaacctgtctaagctccgaagcggtccccgtgtcccttgggcctctaagacgaacaaactcaatcaggctaagtctgaggggctaaagaagtctgaggaggatgacatgattttggtttcttgccagtgtgctggaaaggatgtgaaagccttggttgacacaggctgcctatataatctcatctctttggcctgtgtggacagattgggatgacaatgagaaaaacttgtcccttggtctacagactctccgatctctgaagtgcatcataaacttggataagcaccggctgatcatggggaagacagacaaggaagaaatcccttttgtggagacagtctctttgaatgaagacaagtgagtgcccaaatgggtcagatcaagtcacatccatttgtcatcagctgcgagcagggtggtggtggttctcagacaggacatggggttgtatcctgtctttggctttcaattatactacaaatccacccttccccacacccagagttcatcaccccacaaaactctgtagtgcacacatcagaatgagcaatggtgatgccacacagagtggtagggaaatgactagctttgaaagcaaaattttacttgccttcagcttaactttttttgaatttggcattatttctcctgat

SEQ ID NO: 14175 - DNA, 547 bp, Homo sapiens
  source 1..547: mol_type = unassigned DNA
gctggaggagctcgaggctgaggctgccggggggctgtgggctaccgggccgccggcgcctcagcgatgttttactcagggctcctcactgagggcggccgcaaggagaccgacatgcgggaggcggcgtcactgcgacagcagcgccggatgaagcaggcggtgcagttcatccacaaggactccgccgacctgctgcccctggacggcctcaagaagctgggctcgtccaaggacatgaggcgcctcatggaaaccaacctgtctaagctccgaagcggtccccgtgtcccttgggcctctaagacgaacaaactcaatcaggctaagtctgaggggctaaagaagtctgaggaggatgacatgattttggtttcttgccagtgtgctggaaaggatgtgaaagccttggttgacacaggctgcctatataatctcatctctttggcctgtgtggacagattgggactcaaggagcatgtcaaatcccacaagcatgaaggagaaaagctttctctaccccggcatctcaaagtagtgggccaga

SEQ ID NO: 14176 - DNA, 8062 bp, Homo sapiens
  source 1..8062: mol_type = unassigned DNA
acagcgctctcgacacggagcacccttctagcttcttcgtctccaggactgacgctcaggctcctctctcgccttagcccaacttgctttcccgcctcgcaaactccggtttccctccactcccaactcttttcactacacgtttcccctcctctatctcccacgccacgaaccccgatccccagactcctctctcccgccctcctccttcctctctcctcccttcaactcttcatccgcttccacctcagactctgcgcgcacccaattcagtcgcccgctcccgttcggctcctcgaagccatggcgggacctgggggctggagggacagggaggtcacggatctgggccacctgccggatccaactggaatattctcactagataaaaccattggccttggtacttatggcagaatctatttgggacttcatgagaagactggtgcatttacagctgttaaagtgatgaacgctcgtaagacccctttacctgaaataggaaggcgagtgagagtgaataaatatcaaaaatctgttgggtggagatacagtgatgaggaagaggatctcaggactgaactcaaccttctgaggaagtactctttccacaaaaacattgtgtccttctatggagcatttttcaagctgagtccccctggtcagcggcaccaactttggatggtgatggagttatgtgcagcaggttcggtcactgatgtagtgagaatgaccagtaatcagagtttaaaagaagattggattgcttatatctgccgagaaatccttcagggcttagctcaccttcacgcacaccgagtaattcaccgggacatcaaaggtcagaatgtgctgctgactcataatgctgaagtaaaactggttgattttggagtgagtgcccaggtgagcagaactaatggaagaaggaatagtttcattgggacaccatactggatggcacctgaggtgattgactgtgatgaggacccaagacgctcctatgattacagaagtgatgtgtggtctgtgggaattactgccattgaaatggctgaaggagcccctcctctgtgtaaccttcaacccttggaagctctcttcgttattttgcgggaatctgctcccacagtcaaatccagcggatggtcccgtaagttccacaatttcatggaaaagtgtacgataaaaaatttcctgtttcgtcctacttctgcaaacatgcttcaacacccatttgttcgggatataaaaaatgaacgacatgttgttgagtcattaacaaggcatcttactggaatcattaaaaaaagacagaaaaaaggaatacctttgatctttgaaagagaagaagctattaaggaacagtacaccgtgagaagattcagaggaccctcttgcactcacgagcttctgagattgccaaccagcagcagatgcagaccacttagagtcctgcatggggaaccctctcagccaaggtggctacctgatcgagaagagccacaggtccaggcacttcagcagctacagggagcagccagggtattcatgccactgcaggctctggacagtgcacctaagcctctaaaggggcaggctcaggcacctcaacgactacaaggggcagctcgggtgttcatgccactacaggctcaggtgaaggctaaggcctctaaacctctacaaatgcagattaaggcacctccacgactacggagggcagccagggtgctcatgccactacaggcacaggttagggcacctaggcttctgcaggtacagtcccaggtatccaaaaagcagcaggcccagacccagacatcagaaccacaagatttggaccaggtaccagaggaatttcagggtcaagatcaggtacccgaacaacaaaggcagggccaggcccctgaacaacagcagaggcacaaccaggtgcctgaacaagagctggagcagaaccaggcacctgaacagccagaggtacaggaacaggctgccgagcctgcacaggcagagactgaggcagaggaacctgagtcattacgagtaaatgcccaggtatttctgcccctgctatcacaagatcaccatgtgctgttgccactacatttggatactcaggtgctcattccagtagaggggcaaactgaaggatcacctcaggcacaggcttggacactagaacccccacaggcaattggctcagttcaagcactgatagagggactatcaagagacttgcttcgggcaccaaactcaaataactcaaagccacttggtccgttgcaaaccctgatggaaaatctgtcatcaaataggttttactcacaaccagaacaggcacgggagaaaaaatcaaaagtttctactctgaggcaagcactggcaaaaagactatcaccaaagaggttcagggcaaagtcatcatggagacctgaaaagcttgaactctcggatttagaagcccgcaggcaaaggcgccaacgcagatgggaagatatctttaatcagcatgaggaagaattgagacaagttgataaagacaaagaagatgaatcatcagacaatgatgaagtatttcattcgattcaggctgaagtccagatagagccattgaagccatacatttcaaatcctaaaaaaattgaggttcaagagagatctccttctgtgcctaacaaccaggatcatgcacatcatgtcaagttctcttcaagcgttcctcagcggtctcttttggaacaagctcagaagcccattgacatcagacaaaggagttcgcaaaatcgtcaaaattggctggcagcatcagaatcttcttctgaggaagaaagtcctgtgactggaaggaggtctcagtcatcaccaccttattctactattgatcagaagttgctggttgacatccatgttccagatggatttaaagtaggaaaaatatcaccccctgtatacttgacaaacgaatgggtaggctataatgcactctctgaaatcttccggaatgattggttaactccggcacctgtcattcagccacctgaagaggatggtgattatgttgaactctatgatgccagtgctgatactgatggtgatgatgatgatgagtctaatgatacttttgaagatacctatgatcatgccaatggcaatgatgacttggataaccaggttgatcaggctaatgatgtttgtaaagaccatgatgatgacaacaataagtttgttgatgatgtaaataataattattatgaggcgcctagttgtccaagggcaagctatggcagagatggaagctgcaagcaagatggttatgatggaagtcgtggaaaagaggaagcctacagaggctatggaagccatacagccaatagaagccatggaggaagtgcagccagtgaggacaatgcagccattggagatcaggaagaacatgcagccaatataggcagtgaaagaagaggcagtgagggtgatggaggtaagggagtcgttcgaaccagtgaagagagtggagcccttggactcaatggagaagaaaattgctcagagacagatggtccaggattgaagagacctgcgtctcaggactttgaatatctacaggaggagccaggtggtggaaatgaggcctcaaatgccattgactcaggtgctgcaccgtcagcacctgatcatgagagtgacaataaggacatatcagaatcatcaacacaatcagatttttctgccaatcactcatctccttccaaaggttctgggatgtctgctgatgctaactttgccagtgccatcttatacgctggattcgtagaagtacctgaggaatcacctaagcaaccctctgaagtcaatgttaacccactctatgtctctcctgcatgtaaaaaaccactaatccacatgtatgaaaaggagttcacttctgagatctgctgtggttctttgtggggagtcaatttgctgttgggaacccgatctaatctatatctgatggacagaagtggaaaggctgacattactaaacttataaggcgaagaccattccgccagattcaagtcttagagccactcaatttgctgattaccatctcaggtcataagaacagacttcgggtgtatcatctgacctggttgaggaacaagattttgaataatgatccagaaagtaaaagaaggcaagaagaaatgctgaagacagaggaagcctgcaaagctattgataagttaacaggctgtgaacacttcagtgtcctccaacatgaagaaacaacatatattgcaattgctttgaaatcatcaattcacctttatgcatgggcaccaaagtcctttgatgaaagcactgctattaaagtatgcattgatcaatcagcagactctgaaggagactacatgtcctatcaagcctatatacgaatactggcaaaaatacaggcagctgatccagtgaaccggtttaagagaccagatgagctccttcatttgctgaagctcaaggtatttccaacacttgatcataagccagtgacagttgacctggctattggttctgaaaaaagactaaagattttcttcagctcagcagatggatatcacctcatcgatgcagaatctgaggttatgtctgatgtgaccctgccaaagaatcccctggaaatcattataccacagaatatcatcattttacctgattgcttgggaattggcatgatgctcaccttcaatgctgaagccctctctgtggaagcaaatgaacaactcttcaagaagatccttgaaatgtggaaagacataccatcttctatagcttttgaatgtacacagcgaaccacaggatggggccaaaaggccattgaagtgcgctctttgcaatccagggttctggaaagtgagctgaagcgcaggtcaattaagaagctgagattcctgtgcacccggggtgacaagctgttctttacctctaccctgcgcaatcaccacagccgggtttacttcatgacacttggaaaacttgaagagctccaaagcaattatgatgtctaaaagtttccagtgatttattaccacattataaacatcatgtataggcagtctgcatcttcagatttcagagattaaatgagtattcagttttatttttagtaaagattaaatccaaaactttacttttaatgtagcacagaatagttttaatgagaaatgcagctttatgtataaaattaactatagcaagctctaggtactccaatggtgtacaatgtcttttgcacaaactttgtaacttttgttactgtgaattcaaacattactctttggacagtttggacagtatctgtattcagattttacaacatggagtaaagaaacctgttatgaattagattacaagcagccttcaaaagaattggcactgggataagatttttcagaaaaagaaaaacatcggcaaactgtgtgtgatttttccaaagctatataaagaaccaaaggtttagtcaagaaacaaaaatcttaaagattattataacccagactaaggttgaacaacctgcatgcccagagaaaactatggcgacaaaggggaaaaggccaccactcgttttctcactgattcatgccaattaagcctacagttaaagaccagttttgttcttttcacccatttttaagctggttttctcctgataagaagaaaggaagaaagccccagacgcttggtttttctcagaacccccaaaagatgtgcaatagctgttgttacaaaccaccaaataatacagttgtgagcctgaatacaggactgaactcctatacacgtgtactgtagaatgagtattttttaataccttaaggtaggcgtcaaattctactccccaaagcagagatagattgatttatcaaaattattatctggccaacagtgtgactatcagacagcatcaaatatttgcccaatccaagattagactacacaaaagcttccttccagtattaaacaaaaagaattaaacataactatgaaaaaactttgctaatatctgtgtttttcagatttcattttttgtaaaatcagaaattaatctaaacatattcagtgataagttcatgtgtaacgacttaatgttaaaggttaaaaaaaagatttcacaaaatatacaactttcaccatatatataagcctgcaaaattagagtagtgaaagtcatgctagtccatcacccaaatatgttatagacgccatagacaggtgatgtttggtcacctatggtaactgctacctgatgaagagcataatttctgcatatccatcctcaataccatggtaaattctggggcaatagagaagcaacagaactgccacaaagtatacctcaatataattcctctagttctgcttctaaaatctgaggacagtgctagtgggaaaataattttcaaactacctggttaaccaaaatacaaaagcagctgactatgtgtgatttcataatagcacatttcttgacacttagtgctagaaatgaagatttggattttcctaacaacttacatcaagaatgtagtgtagctcattattgagaatttaggaaagcctgaatccattaattaaggaaataaatgtgactcacatttcttttactgtgacacaataatgtgatcctaaaactggcttatccttgagtgtttacaactcaaacaactttttgaatgcagtagttttttttttttaaaaacaaacttttatgtcaaattttttttcttagaagtagtcttcattattataaatttgtacaccaaaaggccatggggaactttgtgcaagtacctcatcgctgagcaaatggagcttgctatgttttaatttcagaaaatttcctcatatacgtagtgtgtagaatcaagtcttttaataattcattttttcttcataatatttactcaaagttaagcttaaaaataagttttatcttaaaatcatatttgaagacagtaagacagtaaactattttaggaagtcaacccccattgcactctgtggcagttattctggtaaaaataggcaaaagtgacctgaatctacaatgatgtcccaaagtaaccaagtaagagagattgtaaatgataaaccgagctttaaaggataaagtgttaataaagaaaggaagctgggcacatgtcaaaaagggagatcgaaatgttaggtaatcatttagaaaggacagaaaatatttaaagtggctcataggtaatgaatatttctgacttagatgtaaatccatctggaatctttacatcctttgccagctgaaacaagaaagtgaagggacaatgatatttcatggtcagtttattttgtaagagacagaagaaattatatctatacattaccttgtagcagcagtacctggaagccccagcccgtcacagaagtgtggaggggggctcctgactagacaatttccctagcccttgtgatttgaagcatgaaagttctggcaggttatgagcagcactagggataaagtatggttttattttggtgtaatttaggtttttcaacaaagcccttgtctaaaataaaaggcattattggaaatatttgaaaactagaaaatgatggataaaagggctgataagaaaatttctgactgtcagtagaagtgagataagatcctcagaggaaacagtaagaagggataatcattaagatagtaaaacaggcaaagcagaatcacatgtgcacacacacatacacatgtaaacattggaatgcataagttttaatattttagcgctatcagtttctaaatgcattaattactaactgccctctcccaagattcatttagttcaaacagtatccgtaaactaggaataatgccacatgcattcaatgggatcttttaagtactcttcagtttgttccaagaaatgtgcctactgaaatcaaattaatttgtattcaatgtgtacttcaagactgctaattgtttcatctgaaagcctacaatgaatcattgttcaaccttgaaaaataaaattttgtaaaaca

SEQ ID NO: 14177 - DNA, 908 bp, Homo sapiens
  source 1..908: mol_type = unassigned DNA
cgacacggagcacccttctagcttcttcgtctccaggactgacgctcaggctcctctctcgccttagcccaacttgctttcccgcctcgcaaactccggtttccctccactcccaactcttttcactacacgtttcccctcctctatctcccacgccacgaaccccgatccccagactcctctctcccgccctcctccttcctctctcctcccttcaactcttcatccgcttccacctcagactctgcgcgcacccaattcagtcgcccgctcccgttcggctcctcgaagccatggcgggacctgggggctggagggacagggaggtcacggatctgggccacctgccggatccaactggaatattctcactagataaaaccattggccttggtacttatggcagaatctatttgggacttcatgagaagactggtgcatttacagctgttaaagtgatgaacgctcgtaagacccctttacctgaaataggaaggcgagtgagagtgaataaatatcaaaaatctgttgggtggagatacagtgatgaggaagaggatctcaggactgaactcaaccttctgaggaagtactctttccacaaaaacattgtgtccttctatggagcatttttcaagctgagtccccctggtcagcggcaccaactttggatggtgatggagttatgtgcagcaggttcggtcactgatgtagtgagaatgaccagtaatcagagtttaaaagaagattggattgcttatatctgccgagaaatccttcagccaaaagtcatatttctgggaacgggttgtagtgattccagcctaaagaaagaattgtgtctgaaacatcaaaattaagctgtttctcttatcaaaagtttttccaaaaatactaagaactgtacc

SEQ ID NO: 14178 - DNA, 5201 bp, Homo sapiens
  source 1..5201: mol_type = unassigned DNA
gtctccaggactgacgctcaggctcctctctcgccttagcccaacttgctttcccgcctcgcaaactccggtttccctccactcccaactcttttcactacacgtttcccctcctctatctcccacgccacgaaccccgatccccagactcctctctcccgccctcctccttcctctctcctcccttcaactcttcatccgcttccacctcagactctgcgcgcacccaattcagtcgcccgctcccgttcggctcctcgaagccatggcgggacctgggggctggagggacagggaggtcacggatctgggccacctgccggatccaactggaatattctcactagataaaaccattggccttggtacttatggcagaatctatttgggacttcatgagaagactggtgcatttacagctgttaaagtgatgaacgctcgtaagacccctttacctgaaataggaaggcgagtgagagtgaataaatatcaaaaatctgttgggtggagatacagtgatgaggaagaggatctcaggactgaactcaaccttctgaggaagtactctttccacaaaaacattgtgtccttctatggagcatttttcaagctgagtccccctggtcagcggcaccaactttggatggtgatggagttatgtgcagcaggttcggtcactgatgtagtgagaatgaccagtaatcagagtttaaaagaagattggattgcttatatctgccgagaaatccttcagggcttagctcaccttcacgcacaccgagtaattcaccgggacatcaaaggtcagaatgtgctgctgactcataatgctgaagtaaaactggttgattttggagtgagtgcccaggtgagcagaactaatggaagaaggaatagtttcattgggacaccatactggatggcacctgaggtgattgactgtgatgaggacccaagacgctcctatgattacagaagtgatgtgtggtctgtgggaattactgccattgaaatggctgaaggagcccctcctctgtgtaaccttcaacccttggaagctctcttcgttattttgcgggaatctgctcccacagtcaaatccagcggatggtcccgtaagttccacaatttcatggaaaagtgtacgataaaaaatttcctgtttcgtcctacttctgcaaacatgcttcaacacccatttgttcgggatataaaaaatgaacgacatgttgttgagtcattaacaaggcatcttactggaatcattaaaaaaagacagaaaaaaggatttgcagtgagccaagatcatgccactgcactccagcccgggtgacagaacaagacgctgcctcaaaaaaataaaaataaaagtaccaggatggattttcaccaagtccagaagaagcccctgggaagtcctaactttatatattatattacatattccacatttgattttgcggaccataggcagagttgagagtaacaatggaatgtaaaagggaaaacttgaaaaagcaggcatcctcagatcagctgtgggattgattgtagtggggcttgttgtatctatacatgtatcatgttttgaggcaaggagcagcaagaattaatttatttacctatggtaatgaagttattcagccaactttacagaggccagccagtttcaaatgggttcaggaaaaccacacatctatatggtaatttgctaatttccagaattgcaaaatttccaaaatgttacctgtaggaaaagttccatttatatggaagttacactaaagatataaatatagttgccctgaacattttaatataggaaattcaaaataaaactcttgtttgtaatcttctatatttcagtagtcacagtacagctgatgataggaaagaagctgaatgttttcaatgtgtttagtgtaaaacacagaattaagaatttgccttctcattgaaaagaccaaatatcaacctcaagccataaagtccttacatctagagcccacagctgtaagccatgctcaccactatttagagtttctcttgtctcattctccctttgtcccattctctcttcttcctctttagaattgcagaaatcaagttgctaaattttctctgttcagagaaattaatctgcatgcaatagctatattgtgctgcaaaagtgggcctagaaactagaatatggtctacatcacaaaccaagtacttttgaagggctaccttcttgcccttgtaattcactccacatcctaagaagcagagggaacaaggtgattaagtggataacatgcttatctgctgactgtttatgcattatgtttttctcttttgtaaaaaaaggaatacctttgatctttgaaagagaagaagctattaaggaacagtacaccgtgagaagattcagaggaccctcttgcactcacgagcttctgagattgccaaccagcagcagatgcagaccacttagagtcctgcatggggaaccctctcagccaaggtggctacctgatcgagaagagccacaggtccaggcacttcagcagctacagggagcagccagggtattcatgccactgcaggctctggacagtgcacctaagcctctaaaggggcaggctcaggcacctcaacgactacaaggggcagctcgggtgttcatgccactacaggctcaggtgaaggctaaggcctctaaacctctacaaatgcagattaaggcacctccacgactacggagggcagccagggtgctcatgccactacaggcacaggttagggcacctaggcttctgcaggtacagtcccaggtatccaaaaagcagcaggcccagacccagacatcagaaccacaagatttggaccaggtaccagaggaatttcagggtcaagatcaggtacccgaacaacaaaggcagggccaggcccctgaacaacagcagaggcacaaccaggtgcctgaacaagagctggagcagaaccaggcacctgaacagccagaggtacaggaacaggctgccgagcctgcacaggcagagactgaggcagaggaacctgagtcattacgagtaaatgcccaggtatttctgcccctgctatcacaagatcaccatgtgctgttgccactacatttggatactcaggtgctcattccagtagaggggcaaactgaaggatcacctcaggcacaggcttggacactagaacccccacaggcaattggctcagttcaagcactgatagagggactatcaagagacttgcttcgggcaccaaactcaaataactcaaagccacttggtccgttgcaaaccctgatggaaaatctgtcatcaaataggttttactcacaaccagaacaggcacgggagaaaaaatcaaaagtttctactctgaggcaagcactggcaaaaagactatcaccaaagaggttcagggcaaagtcatcatggagacctgaaaagcttgaactctcggatttagaagcccgcaggcaaaggcgccaacgcagatgggaagatatctttaatcagcatgaggaagaattgagacaagttgataaagacaaagaagatgaatcatcagacaatgatgaagtatttcattcgattcaggctgaagtccagatagagccattgaagccatacatttcaaatcctaaaaaaattgaggttcaagagagatctccttctgtgcctaacaaccaggatcatgcacatcatgtcaagttctcttcaagcgttcctcagcggtctcttttggaacaagctcagaagcccattgacatcagacaaaggagttcgcaaaatcgtcaaaattggctggcagcatcagaatcttcttctgaggaagaaagtcctgtgactggaaggaggtctcagtcatcaccaccttattctactattgatcagaagttgctggttgacatccatgttccagatggatttaaagtaggaaaaatatcaccccctgtatacttgacaaacgaatgggtaggctataatgcactctctgaaatcttccggaatgattggttaactccggcacctgtcattcagccacctgaagaggatggtgattatgttgaactctatgatgccagtgctgatactgatggtgatgatgatgatgagtctaatgatacttttgaagatacctatgatcatgccaatggcaatgatgacttggataaccaggttgatcaggctaatgatgtttgtaaagaccatgatgatgacaacaataagtttgttgatgatgtaaataataattattatgaggcgcctagttgtccaagggcaagctatggcagagatggaagctgcaagcaagatggttatgatggaagtcgtggaaaagaggaagcctacagaggctatggaagccatacagccaatagaagccatggaggaagtgcagccagtgaggacaatgcagccattggagatcaggaagaacatgcagccaatataggcagtgaaagaagaggcagtgagggtgatggaggtaagggagtcgttcgaaccagtgaagagagtggagcccttggactcaatggagaagaaaattgctcagagacagatggtccaggattgaagagacctgcgtctcaggactttgaatatctacaggaggagccaggtggtggaaatgaggcctcaaatgccattgactcaggtgctgcaccgtcagcacctgatcatgagagtgacaataaggacatatcagaatcatcaacacaatcagatttttctgccaatcactcatctccttccaaaggttctgggatgtctgctgatgctaactttgccagtgccatcttatacgctggattcgtagaagtacctgaggaatcacctaagcaaccctctgaagtcaatgttaacccactctatgtctctcctgcatgtaaaaaaccactaatccacatgtatgaaaaggagttcacttctgagatctgctgtggttctttgtggggagtcaatttgctgttgggaacccgatctaatctatatctgatggacagaagtggaaaggctgacattactaaacttataaggcgaagaccattccgccagattcaagtcttagagccactcaatttgctgattaccatctcaggtcataagaacagacttcgggtgtatcatctgacctggttgaggaacaagattttgaataatgatccagaaagt

SEQ ID NO: 14179 - DNA, 1687 bp, Homo sapiens
  source 1..1687: mol_type = unassigned DNA
attacaaaagctgtaatgatacaagggaaccatgtgtgctaaagaatatctagttacttcaggaatcatctgagaagcatctgaggctgtatggatttgcagcagtccagtttttttctaaacagattttattaagacaaccttctttcctgcaatttcttttactctcttcctttatcttttttttctgattcaattgctcatgcaagtgcccagggaacgcattaaaattgcttttcgtctctggatccccattttagttataaggattgttgttgctgggacatggcctcaagcacctggcctgagtacgctgggtttgaatatcatcattttacctgattgcttgggaattggcatgatgctcaccttcaatgctgaagccctctctgtggaagcaaatgaacaactcttcaagaagatccttgaaatgtggaaagacataccatcttctatagcttttgaatgtacacagcgaaccacaggatggggccaaaaggccattgaagtgcgctctttgcaatccagggttctggaaagtgagctgaagcgcaggtcaattaagaagctgagattcctgtgcacccggggtgacaagctgttctttacctctaccctgcgcaatcaccacagccgggtttacttcatgacacttggaaaacttgaagagctccaaagcaattatgatgtctaaaagtttccagtgatttattaccacattataaacatcatgtataggcagtctgcatcttcagatttcagagattaaatgagtattcagttttatttttagtaaagattaaatccaaaactttacttttaatgtagcacagaatagttttaatgagaaatgcagctttatgtataaaattaactatagcaagctctaggtactccaatggtgtacaatgtcttttgcacaaactttgtaacttttgttactgtgaattcaaacattactctttggacagtttggacagtatctgtattcagattttacaacatggagtaaagaaacctgttatgaattagattacaagcagccttcaaaagaattggcactgggataagatttttcagaaaaagaaaaacatcggcaaactgtgtgtgatttttccaaagctatataaagaaccaaaggtttagtcaagaaacaaaaatcttaaagattattataacccagactaaggttgaacaacctgcatgcccagagaaaactatggcgacaaaggggaaaaggccaccactcgttttctcactgattcatgccaattaagcctacagttaaagaccagttttgttcttttcacccatttttaagctggttttctcctgataagaagaaaggaagaaagccccagacgcttggtttttctcagaacccccaaaagatgtgcaatagctgttgttacaaaccaccaaataatacagttgtgagcctgaatacaggactgaactcctatacacgtgtactgtagaatgagtattttttaataccttaaggtaggcgtcaaattctactccccaaagcagagatagattgatttatcaaaattattatctggccaacagtgtgactatcagacagcatcaaatatttgcccaatccaagattagactacacaaaagcttccttccagtattaaacaaaaagaattaaacataactatgaaaaaactttgctaat

SEQ ID NO: 14180 - DNA, 8113 bp, Homo sapiens
  source 1..8113: mol_type = unassigned DNA
gggcggggttattggaagaagaagaagaaaaaaagaactagataaaggagggcacatccctctcactcccgcctttccccttacctttctgtctctcgggacccttatttcttcgtcacggtgtccaggaccattttgaccctgtcggccccggcacccccccgccgcaccccagccccgagcatggggacggcgctgctccagcgcgggggctgttttcttctgtgcctctcgctgctgctcctgggctgctgggcggagctgggcagcgggctggagtttccgggcgccgagggccaatggacgcgcttccccaagtggaacgcctgctgcgagagcgagatgagcttccagctcaagactcgcagcgcccgcggcctcgtgctctacttcgacgacgagggcttctgcgacttcctggagctgattctgacgcgcggcggccgcctgcagctcagcttctccatcttctgcgctgagcctgcgacgctcctggccgacacgccggttaacgacggcgcctggcacagcgtgcgcatccgccgccagttccgcaacaccacgctcttcatcgaccaggtggaggccaagtgggtggaggtcaagtccaagcgcagggacatgacggtgttcagcggccttttcgtcggggggctgcccccggaactgcgcgccgcggcgctcaagctcaccctggcctcggtgagggagcgggagcccttcaaggggtggattcgtgacgtgagggtcaactcctcgcaggtcctgcccgtggacagcggcgaggtgaagctggacgatgagccgcccaacagcggcgggggaagcccgtgcgaggcgggcgaggagggcgagggcggggtgtgcctcaacggaggtgtgtgctccgtggtggacgaccaggccgtgtgcgactgctcgcgaaccggcttccgcggcaaggactgcagccaagaagacaacaatgtggaaggtctggcgcacctgatgatgggcgaccaaggtaaaagtaaaggaaaagaagaatatattgccacgttcaaaggatctgaatacttctgctacgacttgtctcaaaaccccattcaaagcagcagtgatgaaataactctgtcatttaaaacccttcagaggaatggactgatgcttcacactgggaaatcggctgattatgtcaatcttgccctgaaaaatggagctgtctctctggtcattaatttgggatcaggggcctttgaagcactagtggagcctgtgaatggaaagtttaatgataatgcctggcatgatgtgaaagtcaccaggaatctgcgtcaggtgacaatatcagtggatgggattcttaccacaacgggctacacgcaagaagattataccatgctggggtctgatgactttttctatgttggaggcagtcccagcacagccgaccttccagggtcaccagtcagtaacaactttatgggctgtctcaaagaggttgtatataaaaataatgatgtgaggctggaattatctcgacttgccaagcaaggagatcctaagatgaagatccatggagtggtggcatttaaatgtgagaatgttgcaactttagacccaatcacctttgaaaccccagagtctttcatctctttgcctaaatggaatgcaaagaaaactggctccatatcatttgatttccgtacaacagagccaaatggcctcatcttatttagccatggcaagccaagacatcagaaagatgccaagcacccacagatgataaaggtggacttctttgctattgagatgctagatggccacctctacctcctcctggacatggggtcaggtactataaaaataaaagccctgttgaagaaagtgaatgatggagaatggtatcatgtggacttccagagagacggacggtcaggtaccatttctgtcaacacgttgcgtactccctacactgctcctggtgagagtgagattctggacctggatgatgagttgtacctgggggggctgccagaaaataaagctggccttgtcttccccaccgaggtgtggactgctctgctcaactatggctacgtgggctgcatcagggatttgttcatcgatggccaaagcaaagatatccggcaaatggctgaagttcaaagtactgctggagtgaagccttcctgctcaaaggaaacagcaaaaccgtgccttagcaacccttgcaaaaacaatggcatgtgcagggatgggtggaacagatatgtctgtgattgttccggaacaggctatcttggcaggtcctgtgagagagaggcaacggttttgagctatgatgggagcatgtttatgaaaattcagctccccgtagtcatgcatacggaggctgaggatgtttccttacggttccgatcccagcgtgcatatggcattctgatggcaaccacttctagagactctgctgacaccctccgcctggagctagacgcaggacgtgtgaaactgacggtcaatctagattgtatcaggattaactgtaattccagcaaaggtcccgagactctttttgctggctataacctcaatgataacgagtggcacacagtgcgtgtagttcggcgtggaaaaagtttaaagttaacagtggatgaccaacaggccatgacaggtcaaatggcaggtgatcatactaggctggagttccataacatagagactggcatcatcacagaacgacggtatctttcttctgtcccctccaacttcattggacacctgcagagcttgacatttaatggaatggcatacattgacctgtgtaaaaatggcgacatagattactgtgagcttaatgccagatttggcttcaggaacatcatagcagatcctgtcaccttcaagaccaaatcgagctatgttgccttagctaccttgcaagcctacacttctatgcatctttttttccagttcaagacaacatccctagatggattaattctatataacagtggggatggaaatgactttattgtggttgaattagttaaagggtacttacattacgtgtttgatttgggaaatggtgctaacctcatcaaaggaagctcaaataaacctctcaatgacaatcagtggcacaacgtgatgatatcaagggacaccagcaacctccacactgtaaagattgacacaaaaatcacaacgcaaatcaccgccggagccaggaacttagacctcaagagtgacttatatataggaggagtagctaaagaaacatacaaatccttaccaaaacttgtacatgccaaagaaggctttcaaggctgcctggcatcagttgatttaaatggacggcttccggacctcatctccgatgctcttttctgcaacggacagatcgagagaggatgtgaagggcccagcacaacctgccaagaggactcatgttccaatcaaggtgtgtgcttgcaacaatgggatggcttcagctgtgactgtagtatgacttccttcagtggaccactctgcaatgaccctgggacgacatatatctttagcaaaggtggtggacaaatcacgtataagtggcctcctaatgaccgacccagtacacgagcagacagactggccataggttttagcactgttcagaaagaagccgtattggtgcgagtggacagttcttcaggcttgggtgactacctagaactgcatatacaccagggaaaaattggagttaagtttaatgttgggacagatgacatcgccattgaagaatccaatgcaatcattaatgatgggaaataccatgtagttcgtttcacgaggagtggtggcaatgccacgttgcaggtggacagctggccagtgatcgagcgctaccctgcaggaaacaatgataacgagcgcctggcgattgctagacagcgaattccatatcgacttggtcgagtagttgatgaatggctactcgacaaagggcgtcagctcacaatcttcaatagccaagcaaccataataattggcgggaaagagcagggccagcccttccagggccagctctctgggctgtactacaatggcttgaaagttctgaatatggcagccgaaaacgatgccaacatcgccatagtgggaaatgtgagactggttggtgaagtgccttcctctatgacaactgagtcaacagccactgccatgcaatcagagatgtccacatcaattatggagactaccacgaccctggctactagcacagccagaagaggaaagcccccgacaaaagaacccattagccagaccacagatgacatccttgtggcctcagcagagtgtcccagcgatgatgaggacattgacccctgtgagccgagctcagccaacccaacccgagcaggcggcagagagccgtatccaggctcagcagaagtgatccgggagtccagcagcaccacgggtatggtcgttgggatagtagccgctgccgccctgtgcatccttatcctcctctatgccatgtacaagtacagaaaccgggatgaaggctcataccatgtggacgagagtcgaaactacatcagtaactcagcacagtccaatggggctgttgtaaaggagaaacaacccagcagtgcgaaaagctccaacaaaaataagaaaaacaaggataaagagtattatgtctgatcccaagatcttaaatggacacttgtatagaaatagtcttcattttatctgagacataatataaacttatttactttcctttttatgaagcacatacaaaagaagacagggaatgcaatcaggaaggaaagactttttaaaaaataaaaacaagtatctcatgctcttgtttctcaaaaaagaaaaacaaaaaacaaaaaacaggggccaataaattccctaacatccacagtgttttcatttactctgcttgtctttatgttgctggaacatttctaaaagacagtgatgaccgcacgcattcataaagcaaaggagtactacagcatcaaggcacaacacaaaaaccaacacaaaacataacacaaaaaagaagctacctatgatcctggatttagccaaagtgctagcgctttcctgagaagtcagtccaattgccagagaagactgtccttttgagtgactcaacctgcaaacctttaagagtttgccgcctggtgcaactggagcagtggttggaacttgcatttgaaacaaagtgctggcttttttgaagacttgtgtaggaacacattcaaaaagcccctttctggttgtgagagaggaaaaaaaagtatggaggccttattttcaaaaatgtgaaatataaggcacgttttcacacaaaatttcaaaacaaaaacaagagggcatagatgcaatcattgggaaattttcatgcacgcttattatgttattacatatgtttatataaaatccatctctgtgtgctttctggactgtgataagtgacgttttatagcctgttgtatagaaaatgcaaaatatatctctgctcttcagccatttttggtaaattcaatgttataagtgttgctaagtatagggagttttatgacatcagagcaacaattatttcagttgggtttttctttttttttgccaccattataaattgccacaattacttttattttttaaagaaattacagtgtagtgtttattctaaggaagatatgtatgaatgtatatacaaagactcagctacttcttttcttatatgtacagccttcattctgttgcaattaagttttagtacttgtatgaaaggtgtgaattagaaagtcacatatatacatatgtatcttataatcttttctccctgaaatactcacattcccacatacattcactattttcacacacacacacacacacacacacacacacacacacacacacacacgaatccacagcaatccatcagatatgctggaagatccaaacgtgcatacagtagcaaatatttattgacaaattgaaaagcaggaaggaagagggttgtgccaaggtattgatgacaaatggggtgatttgcttcattgagatcttgctcccaggtaaccttaagaagattttagtccctaaagaaatgaacctttccttatcaaatagaatatcactgatatactgctgcatgaataagaaccattatgtgggcaggttatggaagcaaaattggttaatctacaccttaactctggctgctgcaattgaaaactttctttctaataaaataatatatatatctctgaatctgatgtgcatgatgaacatttctggaaagtaaacactttctctcgactaagaaagtatttttcagtaatttttgattctgtattactacccacttaaaaaatcattctctgttaattattgactatgttttaacttttctggttttacatatatatcattaaatatagttttagtttaacacattaagtagtggaaaagtatagattatacacttgttttgcatattattcaatgatgttcacagcaataaattactaatatgagaaggtagtgcaaaaaatgcattattacattgcaagttgatgtttcaggaaaaattggttgcattacttgaataccttctaaaagaacgataaaaaattttgtagaagagaagaatatctttccaattagctttaatcagcaaaggcaaaaaatgcaaaacatcttttgtgatactttagttgatgaaaaaaaagccaagaagtggcctggatttcagacatacagcaccttagaaatatgtataattcatagcaaatcaccactatctatggttgccaagtaattgttgtgtacaaagaaatttagtggctttttatgacccagaaagtagaaggtataaaatgaaaatttaatatccattgcttcttttctagattttcattttttttaatttgccacattaaataattcacgagtcttttcttttcccccgtctcattcagtcttactcagggaaagccagttaaataagaagggaagtgtaaaactactaatttacagcttgaagggtttttttttttaagattgcttttctattttatctattaagcttgaaccagtttccatctggaaagattctaaaatataatagaaaataaattgaataatggtaattttaagcagtatatctatgaaatgtgttgtttgggattgatttcaatgtttctccccagcgtaaattttaaagttacatgcaatgattgatatagtttattatcagcaaaattatttctaatattattggcttacacaaactctagcaaaaattattttttcctcaatggaaaaagaaaagagaggaacagagttagaaagagaaaatgacttgaatcccaagtatcttcataccaaacatatcagggttccctgcatagtttgcagttgattgaggatttcacacgacttggcataaatttgattacatctctagactgtaacttttctgattgattatgcttcttttttatccatgtaatgtgttgccttttttaaaagaacaaatactacaataacgtgtgaagtggtcaatccctaagacatcaaagaaaggccacataaccctacccttctagtgctttgtgtgattgggtatcaaaggggttttcttcttctttttttgtttgtttgtttttctgttgcaaggccaatttatccattattggaaatgctaagcaagtggaatttactgttttgttaataaaatatttcttaatacaactgtgatttattgattttaaaaattatatgcggcaccatttcgtgcttaagtgggaaagtaaagaaggctgcatttgaagggaagacccatccttatattatagaggaagaatgttgactctcttttttctggatttaactagtcattaaagacctctatattcatacacttaaagatgtagccattaaatgtacttttgttatatttgttcatcttgatatgccagaaaccataaactcatacagtattagttgcaaacaatattaaaatactaatttcataaatatgctttttctctataaaagacaatggaatccaagttaagtaaacctgtgattaaattccaacactatcaca

SEQ ID NO: 14181 - DNA, 9375 bp, Homo sapiens
  source 1..9375: mol_type = unassigned DNA
tcgttcgttctctctctctctctctctctctctctctctctctctctctctttctttctttccgatggggaagagagggtggtgacaagttagaagcgcttgcggaaggtccccgcccccaggatcaggctccccctgcaaggggacgatgcaaaggtaaaagcacctcgctccgcagcatccagacctggaggggctgcgaccacgggccgagcccacccattccccagccaaaggacgggcccgccgctctccatggtactgcggagagctcagctccgcccttctctttcagaaggacagcacccggcgtcacgtaacccagccttctcaggctccaccaccgccttttccttcccagctctttccctctcctccccctcctcctccttctcctcctcctcctcctcctgctcccctccgttgcctgttctcccctcccgcactcctggagatagacgctcaagcctgacgcctctgaaaaggcagcagcagtcgccttatccatagacctcaggaaattcgctttgaccgatgcatgcttcaggctctggctcgagctgaggggaataaccgggcagatgtctgagtccttaaaaaagacaagataaaaccaaaatgcatcaccaacacacaaccaattgatgtgctggcatcttagcttggccctgcagaggcagagagaaaagaagaggagctgttgcgatttccacatctaacagcttctggctatttcgcaactgctgggtttgagtcctactgttgccgtggctgaaaagagaagtaaaatccaacttgtgagaccacgcacaaggaattaggctttggctgcagcggtgctgaagcccatgctatgacagaagaagcaggcctttgaagctatcctcgggttaagaaatggtgccctaaagaggcaagcatccctttctccgttctgctgtaagacaccacatctgaaggagacagacttgaggcattcacaagcatccaaggatactggctcactgctggcttcctgtactttcttgagaaaagtgttttctttttactgactctcactgcttccttttggcctggtaccactggtggaacctggcagataatgggatttgaggagttaagtatctgttgacactgcagatactcttaaattagttaatcagactcaaatgggtcagtgctttcccttgatcttttgttgaagccttttccagaacgttgtctccaaagtgcatcctccctttggtctggaagttctgtggctaccctgtaccactggggtcaacgttttccagttggaagaggactacagggagagagggcggggttattggaagaagaagaagaaaaaaagaactagataaaggagggcacatccctctcactcccgcctttccccttacctttctgtctctcgggacccttatttcttcgtcacggtgtccaggaccattttgaccctgtcggccccggcacccccccgccgcaccccagccccgagcatggggacggcgctgctccagcgcgggggctgttttcttctgtgcctctcgctgctgctcctgggctgctgggcggagctgggcagcgggctggagtttccgggcgccgagggccaatggacgcgcttccccaagtggaacgcctgctgcgagagcgagatgagcttccagctcaagactcgcagcgcccgcggcctcgtgctctacttcgacgacgagggcttctgcgacttcctggagctgattctgacgcgcggcggccgcctgcagctcagcttctccatcttctgcgctgagcctgcgacgctcctggccgacacgccggttaacgacggcgcctggcacagcgtgcgcatccgccgccagttccgcaacaccacgctcttcatcgaccaggtggaggccaagtgggtggaggtcaagtccaagcgcagggacatgacggtgttcagcggccttttcgtcggggggctgcccccggaactgcgcgccgcggcgctcaagctcaccctggcctcggtgagggagcgggagcccttcaaggggtggattcgtgacgtgagggtcaactcctcgcaggtcctgcccgtggacagcggcgaggtgaagctggacgatgagccgcccaacagcggcgggggaagcccgtgcgaggcgggcgaggagggcgagggcggggtgtgcctcaacggaggtgtgtgctccgtggtggacgaccaggccgtgtgcgactgctcgcgaaccggcttccgcggcaaggactgcagccaagaagacaacaatgtggaaggtctggcgcacctgatgatgggcgaccaaggtaaaagtaaaggaaaagaagaatatattgccacgttcaaaggatctgaatacttctgctacgacttgtctcaaaaccccattcaaagcagcagtgatgaaataactctgtcatttaaaacccttcagaggaatggactgatgcttcacactgggaaatcggctgattatgtcaatcttgccctgaaaaatggagctgtctctctggtcattaatttgggatcaggggcctttgaagcactagtggagcctgtgaatggaaagtttaatgataatgcctggcatgatgtgaaagtcaccaggaatctgcgtcagcactcaggcattggacacgctatggtgacaatatcagtggatgggattcttaccacaacgggctacacgcaagaagattataccatgctggggtctgatgactttttctatgttggaggcagtcccagcacagccgaccttccagggtcaccagtcagtaacaactttatgggctgtctcaaagaggttgtatataaaaataatgatgtgaggctggaattatctcgacttgccaagcaaggagatcctaagatgaagatccatggagtggtggcatttaaatgtgagaatgttgcaactttagacccaatcacctttgaaaccccagagtctttcatctctttgcctaaatggaatgcaaagaaaactggctccatatcatttgatttccgtacaacagagccaaatggcctcatcttatttagccatggcaagccaagacatcagaaagatgccaagcacccacagatgataaaggtggacttctttgctattgagatgctagatggccacctctacctcctcctggacatggggtcaggtactataaaaataaaagccctgttgaagaaagtgaatgatggagaatggtatcatgtggacttccagagagacggacggtcaggtaccatttctgtcaacacgttgcgtactccctacactgctcctggtgagagtgagattctggacctggatgatgagttgtacctgggggggctgccagaaaataaagctggccttgtcttccccaccgaggtgtggactgctctgctcaactatggctacgtgggctgcatcagggatttgttcatcgatggccaaagcaaagatatccggcaaatggctgaagttcaaagtactgctggagtgaagccttcctgctcaaaggaaacagcaaaaccgtgccttagcaacccttgcaaaaacaatggcatgtgcagggatgggtggaacagatatgtctgtgattgttccggaacaggctatcttggcaggtcctgtgagagagaggcaacggttttgagctatgatgggagcatgtttatgaaaattcagctccccgtagtcatgcatacggaggctgaggatgtttccttacggttccgatcccagcgtgcatatggcattctgatggcaaccacttctagagactctgctgacaccctccgcctggagctagacgcaggacgtgtgaaactgacggtcaatctagattgtatcaggattaactgtaattccagcaaaggtcccgagactctttttgctggctataacctcaatgataacgagtggcacacagtgcgtgtagttcggcgtggaaaaagtttaaagttaacagtggatgaccaacaggccatgacaggtcaaatggcaggtgatcatactaggctggagttccataacatagagactggcatcatcacagaacgacggtatctttcttctgtcccctccaacttcattggacacctgcagagcttgacatttaatggaatggcatacattgacctgtgtaaaaatggcgacatagattactgtgagcttaatgccagatttggcttcaggaacatcatagcagatcctgtcaccttcaagaccaaatcgagctatgttgccttagctaccttgcaagcctacacttctatgcatctttttttccagttcaagacaacatccctagatggattaattctatataacagtggggatggaaatgactttattgtggttgaattagttaaagggtacttacattacgtgtttgatttgggaaatggtgctaacctcatcaaaggaagctcaaataaacctctcaatgacaatcagtggcacaacgtgatgatatcaagggacaccagcaacctccacactgtaaagattgacacaaaaatcacaacgcaaatcaccgccggagccaggaacttagacctcaagagtgacttatatataggaggagtagctaaagaaacatacaaatccttaccaaaacttgtacatgccaaagaaggctttcaaggctgcctggcatcagttgatttaaatggacggcttccggacctcatctccgatgctcttttctgcaacggacagatcgagagaggatgtgaagggcccagcacaacctgccaagaggactcatgttccaatcaaggtgtgtgcttgcaacaatgggatggcttcagctgtgactgtagtatgacttccttcagtggaccactctgcaatgaccctgggacgacatatatctttagcaaaggtggtggacaaatcacgtataagtggcctcctaatgaccgacccagtacacgagcagacagactggccataggttttagcactgttcagaaagaagccgtattggtgcgagtggacagttcttcaggcttgggtgactacctagaactgcatatacaccagggaaaaattggagttaagtttaatgttgggacagatgacatcgccattgaagaatccaatgcaatcattaatgatgggaaataccatgtagttcgtttcacgaggagtggtggcaatgccacgttgcaggtggacagctggccagtgatcgagcgctaccctgcagggcgtcagctcacaatcttcaatagccaagcaaccataataattggcgggaaagagcagggccagcccttccagggccagctctctgggctgtactacaatggcttgaaagttctgaatatggcagccgaaaacgatgccaacatcgccatagtgggaaatgtgagactggttggtgaagtgccttcctctatgacaactgagtcaacagccactgccatgcaatcagagatgtccacatcaattatggagactaccacgaccctggctactagcacagccagaagaggaaagcccccgacaaaagaacccattagccagaccacagatgacatccttgtggcctcagcagagtgtcccagcgatgatgaggacattgacccctgtgagccgagctcaggtgggttagccaacccaacccgagcaggcggcagagagccgtatccaggctcagcagaagtgatccgggagtccagcagcaccacgggtatggtcgttgggatagtagccgctgccgccctgtgcatccttatcctcctctatgccatgtacaagtacagaaaccgggatgaaggctcataccatgtggacgagagtcgaaactacatcagtaactcagcacagtccaatggggctgttgtaaaggagaaacaacccagcagtgcgaaaagctccaacaaaaataagaaaaacaaggataaagagtattatgtctgatcccaagatcttaaatggacacttgtatagaaatagtcttcattttatctgagacataatataaacttatttactttcctttttatgaagcacatacaaaagaagacagggaatgcaatcaggaaggaaagactttttaaaaaataaaaacaagtatctcatgctcttgtttctcaaaaaagaaaaacaaaaaacaaaaaacaggggccaataaattccctaacatccacagtgttttcatttactctgcttgtctttatgttgctggaacatttctaaaagacagtgatgaccgcacgcattcataaagcaaaggagtactacagcatcaaggcacaacacaaaaaccaacacaaaacataacacaaaaaagaagctacctatgatcctggatttagccaaagtgctagcgctttcctgagaagtcagtccaattgccagagaagactgtccttttgagtgactcaacctgcaaacctttaagagtttgccgcctggtgcaactggagcagtggttggaacttgcatttgaaacaaagtgctggcttttttgaagacttgtgtaggaacacattcaaaaagcccctttctggttgtgagagaggaaaaaaaagtatggaggccttattttcaaaaatgtgaaatataaggcacgttttcacacaaaatttcaaaacaaaaacaagagggcatagatgcaatcattgggaaattttcatgcacgcttattatgttattacatatgtttatataaaatccatctctgtgtgctttctggactgtgataagtgacgttttatagcctgttgtatagaaaatgcaaaatatatctctgctcttcagccatttttggtaaattcaatgttataagtgttgctaagtatagggagttttatgacatcagagcaacaattatttcagttgggtttttctttttttttgccaccattataaattgccacaattacttttattttttaaagaaattacagtgtagtgtttattctaaggaagatatgtatgaatgtatatacaaagactcagctacttcttttcttatatgtacagccttcattctgttgcaattaagttttagtacttgtatgaaaggtgtgaattagaaagtcacatatatacatatgtatcttataatcttttctccctgaaatactcacattcccacatacattcactattttcacacacacacacacacacacacacacacacacacacacacacacacgaatccacagcaatccatcagatatgctggaagatccaaacgtgcatacagtagcaaatatttattgacaaattgaaaagcaggaaggaagagggttgtgccaaggtattgatgacaaatggggtgatttgcttcattgagatcttgctcccaggtaaccttaagaagattttagtccctaaagaaatgaacctttccttatcaaatagaatatcactgatatactgctgcatgaataagaaccattatgtgggcaggttatggaagcaaaattggttaatctacaccttaactctggctgctgcaattgaaaactttctttctaataaaataatatatatatctctgaatctgatgtgcatgatgaacatttctggaaagtaaacactttctctcgactaagaaagtatttttcagtaatttttgattctgtattactacccacttaaaaaatcattctctgttaattattgactatgttttaacttttctggttttacatatatatcattaaatatagttttagtttaacacattaagtagtggaaaagtatagattatacacttgttttgcatattattcaatgatgttcacagcaataaattactaatatgagaaggtagtgcaaaaaatgcattattacattgcaagttgatgtttcaggaaaaattggttgcattacttgaataccttctaaaagaacgataaaaaattttgtagaagagaagaatatctttccaattagctttaatcagcaaaggcaaaaaatgcaaaacatcttttgtgatactttagttgatgaaaaaaaagccaagaagtggcctggatttcagacatacagcaccttagaaatatgtataattcatagcaaatcaccactatctatggttgccaagtaattgttgtgtacaaagaaatttagtggctttttatgacccagaaagtagaaggtataaaatgaaaatttaatatccattgcttcttttctagattttcattttttttaatttgccacattaaataattcacgagtcttttcttttcccccgtctcattcagtcttactcagggaaagccagttaaataagaagggaagtgtaaaactactaatttacagcttgaagggtttttttttttaagattgcttttctattttatctattaagcttgaaccagtttccatctggaaagattctaaaatataatagaaaataaattgaataatggtaattttaagcagtatatctatgaaatgtgttgtttgggattgatttcaatgtttctccccagcgtaaattttaaagttacatgcaatgattgatatagtttattatcagcaaaattatttctaatattattggcttacacaaactctagcaaaaattattttttcctcaatggaaaaagaaaagagaggaacagagttagaaagagaaaatgacttgaatcccaagtatcttcataccaaacatatcagggttccctgcatagtttgcagttgattgaggatttcacacgacttggcataaatttgattacatctctagactgtaacttttctgattgattatgcttcttttttatccatgtaatgtgttgccttttttaaaagaacaaatactacaataacgtgtgaagtggtcaatccctaagacatcaaagaaaggccacataaccctacccttctagtgctttgtgtgattgggtatcaaaggggttttcttcttctttttttgtttgtttgtttttctgttgcaaggccaatttatccattattggaaatgctaagcaagtggaatttactgttttgttaataaaatatttcttaatacaactgtgatttattgattttaaaaattatatgcggcaccatttcgtgcttaagtgggaaagtaaagaaggctgcatttgaagggaagacccatccttatattatagaggaagaatgttgactctcttttttctggatttaactagtcattaaagacctctatattcatacacttaaagatgtagccattaaatgtacttttgttatatttgttcatcttgatatgccagaaaccataaactcatacagtattagttgcaaacaatattaaaatactaatttcataaatatgctttttctctataaaagacaatggaatccaagttaagtaaacctgtgattaaattccaacactatcaca

SEQ ID NO: 14182 - DNA, 3595 bp, Homo sapiens
  source 1..3595: mol_type = unassigned DNA
gagtcagggagctctcctgtcaccagtattgatttcagaggatggactaaatttcctaggatttccattaagaattaagaaaaaagctctaagcacgcagggtagccagacagacatggatatgagatggcactgtgaaaacttgcaggtaaccacagatgacatccttgtggcctcagcagagtgtcccagcgatgatgaggacattgacccctgtgagccgagctcaggtgggttagccaacccaacccgagcaggcggcagagagccgtatccaggctcagcagaagtgatccgggagtccagcagcaccacgggtatggtcgttgggatagtagccgctgccgccctgtgcatccttatcctcctctatgccatgtacaagtacagaaaccgggatgaaggctcataccatgtggacgagagtcgaaactacatcagtaactcagcacagtccaatggggctgttgtaaaggagaaacaacccagcagtgcgaaaagctccaacaaaaataagaaaaacaaggataaagagtattatgtctgatcccaagatcttaaatggacacttgtatagaaatagtcttcattttatctgagacataatataaacttatttactttcctttttatgaagcacatacaaaagaagacagggaatgcaatcaggaaggaaagactttttaaaaaataaaaacaagtatctcatgctcttgtttctcaaaaaagaaaaacaaaaaacaaaaaacaggggccaataaattccctaacatccacagtgttttcatttactctgcttgtctttatgttgctggaacatttctaaaagacagtgatgaccgcacgcattcataaagcaaaggagtactacagcatcaaggcacaacacaaaaaccaacacaaaacataacacaaaaaagaagctacctatgatcctggatttagccaaagtgctagcgctttcctgagaagtcagtccaattgccagagaagactgtccttttgagtgactcaacctgcaaacctttaagagtttgccgcctggtgcaactggagcagtggttggaacttgcatttgaaacaaagtgctggcttttttgaagacttgtgtaggaacacattcaaaaagcccctttctggttgtgagagaggaaaaaaaagtatggaggccttattttcaaaaatgtgaaatataaggcacgttttcacacaaaatttcaaaacaaaaacaagagggcatagatgcaatcattgggaaattttcatgcacgcttattatgttattacatatgtttatataaaatccatctctgtgtgctttctggactgtgataagtgacgttttatagcctgttgtatagaaaatgcaaaatatatctctgctcttcagccatttttggtaaattcaatgttataagtgttgctaagtatagggagttttatgacatcagagcaacaattatttcagttgggtttttctttttttttgccaccattataaattgccacaattacttttattttttaaagaaattacagtgtagtgtttattctaaggaagatatgtatgaatgtatatacaaagactcagctacttcttttcttatatgtacagccttcattctgttgcaattaagttttagtacttgtatgaaaggtgtgaattagaaagtcacatatatacatatgtatcttataatcttttctccctgaaatactcacattcccacatacattcactattttcacacacacacacacacacacacacacacacacacacacacacacacgaatccacagcaatccatcagatatgctggaagatccaaacgtgcatacagtagcaaatatttattgacaaattgaaaagcaggaaggaagagggttgtgccaaggtattgatgacaaatggggtgatttgcttcattgagatcttgctcccaggtaaccttaagaagattttagtccctaaagaaatgaacctttccttatcaaatagaatatcactgatatactgctgcatgaataagaaccattatgtgggcaggttatggaagcaaaattggttaatctacaccttaactctggctgctgcaattgaaaactttctttctaataaaataatatatatatctctgaatctgatgtgcatgatgaacatttctggaaagtaaacactttctctcgactaagaaagtatttttcagtaatttttgattctgtattactacccacttaaaaaatcattctctgttaattattgactatgttttaacttttctggttttacatatatatcattaaatatagttttagtttaacacattaagtagtggaaaagtatagattatacacttgttttgcatattattcaatgatgttcacagcaataaattactaatatgagaaggtagtgcaaaaaatgcattattacattgcaagttgatgtttcaggaaaaattggttgcattacttgaataccttctaaaagaacgataaaaaattttgtagaagagaagaatatctttccaattagctttaatcagcaaaggcaaaaaatgcaaaacatcttttgtgatactttagttgatgaaaaaaaagccaagaagtggcctggatttcagacatacagcaccttagaaatatgtataattcatagcaaatcaccactatctatggttgccaagtaattgttgtgtacaaagaaatttagtggctttttatgacccagaaagtagaaggtataaaatgaaaatttaatatccattgcttcttttctagattttcattttttttaatttgccacattaaataattcacgagtcttttcttttcccccgtctcattcagtcttactcagggaaagccagttaaataagaagggaagtgtaaaactactaatttacagcttgaagggtttttttttttaagattgcttttctattttatctattaagcttgaaccagtttccatctggaaagattctaaaatataatagaaaataaattgaataatggtaattttaagcagtatatctatgaaatgtgttgtttgggattgatttcaatgtttctccccagcgtaaattttaaagttacatgcaatgattgatatagtttattatcagcaaaattatttctaatattattggcttacacaaactctagcaaaaattattttttcctcaatggaaaaagaaaagagaggaacagagttagaaagagaaaatgacttgaatcccaagtatcttcataccaaacatatcagggttccctgcatagtttgcagttgattgaggatttcacacgacttggcataaatttgattacatctctagactgtaacttttctgattgattatgcttcttttttatccatgtaatgtgttgccttttttaaaagaacaaatactacaataacgtgtgaagtggtcaatccctaagacatcaaagaaaggccacataaccctacccttctagtgctttgtgtgattgggtatcaaaggggttttcttcttctttttttgtttgtttgtttttctgttgcaaggccaatttatccattattggaaatgctaagcaagtggaattt

SEQ ID NO: 14183 - DNA, 3674 bp, Homo sapiens
  source 1..3674: mol_type = unassigned DNA
gagtcagggagctctcctgtcaccagtattgatttcagaggatggactaaatttcctaggatttccattaagaattaagaaaaaagctctaagcacgcagggtagccagacagacatggatatgagatggcactgtgaaaacttgcagcagcagcaaaatgcatgaatccagaaactctcccaattgtctcagaagaagtaagagcagagtaacatgaaaccatctccaatgctatttaaagaccacagatgacatccttgtggcctcagcagagtgtcccagcgatgatgaggacattgacccctgtgagccgagctcagccaacccaacccgagcaggcggcagagagccgtatccaggctcagcagaagtgatccgggagtccagcagcaccacgggtatggtcgttgggatagtagccgctgccgccctgtgcatccttatcctcctctatgccatgtacaagtacagaaaccgggatgaaggctcataccatgtggacgagagtcgaaactacatcagtaactcagcacagtccaatggggctgttgtaaaggagaaacaacccagcagtgcgaaaagctccaacaaaaataagaaaaacaaggataaagagtattatgtctgatcccaagatcttaaatggacacttgtatagaaatagtcttcattttatctgagacataatataaacttatttactttcctttttatgaagcacatacaaaagaagacagggaatgcaatcaggaaggaaagactttttaaaaaataaaaacaagtatctcatgctcttgtttctcaaaaaagaaaaacaaaaaacaaaaaacaggggccaataaattccctaacatccacagtgttttcatttactctgcttgtctttatgttgctggaacatttctaaaagacagtgatgaccgcacgcattcataaagcaaaggagtactacagcatcaaggcacaacacaaaaaccaacacaaaacataacacaaaaaagaagctacctatgatcctggatttagccaaagtgctagcgctttcctgagaagtcagtccaattgccagagaagactgtccttttgagtgactcaacctgcaaacctttaagagtttgccgcctggtgcaactggagcagtggttggaacttgcatttgaaacaaagtgctggcttttttgaagacttgtgtaggaacacattcaaaaagcccctttctggttgtgagagaggaaaaaaaagtatggaggccttattttcaaaaatgtgaaatataaggcacgttttcacacaaaatttcaaaacaaaaacaagagggcatagatgcaatcattgggaaattttcatgcacgcttattatgttattacatatgtttatataaaatccatctctgtgtgctttctggactgtgataagtgacgttttatagcctgttgtatagaaaatgcaaaatatatctctgctcttcagccatttttggtaaattcaatgttataagtgttgctaagtatagggagttttatgacatcagagcaacaattatttcagttgggtttttctttttttttgccaccattataaattgccacaattacttttattttttaaagaaattacagtgtagtgtttattctaaggaagatatgtatgaatgtatatacaaagactcagctacttcttttcttatatgtacagccttcattctgttgcaattaagttttagtacttgtatgaaaggtgtgaattagaaagtcacatatatacatatgtatcttataatcttttctccctgaaatactcacattcccacatacattcactattttcacacacacacacacacacacacacacacacacacacacacacacacgaatccacagcaatccatcagatatgctggaagatccaaacgtgcatacagtagcaaatatttattgacaaattgaaaagcaggaaggaagagggttgtgccaaggtattgatgacaaatggggtgatttgcttcattgagatcttgctcccaggtaaccttaagaagattttagtccctaaagaaatgaacctttccttatcaaatagaatatcactgatatactgctgcatgaataagaaccattatgtgggcaggttatggaagcaaaattggttaatctacaccttaactctggctgctgcaattgaaaactttctttctaataaaataatatatatatctctgaatctgatgtgcatgatgaacatttctggaaagtaaacactttctctcgactaagaaagtatttttcagtaatttttgattctgtattactacccacttaaaaaatcattctctgttaattattgactatgttttaacttttctggttttacatatatatcattaaatatagttttagtttaacacattaagtagtggaaaagtatagattatacacttgttttgcatattattcaatgatgttcacagcaataaattactaatatgagaaggtagtgcaaaaaatgcattattacattgcaagttgatgtttcaggaaaaattggttgcattacttgaataccttctaaaagaacgataaaaaattttgtagaagagaagaatatctttccaattagctttaatcagcaaaggcaaaaaatgcaaaacatcttttgtgatactttagttgatgaaaaaaaagccaagaagtggcctggatttcagacatacagcaccttagaaatatgtataattcatagcaaatcaccactatctatggttgccaagtaattgttgtgtacaaagaaatttagtggctttttatgacccagaaagtagaaggtataaaatgaaaatttaatatccattgcttcttttctagattttcattttttttaatttgccacattaaataattcacgagtcttttcttttcccccgtctcattcagtcttactcagggaaagccagttaaataagaagggaagtgtaaaactactaatttacagcttgaagggtttttttttttaagattgcttttctattttatctattaagcttgaaccagtttccatctggaaagattctaaaatataatagaaaataaattgaataatggtaattttaagcagtatatctatgaaatgtgttgtttgggattgatttcaatgtttctccccagcgtaaattttaaagttacatgcaatgattgatatagtttattatcagcaaaattatttctaatattattggcttacacaaactctagcaaaaattattttttcctcaatggaaaaagaaaagagaggaacagagttagaaagagaaaatgacttgaatcccaagtatcttcataccaaacatatcagggttccctgcatagtttgcagttgattgaggatttcacacgacttggcataaatttgattacatctctagactgtaacttttctgattgattatgcttcttttttatccatgtaatgtgttgccttttttaaaagaacaaatactacaataacgtgtgaagtggtcaatccctaagacatcaaagaaaggccacataaccctacccttctagtgctttgtgtgattgggtatcaaaggggttttcttcttctttttttgtttgtttgtttttctgttgcaaggccaatttatccattattggaaatgctaagcaagtggaa

SEQ ID NO: 14184 - DNA, 3692 bp, Homo sapiens
  source 1..3692: mol_type = unassigned DNA
actgagtcagggagctctcctgtcaccagtattgatttcagaggatggactaaatttcctaggatttccattaagaattaagaaaaaagctctaagcacgcagggtagccagacagacatggatatgagatggcactgtgaaaacttgcaggagacagaatgtcatatctgtggtgacaactattttcattaaattagatagccctcgcttcataaagggaagaaattccatgaatagaagttgctttaccagattacaaatgaccacagatgacatccttgtggcctcagcagagtgtcccagcgatgatgaggacattgacccctgtgagccgagctcagccaacccaacccgagcaggcggcagagagccgtatccaggctcagcagaagtgatccgggagtccagcagcaccacgggtatggtcgttgggatagtagccgctgccgccctgtgcatccttatcctcctctatgccatgtacaagtacagaaaccgggatgaaggctcataccatgtggacgagagtcgaaactacatcagtaactcagcacagtccaatggggctgttgtaaaggagaaacaacccagcagtgcgaaaagctccaacaaaaataagaaaaacaaggataaagagtattatgtctgatcccaagatcttaaatggacacttgtatagaaatagtcttcattttatctgagacataatataaacttatttactttcctttttatgaagcacatacaaaagaagacagggaatgcaatcaggaaggaaagactttttaaaaaataaaaacaagtatctcatgctcttgtttctcaaaaaagaaaaacaaaaaacaaaaaacaggggccaataaattccctaacatccacagtgttttcatttactctgcttgtctttatgttgctggaacatttctaaaagacagtgatgaccgcacgcattcataaagcaaaggagtactacagcatcaaggcacaacacaaaaaccaacacaaaacataacacaaaaaagaagctacctatgatcctggatttagccaaagtgctagcgctttcctgagaagtcagtccaattgccagagaagactgtccttttgagtgactcaacctgcaaacctttaagagtttgccgcctggtgcaactggagcagtggttggaacttgcatttgaaacaaagtgctggcttttttgaagacttgtgtaggaacacattcaaaaagcccctttctggttgtgagagaggaaaaaaaagtatggaggccttattttcaaaaatgtgaaatataaggcacgttttcacacaaaatttcaaaacaaaaacaagagggcatagatgcaatcattgggaaattttcatgcacgcttattatgttattacatatgtttatataaaatccatctctgtgtgctttctggactgtgataagtgacgttttatagcctgttgtatagaaaatgcaaaatatatctctgctcttcagccatttttggtaaattcaatgttataagtgttgctaagtatagggagttttatgacatcagagcaacaattatttcagttgggtttttctttttttttgccaccattataaattgccacaattacttttattttttaaagaaattacagtgtagtgtttattctaaggaagatatgtatgaatgtatatacaaagactcagctacttcttttcttatatgtacagccttcattctgttgcaattaagttttagtacttgtatgaaaggtgtgaattagaaagtcacatatatacatatgtatcttataatcttttctccctgaaatactcacattcccacatacattcactattttcacacacacacacacacacacacacacacacacacacacacacacacgaatccacagcaatccatcagatatgctggaagatccaaacgtgcatacagtagcaaatatttattgacaaattgaaaagcaggaaggaagagggttgtgccaaggtattgatgacaaatggggtgatttgcttcattgagatcttgctcccaggtaaccttaagaagattttagtccctaaagaaatgaacctttccttatcaaatagaatatcactgatatactgctgcatgaataagaaccattatgtgggcaggttatggaagcaaaattggttaatctacaccttaactctggctgctgcaattgaaaactttctttctaataaaataatatatatatctctgaatctgatgtgcatgatgaacatttctggaaagtaaacactttctctcgactaagaaagtatttttcagtaatttttgattctgtattactacccacttaaaaaatcattctctgttaattattgactatgttttaacttttctggttttacatatatatcattaaatatagttttagtttaacacattaagtagtggaaaagtatagattatacacttgttttgcatattattcaatgatgttcacagcaataaattactaatatgagaaggtagtgcaaaaaatgcattattacattgcaagttgatgtttcaggaaaaattggttgcattacttgaataccttctaaaagaacgataaaaaattttgtagaagagaagaatatctttccaattagctttaatcagcaaaggcaaaaaatgcaaaacatcttttgtgatactttagttgatgaaaaaaaagccaagaagtggcctggatttcagacatacagcaccttagaaatatgtataattcatagcaaatcaccactatctatggttgccaagtaattgttgtgtacaaagaaatttagtggctttttatgacccagaaagtagaaggtataaaatgaaaatttaatatccattgcttcttttctagattttcattttttttaatttgccacattaaataattcacgagtcttttcttttcccccgtctcattcagtcttactcagggaaagccagttaaataagaagggaagtgtaaaactactaatttacagcttgaagggtttttttttttaagattgcttttctattttatctattaagcttgaaccagtttccatctggaaagattctaaaatataatagaaaataaattgaataatggtaattttaagcagtatatctatgaaatgtgttgtttgggattgatttcaatgtttctccccagcgtaaattttaaagttacatgcaatgattgatatagtttattatcagcaaaattatttctaatattattggcttacacaaactctagcaaaaattattttttcctcaatggaaaaagaaaagagaggaacagagttagaaagagaaaatgacttgaatcccaagtatcttcataccaaacatatcagggttccctgcatagtttgcagttgattgaggatttcacacgacttggcataaatttgattacatctctagactgtaacttttctgattgattatgcttcttttttatccatgtaatgtgttgccttttttaaaagaacaaatactacaataacgtgtgaagtggtcaatccctaagacatcaaagaaaggccacataaccctacccttctagtgctttgtgtgattgggtatcaaaggggttttcttcttctttttttgtttgtttgtttttctgttgcaaggccaatttatccattattggaaatgctaagcaagtg

SEQ ID NO: 14185 - DNA, 3553 bp, Homo sapiens
  source 1..3553: mol_type = unassigned DNA
gggctgatgcgcaggcaatttatcatcttgatctcccactgagtcagggagctctcctgtcaccagtattgatttcagaggatggactaaatttcctaggatttccattaagaattaagaaaaaagctctaagcacgcagggtagccagacagacatggatatgagatggcactgtgaaaacttgcagaccacagatgacatccttgtggcctcagcagagtgtcccagcgatgatgaggacattgacccctgtgagccgagctcagggacaaagcagaccatgtggaaaacttctagagaccaccgtatcttaccaaatgctagaagagagaggaaggattaaaaactacttttcagtggtcctttaagccaacccaacccgagcaggcggcagagagccgtatccaggctcagcagaagtgatccgggagtccagcagcaccacgggtatggtcgttgggatagtagccgctgccgccctgtgcatccttatcctcctctatgccatgtacaagtacagaaaccgggatgaaggctcataccatgtggacgagagtcgaaactacatcagtaactcagcacagtccaatggggctgttgtaaaggagaaacaacccagcagtgcgaaaagctccaacaaaaataagaaaaacaaggataaagagtattatgtctgatcccaagatcttaaatggacacttgtatagaaatagtcttcattttatctgagacataatataaacttatttactttcctttttatgaagcacatacaaaagaagacagggaatgcaatcaggaaggaaagactttttaaaaaataaaaacaagtatctcatgctcttgtttctcaaaaaagaaaaacaaaaaacaaaaaacaggggccaataaattccctaacatccacagtgttttcatttactctgcttgtctttatgttgctggaacatttctaaaagacagtgatgaccgcacgcattcataaagcaaaggagtactacagcatcaaggcacaacacaaaaaccaacacaaaacataacacaaaaaagaagctacctatgatcctggatttagccaaagtgctagcgctttcctgagaagtcagtccaattgccagagaagactgtccttttgagtgactcaacctgcaaacctttaagagtttgccgcctggtgcaactggagcagtggttggaacttgcatttgaaacaaagtgctggcttttttgaagacttgtgtaggaacacattcaaaaagcccctttctggttgtgagagaggaaaaaaaagtatggaggccttattttcaaaaatgtgaaatataaggcacgttttcacacaaaatttcaaaacaaaaacaagagggcatagatgcaatcattgggaaattttcatgcacgcttattatgttattacatatgtttatataaaatccatctctgtgtgctttctggactgtgataagtgacgttttatagcctgttgtatagaaaatgcaaaatatatctctgctcttcagccatttttggtaaattcaatgttataagtgttgctaagtatagggagttttatgacatcagagcaacaattatttcagttgggtttttctttttttttgccaccattataaattgccacaattacttttattttttaaagaaattacagtgtagtgtttattctaaggaagatatgtatgaatgtatatacaaagactcagctacttcttttcttatatgtacagccttcattctgttgcaattaagttttagtacttgtatgaaaggtgtgaattagaaagtcacatatatacatatgtatcttataatcttttctccctgaaatactcacattcccacatacattcactattttcacacacacacacacacacacacacacacacacacacacacacacacgaatccacagcaatccatcagatatgctggaagatccaaacgtgcatacagtagcaaatatttattgacaaattgaaaagcaggaaggaagagggttgtgccaaggtattgatgacaaatggggtgatttgcttcattgagatcttgctcccaggtaaccttaagaagattttagtccctaaagaaatgaacctttccttatcaaatagaatatcactgatatactgctgcatgaataagaaccattatgtgggcaggttatggaagcaaaattggttaatctacaccttaactctggctgctgcaattgaaaactttctttctaataaaataatatatatatctctgaatctgatgtgcatgatgaacatttctggaaagtaaacactttctctcgactaagaaagtatttttcagtaatttttgattctgtattactacccacttaaaaaatcattctctgttaattattgactatgttttaacttttctggttttacatatatatcattaaatatagttttagtttaacacattaagtagtggaaaagtatagattatacacttgttttgcatattattcaatgatgttcacagcaataaattactaatatgagaaggtagtgcaaaaaatgcattattacattgcaagttgatgtttcaggaaaaattggttgcattacttgaataccttctaaaagaacgataaaaaattttgtagaagagaagaatatctttccaattagctttaatcagcaaaggcaaaaaatgcaaaacatcttttgtgatactttagttgatgaaaaaaaagccaagaagtggcctggatttcagacatacagcaccttagaaatatgtataattcatagcaaatcaccactatctatggttgccaagtaattgttgtgtacaaagaaatttagtggctttttatgacccagaaagtagaaggtataaaatgaaaatttaatatccattgcttcttttctagattttcattttttttaatttgccacattaaataattcacgagtcttttcttttcccccgtctcattcagtcttactcagggaaagccagttaaataagaagggaagtgtaaaactactaatttacagcttgaagggtttttttttttaagattgcttttctattttatctattaagcttgaaccagtttccatctggaaagattctaaaatataatagaaaataaattgaataatggtaattttaagcagtatatctatgaaatgtgttgtttgggattgatttcaatgtttctccccagcgtaaattttaaagttacatgcaatgattgatatagtttattatcagcaaaattatttctaatattattggcttacacaaactctagcaaaaattattttttcctcaatggaaaaagaaaagagaggaacagagttagaaagagaaaatgacttgaatcccaagtatcttcataccaaacatatcagggttccctgcatagtttgcagttgattgaggatttcacacgacttggcataaatttgattacatctctagactgtaacttttctgattgattatgcttcttttttatccatgtaatgtgttgccttttttaaaagaacaaatactacaata

SEQ ID NO: 14186 - DNA, 3321 bp, Homo sapiens
  source 1..3321: mol_type = unassigned DNA
gagctctcctgtcaccagtattgatttcagaggatggactaaatttcctaggatttccattaagaattaagaaaaaagctctaagcacgcagggtagccagacagacatggatatgagatggcactgtgaaaacttgcagctgatatttgaatctcctgaaggcctccttccctcatcactctagcatagagaatggagctaaggacaatattgtggagtaggtaggcaatttccagtatacagaaaaattggagagagtcacagacaattatacattcatggatatatctagggtcttttggcacattaaagacaatatgagttcaaactgagtaacaactattaaaaagcagaaatatatgagagatagtttatatttttgcatcataaactatgtgtattatcactacccgtttccatttgctcctcaaattttcacctttattttaattcatttgattaatcataagtaactagctcagatttcccaaaaatcaatgataatttttttcagtgttgtgctatatattttttgatctgtgggttaagccacaattcatcttcttgggaataaaaaacattcaaatacttgttttactattttcccatgactataatgtatagccttttgttataaagtctccattactttattcattactttgaaagacaaaaactatttatcatggtgggaatgacttgaatattattttggggagccaaaataagtcagttcccgaaagaaattagttctgcagtctttgtgctctcacctttgttccccctgcttttttattaaaatgtaatgagtcttgtagggttccaccatcttggctctaagcctatttcagatttttgatggaaaacatgattacataagttcacagcctaaatttattagtaaagtcatggatacagtgaaggcttaacagtatggggaaatgccattacctggctgacttaacatcgttcaagttgaaaactctacaggagtatatcagtctacggccataccaccctgaatgcacccattctcatctgatctcagaagctaagcagagttgatcctgaccacagatgacatccttgtggcctcagcagagtgtcccagcgatgatgaggacattgacccctgtgagccgagctcaggtgggttagccaacccaacccgagcaggcggcagagagccgtatccaggctcagcagaagtgatccgggagtccagcagcaccacgggtatggtcgttgggatagtagccgctgccgccctgtgcatccttatcctcctctatgccatgtacaagtacagaaaccgggatgaaggctcataccatgtggacgagagtcgaaactacatcagtaactcagcacagtccaatggggctgttgtaaaggagaaacaacccagcagtgcgaaaagctccaacaaaaataagaaaaacaaggataaagagtattatgtctgatcccaagatcttaaatggacacttgtatagaaatagtcttcattttatctgagacataatataaacttatttactttcctttttatgaagcacatacaaaagaagacagggaatgcaatcaggaaggaaagactttttaaaaaataaaaacaagtatctcatgctcttgtttctcaaaaaagaaaaacaaaaaacaaaaaacaggggccaataaattccctaacatccacagtgttttcatttactctgcttgtctttatgttgctggaacatttctaaaagacagtgatgaccgcacgcattcataaagcaaaggagtactacagcatcaaggcacaacacaaaaaccaacacaaaacataacacaaaaaagaagctacctatgatcctggatttagccaaagtgctagcgctttcctgagaagtcagtccaattgccagagaagactgtccttttgagtgactcaacctgcaaacctttaagagtttgccgcctggtgcaactggagcagtggttggaacttgcatttgaaacaaagtgctggcttttttgaagacttgtgtaggaacacattcaaaaagcccctttctggttgtgagagaggaaaaaaaagtatggaggccttattttcaaaaatgtgaaatataaggcacgttttcacacaaaatttcaaaacaaaaacaagagggcatagatgcaatcattgggaaattttcatgcacgcttattatgttattacatatgtttatataaaatccatctctgtgtgctttctggactgtgataagtgacgttttatagcctgttgtatagaaaatgcaaaatatatctctgctcttcagccatttttggtaaattcaatgttataagtgttgctaagtatagggagttttatgacatcagagcaacaattatttcagttgggtttttctttttttttgccaccattataaattgccacaattacttttattttttaaagaaattacagtgtagtgtttattctaaggaagatatgtatgaatgtatatacaaagactcagctacttcttttcttatatgtacagccttcattctgttgcaattaagttttagtacttgtatgaaaggtgtgaattagaaagtcacatatatacatatgtatcttataatcttttctccctgaaatactcacattcccacatacattcactattttcacacacacacacacacacacacacacacacacacacacacacacacgaatccacagcaatccatcagatatgctggaagatccaaacgtgcatacagtagcaaatatttattgacaaattgaaaagcaggaaggaagagggttgtgccaaggtattgatgacaaatggggtgatttgcttcattgagatcttgctcccaggtaaccttaagaagattttagtccctaaagaaatgaacctttccttatcaaatagaatatcactgatatactgctgcatgaataagaaccattatgtgggcaggttatggaagcaaaattggttaatctacaccttaactctggctgctgcaattgaaaactttctttctaataaaataatatatatatctctgaatctgatgtgcatgatgaacatttctggaaagtaaacactttctctcgactaagaaagtatttttcagtaatttttgattctgtattactacccacttaaaaaatcattctctgttaattattgactatgttttaacttttctggttttacatatatatcattaaatatagttttagtttaacacattaagtagtggaaaagtatagattatacacttgttttgcatattattcaatgatgttcacagcaataaattac

SEQ ID NO: 14187 - DNA, 2215 bp, Homo sapiens
  source 1..2215: mol_type = unassigned DNA
ctgtgtcttttctcgcccatctgtgtgcagggcactgataggccgggctgatgcgcaggcaatttatcatcttgatctcccactgagtcagggagctctcctgtcaccagtattgatttcagaggatggactaaatttcctaggatttccattaagaattaagaaaaaagctctaagcacgcagggtagccagacagacatggatatgagatggcactgtgaaaacttgcagaccacagatgacatccttgtggcctcagcagagtgtcccagcgatgatgaggacattgacccctgtgagccgagctcagccaacccaacccgagcaggcggcagagagccgtatccaggctcagcagaagtgatccgggagtccagcagcaccacgggtatggtcgttgggatagtagccgctgccgccctgtgcatccttatcctcctctatgccatgtacaagtacagaaaccgggatgaaggctcataccatgtggacgagagtcgaaactacatcagtaactcagcacagtccaatggggctgttgtaaaggagaaacaacccagcagtgcgaaaagctccaacaaaaataagaaaaacaaggataaagagtattatgtctgatcccaagatcttaaatggacacttgtatagaaatagtcttcattttatctgagacataatataaacttatttactttcctttttatgaagcacatacaaaagaagacagggaatgcaatcaggaaggaaagactttttaaaaaataaaaacaagtatctcatgctcttgtttctcaaaaaagaaaaacaaaaaacaaaaaacaggggccaataaattccctaacatccacagtgttttcatttactctgcttgtctttatgttgctggaacatttctaaaagacagtgatgaccgcacgcattcataaagcaaaggagtactacagcatcaaggcacaacacaaaaaccaacacaaaacataacacaaaaaagaagctacctatgatcctggatttagccaaagtgctagcgctttcctgagaagtcagtccaattgccagagaagactgtccttttgagtgactcaacctgcaaacctttaagagtttgccgcctggtgcaactggagcagtggttggaacttgcatttgaaacaaagtgctggcttttttgaagacttgtgtaggaacacattcaaaaagcccctttctggttgtgagagaggaaaaaaaagtatggaggccttattttcaaaaatgtgaaatataaggcacgttttcacacaaaatttcaaaacaaaaacaagagggcatagatgcaatcattgggaaattttcatgcacgcttattatgttattacatatgtttatataaaatccatctctgtgtgctttctggactgtgataagtgacgttttatagcctgttgtatagaaaatgcaaaatatatctctgctcttcagccatttttggtaaattcaatgttataagtgttgctaagtatagggagttttatgacatcagagcaacaattatttcagttgggtttttctttttttttgccaccattataaattgccacaattacttttattttttaaagaaattacagtgtagtgtttattctaaggaagatatgtatgaatgtatatacaaagactcagctacttcttttcttatatgtacagccttcattctgttgcaattaagttttagtacttgtatgaaaggtgtgaattagaaagtcacatatatacatatgtatcttataatcttttctccctgaaatactcacattcccacatacattcactattttcacacacacacacacacacacacacacacacacacacacacacacacgaatccacagcaatccatcagatatgctggaagatccaaacgtgcatacagtagcaaatatttattgacaaattgaaaagcaggaaggaagagggttgtgccaaggtattgatgacaaatggggtgatttgcttcattgagatcttgctcccaggtaaccttaagaagattttagtccctaaagaaatgaacctttccttatcaaatagaatatcactgatatactgctgcatgaataagaaccattatgtgggcaggttatggaagcaaaattggttaatctacaccttaactctggctgctgcaattgaaaactttctttctaataaaataatatatatatctctgaa

SEQ ID NO: 14188 - DNA, 7578 bp, Homo sapiens
  source 1..7578: mol_type = unassigned DNA
gcacctcgctccgcagcatccagacctggaggggctgcgaccacgggccgagcccacccattccccagccaaaggacgggcccgccgctctccatggtactgcggagagctcagctccgcccttctctttcagaaggacagcacccggcgtcacgtaacccagccttctcaggctccaccaccgccttttccttcccagctctttccctctcctccccctcctcctccttctcctcctcctcctcctcctgctcccctccgttgcctgttctcccctcccgcactcctggagatagacgctcaagcctgacgcctctgaaaaggcagcagcagtcgccttatccatagacctcaggaaattcgctttgaccgatgcatgcttcaggctctggctcgagctgaggggaataaccgggcagatgtctgagtccttaaaaaagacaagataaaaccaaaatgcatcaccaacacacaaccaattgatgtgctggcatcttagcttggccctgcagaggcagagagaaaagaagaggagctgttgcgatttccacatctaacagcttctggctatttcgcaactgctgggtttgagtcctactgttgccgtggctgaaaagagaagtaaaatccaacttgtgagaccacgcacaaggaattaggctttggctgcagcggtgctgaagcccatgctatgacagaagaagcaggcctttgaagctatcctcgggttaagaaatggtgccctaaagaggcaagcatccctttctccgttctgctgtaagacaccacatctgaaggagacagacttgaggcattcacaagcatccaaggatactggctcactgctggcttcctgtactttcttgagaaaagtgttttctttttactgactctcactgcttccttttggcctggtaccactggtggaacctggcagataatgggatttgaggagttaagtatctgttgacactgcagatactcttaaattagttaatcagactcaaatgggtcagtgctttcccttgatcttttgttgaagccttttccagaacgttgtctccaaagtgcatcctccctttggtctggaagttctgtggctaccctgtaccactggggtcaacgttttccagttggaagaggactacagggagagagggcggggttattggaagaagaagaagaaaaaaagaactagataaaggagggcacatccctctcactcccgcctttccccttacctttctgtctctcgggacccttatttcttcgtcacggtgtccaggaccattttgaccctgtcggccccggcacccccccgccgcaccccagccccgagcatggggacggcgctgctccagcgcgggggctgttttcttctgtgcctctcgctgctgctcctgggctgctgggcggagctgggcagcgggctggagtttccgggcgccgagggccaatggacgcgcttccccaagtggaacgcctgctgcgagagcgagatgagcttccagctcaagactcgcagcgcccgcggcctcgtgctctacttcgacgacgagggcttctgcgacttcctggagctgattctgacgcgcggcggccgcctgcagctcagcttctccatcttctgcgctgagcctgcgacgctcctggccgacacgccggttaacgacggcgcctggcacagcgtgcgcatccgccgccagttccgcaacaccacgctcttcatcgaccaggtggaggccaagtgggtggaggtcaagtccaagcgcagggacatgacggtgttcagcggccttttcgtcggggggctgcccccggaactgcgcgccgcggcgctcaagctcaccctggcctcggtgagggagcgggagcccttcaaggggtggattcgtgacgtgagggtcaactcctcgcaggtcctgcccgtggacagcggcgaggtgaagctggacgatgagccgcccaacagcggcgggggaagcccgtgcgaggcgggcgaggagggcgagggcggggtgtgcctcaacggaggtgtgtgctccgtggtggacgaccaggccgtgtgcgactgctcgcgaaccggcttccgcggcaaggactgcagccaagaaataaaattcggtcttcagtgtgttttgccggtgctgttacatgacaatgaccaaggaaaatactgttgtataaatacagcaaagcctctaacagaaaaagacaacaatgtggaaggtctggcgcacctgatgatgggcgaccaaggtaaaagtaaaggaaaagaagaatatattgccacgttcaaaggatctgaatacttctgctacgacttgtctcaaaaccccattcaaagcagcagtgatgaaataactctgtcatttaaaacccttcagaggaatggactgatgcttcacactgggaaatcggctgattatgtcaatcttgccctgaaaaatggagctgtctctctggtcattaatttgggatcaggggcctttgaagcactagtggagcctgtgaatggaaagtttaatgataatgcctggcatgatgtgaaagtcaccaggaatctgcgtcagcactcaggcattggacacgctatggtaaacaaactacattgttcggtgacaatatcagtggatgggattcttaccacaacgggctacacgcaagaagattataccatgctggggtctgatgactttttctatgttggaggcagtcccagcacagccgaccttccagggtcaccagtcagtaacaactttatgggctgtctcaaagaggttgtatataaaaataatgatgtgaggctggaattatctcgacttgccaagcaaggagatcctaagatgaagatccatggagtggtggcatttaaatgtgagaatgttgcaactttagacccaatcacctttgaaaccccagagtctttcatctctttgcctaaatggaatgcaaagaaaactggctccatatcatttgatttccgtacaacagagccaaatggcctcatcttatttagccatggcaagccaagacatcagaaagatgccaagcacccacagatgataaaggtggacttctttgctattgagatgctagatggccacctctacctcctcctggacatggggtcaggtactataaaaataaaagccctgttgaagaaagtgaatgatggagaatggtatcatgtggacttccagagagacggacggtcaggtaccatttctgtcaacacgttgcgtactccctacactgctcctggtgagagtgagattctggacctggatgatgagttgtacctgggggggctgccagaaaataaagctggccttgtcttccccaccgaggtgtggactgctctgctcaactatggctacgtgggctgcatcagggatttgttcatcgatggccaaagcaaagatatccggcaaatggctgaagttcaaagtactgctggagtgaagccttcctgctcaaaggaaacagcaaaaccgtgccttagcaacccttgcaaaaacaatggcatgtgcagggatgggtggaacagatatgtctgtgattgttccggaacaggctatcttggcaggtcctgtgagagagaggcaacggttttgagctatgatgggagcatgtttatgaaaattcagctccccgtagtcatgcatacggaggctgaggatgtttccttacggttccgatcccagcgtgcatatggcattctgatggcaaccacttctagagactctgctgacaccctccgcctggagctagacgcaggacgtgtgaaactgacggtcaatctagattgtatcaggattaactgtaattccagcaaaggtcccgagactctttttgctggctataacctcaatgataacgagtggcacacagtgcgtgtagttcggcgtggaaaaagtttaaagttaacagtggatgaccaacaggccatgacaggtcaaatggcaggtgatcatactaggctggagttccataacatagagactggcatcatcacagaacgacggtatctttcttctgtcccctccaacttcattggacacctgcagagcttgacatttaatggaatggcatacattgacctgtgtaaaaatggcgacatagattactgtgagcttaatgccagatttggcttcaggaacatcatagcagatcctgtcaccttcaagaccaaatcgagctatgttgccttagctaccttgcaagcctacacttctatgcatctttttttccagttcaagacaacatccctagatggattaattctatataacagtggggatggaaatgactttattgtggttgaattagttaaagggtacttacattacgtgtttgatttgggaaatggtgctaacctcatcaaaggaagctcaaataaacctctcaatgacaatcagtggcacaacgtgatgatatcaagggacaccagcaacctccacactgtaaagattgacacaaaaatcacaacgcaaatcaccgccggagccaggaacttagacctcaagagtgacttatatataggaggagtagctaaagaaacatacaaatccttaccaaaacttgtacatgccaaagaaggctttcaaggctgcctggcatcagttgatttaaatggacggcttccggacctcatctccgatgctcttttctgcaacggacagatcgagagaggatgtgaagggcccagcacaacctgccaagaggactcatgttccaatcaaggtgtgtgcttgcaacaatgggatggcttcagctgtgactgtagtatgacttccttcagtggaccactctgcaatgaccctgggacgacatatatctttagcaaaggtggtggacaaatcacgtataagtggcctcctaatgaccgacccagtacacgagcagacagactggccataggttttagcactgttcagaaagaagccgtattggtgcgagtggacagttcttcaggcttgggtgactacctagaactgcatatacaccagggaaaaattggagttaagtttaatgttgggacagatgacatcgccattgaagaatccaatgcaatcattaatgatgggaaataccatgtagttcgtttcacgaggagtggtggcaatgccacgttgcaggtggacagctggccagtgatcgagcgctaccctgcaggaaacaatgataacgagcgcctggcgattgctagacagcgaattccatatcgacttggtcgagtagttgatgaatggctactcgacaaagggcgtcagctcacaatcttcaatagccaagcaaccataataattggcgggaaagagcagggccagcccttccagggccagctctctgggctgtactacaatggcttgaaagttctgaatatggcagccgaaaacgatgccaacatcgccatagtgggaaatgtgagactggttggtgaagtgccttcctctatgacaactgagtcaacagccactgccatgcaatcagagatgtccacatcaattatggagactaccacgaccctggctactagcacagccagaagaggaaagcccccgacaaaagaacccattagccagaccacagatgacatccttgtggcctcagcagagtgtcccagcgatgatgaggacattgacccctgtgagccgagctcaggtgggttagccaacccaacccgagcaggcggcagagagccgtatccaggctcagcagaagtgatccgggagtccagcagcaccacgggtatggtcgttgggatagtagccgctgccgccctgtgcatccttatcctcctctatgccatgtacaagtacagaaaccgggatgaaggctcataccatgtggacgagagtcgaaactacatcagtaactcagcacagtccaatggggctgttgtaaaggagaaacaacccagcagtgcgaaaagctccaacaaaaataagaaaaacaaggataaagagtattatgtctgatcccaagatcttaaatggacacttgtatagaaatagtcttcattttatctgagacataatataaacttatttactttcctttttatgaagcacatacaaaagaagacagggaatgcaatcaggaaggaaagactttttaaaaaataaaaacaagtatctcatgctcttgtttctcaaaaaagaaaaacaaaaaacaaaaaacaggggccaataaattccctaacatccacagtgttttcatttactctgcttgtctttatgttgctggaacatttctaaaagacagtgatgaccgcacgcattcataaagcaaaggagtactacagcatcaaggcacaacacaaaaaccaacacaaaacataacacaaaaaagaagctacctatgatcctggatttagccaaagtgctagcgctttcctgagaagtcagtccaattgccagagaagactgtccttttgagtgactcaacctgcaaacctttaagagtttgccgcctggtgcaactggagcagtggttggaacttgcatttgaaacaaagtgctggcttttttgaagacttgtgtaggaacacattcaaaaagcccctttctggttgtgagagaggaaaaaaaagtatggaggccttattttcaaaaatgtgaaatataaggcacgttttcacacaaaatttcaaaacaaaaacaagagggcatagatgcaatcattgggaaattttcatgcacgcttattatgttattacatatgtttatataaaatccatctctgtgtgctttctggactgtgataagtgacgttttatagcctgttgtatagaaaatgcaaaatatatctctgctcttcagccatttttggtaaattcaatgttataagtgttgctaagtatagggagttttatgacatcagagcaacaattatttcagttgggtttttctttttttttgccaccattataaattgccacaattacttttattttttaaagaaattacagtgtagtgtttattctaaggaagatatgtatgaatgtatatacaaagactcagctacttcttttcttatatgtacagccttcattctgttgcaattaagttttagtacttgtatgaaaggtgtgaattagaaagtcacatatatacatatgtatcttataatcttttctccctgaaatactcacattcccacatacattcactattttcacacacacacacacacacacacacacacacacacacacacacacacgaatccacagcaatccatcagatatgctggaagatccaaacgtgcatacagtagcaaatatttattgacaaattgaaaagcaggaaggaagagggttgtgccaaggtattgatgacaaatggggtgatttgcttcattgagatcttgctcccaggtaaccttaagaagattttagtccctaaagaaatgaacctttccttatcaaatagaatatcactgatatactgctgcatgaataagaaccattatgtgggcaggttatggaagcaaaattggttaatctacaccttaactctggctgctgcaattgaaaactttctttctaataaaataatatatatatctctg

SEQ ID NO: 14189 - DNA, 2249 bp, Homo sapiens
  source 1..2249: mol_type = unassigned DNA
actgataggccgggctgatgcgcaggcaatttatcatcttgatctcccactgagtcagggagctctcctgtcaccagtattgatttcagaggatggactaaatttcctaggatttccattaagaattaagaaaaaagctctaagcacgcagggtagccagacagacatggatatgagatggcactgtgaaaacttgcagacattgtactggagaaagttctgtatctactggtgaagacttaatggcttaatcatctgatacctgattttcttgtttgtaagaccacagatgacatccttgtggcctcagcagagtgtcccagcgatgatgaggacattgacccctgtgagccgagctcagccaacccaacccgagcaggcggcagagagccgtatccaggctcagcagaagtgatccgggagtccagcagcaccacgggtatggtcgttgggatagtagccgctgccgccctgtgcatccttatcctcctctatgccatgtacaagtacagaaaccgggatgaaggctcataccatgtggacgagagtcgaaactacatcagtaactcagcacagtccaatggggctgttgtaaaggagaaacaacccagcagtgcgaaaagctccaacaaaaataagaaaaacaaggataaagagtattatgtctgatcccaagatcttaaatggacacttgtatagaaatagtcttcattttatctgagacataatataaacttatttactttcctttttatgaagcacatacaaaagaagacagggaatgcaatcaggaaggaaagactttttaaaaaataaaaacaagtatctcatgctcttgtttctcaaaaaagaaaaacaaaaaacaaaaaacaggggccaataaattccctaacatccacagtgttttcatttactctgcttgtctttatgttgctggaacatttctaaaagacagtgatgaccgcacgcattcataaagcaaaggagtactacagcatcaaggcacaacacaaaaaccaacacaaaacataacacaaaaaagaagctacctatgatcctggatttagccaaagtgctagcgctttcctgagaagtcagtccaattgccagagaagactgtccttttgagtgactcaacctgcaaacctttaagagtttgccgcctggtgcaactggagcagtggttggaacttgcatttgaaacaaagtgctggcttttttgaagacttgtgtaggaacacattcaaaaagcccctttctggttgtgagagaggaaaaaaaagtatggaggccttattttcaaaaatgtgaaatataaggcacgttttcacacaaaatttcaaaacaaaaacaagagggcatagatgcaatcattgggaaattttcatgcacgcttattatgttattacatatgtttatataaaatccatctctgtgtgctttctggactgtgataagtgacgttttatagcctgttgtatagaaaatgcaaaatatatctctgctcttcagccatttttggtaaattcaatgttataagtgttgctaagtatagggagttttatgacatcagagcaacaattatttcagttgggtttttctttttttttgccaccattataaattgccacaattacttttattttttaaagaaattacagtgtagtgtttattctaaggaagatatgtatgaatgtatatacaaagactcagctacttcttttcttatatgtacagccttcattctgttgcaattaagttttagtacttgtatgaaaggtgtgaattagaaagtcacatatatacatatgtatcttataatcttttctccctgaaatactcacattcccacatacattcactattttcacacacacacacacacacacacacacacacacacacacacacacacgaatccacagcaatccatcagatatgctggaagatccaaacgtgcatacagtagcaaatatttattgacaaattgaaaagcaggaaggaagagggttgtgccaaggtattgatgacaaatggggtgatttgcttcattgagatcttgctcccaggtaaccttaagaagattttagtccctaaagaaatgaacctttccttatcaaatagaatatcactgatatactgctgcatgaataagaaccattatgtgggcaggttatggaagcaaaattggttaatctacaccttaactctggctgctgcaattgaaaactttctttctaataaaataa

SEQ ID NO: 14190 - DNA, 3315 bp, Homo sapiens
  source 1..3315: mol_type = unassigned DNA
ttttttctttttctttttctttttctgtttctctcccttactccttcgtctgcatcttcttctcagctgcctttccgccgttcgattcccacttccttcagaagggcgcactcttccctctgaacccctcgccgggcgtaagtgtcaggaggcggcggacgcggagattgcctcgggagcaggcgatgcgcgccgctgctccgcgcgctgcccgggggaggctggcgctagcgggcgagccggccggggctgaatggagggaaggggcgcctggattccatggggtctgcttctgtcttgaaaggaggttgggccggcgaagtggcctccctagtccccgcacacaaagctaaatggatttacctagtggattcgcggtggatgtctgtcatgtagaagtgaggaccttccaggaggagctttaaacaatttctcggccccccacccgccggcacgcactctcgcccgaaactctttgggagtatctctcgagaacctggagccctggaaatctgggagcagccacccgctccgcgcttgctgttcccggggctgcctttccggacaagcccctctccagctgcattcgcctcggctatgtttcggattgtttggggtgctaggcacggcggactccaggaccccgagaagactgtccgaaggagggagaggatgggtgccctggcgcggtgaggcggccggcccctcagcccactccgcgccgcccgctcccctgcgccctctcctctccccgcgccccaaactttgcctcccgcggcggctgcccctcggcgggcgccccgccatgtaccagaggatgctccggtgcggcgccgagctgggctcgcccgggggcggcggcggcggcggcggcggcggcggcgcaggggggcgcctggccctgctttggatagtcccgctcaccctcagcggcctcctaggagtggcgtggggggcatccagtttgggagcgcaccacatccaccatttccatggcagcagcaagcatcattcagtgcctattgcaatctacaggtcaccggcatccttgcgaggcggacacgctgggacgacatatatctttagcaaaggtggtggacaaatcacgtataagtggcctcctaatgaccgacccagtacacgagcagacagactggccataggttttagcactgttcagaaagaagccgtattggtgcgagtggacagttcttcaggcttgggtgactacctagaactgcatatacaccagggaaaaattggagttaagtttaatgttgggacagatgacatcgccattgaagaatccaatgcaatcattaatgatgggaaataccatgtagttcgtttcacgaggagtggtggcaatgccacgttgcaggtggacagctggccagtgatcgagcgctaccctgcagggcgtcagctcacaatcttcaatagccaagcaaccataataattggcgggaaagagcagggccagcccttccagggccagctctctgggctgtactacaatggcttgaaagttctgaatatggcagccgaaaacgatgccaacatcgccatagtgggaaatgtgagactggttggtgaagtgccttcctctatgacaactgagtcaacagccactgccatgcaatcagagatgtccacatcaattatggagactaccacgaccctggctactagcacagccagaagaggaaagcccccgacaaaagaacccattagccagaccacagatgacatccttgtggcctcagcagagtgtcccagcgatgatgaggacattgacccctgtgagccgagctcaggtgggttagccaacccaacccgagcaggcggcagagagccgtatccaggctcagcagaagtgatccgggagtccagcagcaccacgggtatggtcgttgggatagtagccgctgccgccctgtgcatccttatcctcctctatgccatgtacaagtacagaaaccgggatgaaggctcataccatgtggacgagagtcgaaactacatcagtaactcagcacagtccaatggggctgttgtaaaggagaaacaacccagcagtgcgaaaagctccaacaaaaataagaaaaacaaggataaagagtattatgtctgatcccaagatcttaaatggacacttgtatagaaatagtcttcattttatctgagacataatataaacttatttactttcctttttatgaagcacatacaaaagaagacagggaatgcaatcaggaaggaaagactttttaaaaaataaaaacaagtatctcatgctcttgtttctcaaaaaagaaaaacaaaaaacaaaaaacaggggccaataaattccctaacatccacagtgttttcatttactctgcttgtctttatgttgctggaacatttctaaaagacagtgatgaccgcacgcattcataaagcaaaggagtactacagcatcaaggcacaacacaaaaaccaacacaaaacataacacaaaaaagaagctacctatgatcctggatttagccaaagtgctagcgctttcctgagaagtcagtccaattgccagagaagactgtccttttgagtgactcaacctgcaaacctttaagagtttgccgcctggtgcaactggagcagtggttggaacttgcatttgaaacaaagtgctggcttttttgaagacttgtgtaggaacacattcaaaaagcccctttctggttgtgagagaggaaaaaaaagtatggaggccttattttcaaaaatgtgaaatataaggcacgttttcacacaaaatttcaaaacaaaaacaagagggcatagatgcaatcattgggaaattttcatgcacgcttattatgttattacatatgtttatataaaatccatctctgtgtgctttctggactgtgataagtgacgttttatagcctgttgtatagaaaatgcaaaatatatctctgctcttcagccatttttggtaaattcaatgttataagtgttgctaagtatagggagttttatgacatcagagcaacaattatttcagttgggtttttctttttttttgccaccattataaattgccacaattacttttattttttaaagaaattacagtgtagtgtttattctaaggaagatatgtatgaatgtatatacaaagactcagctacttcttttcttatatgtacagccttcattctgttgcaattaagttttagtacttgtatgaaaggtgtgaattagaaagtcacatatatacatatgtatcttataatcttttctccctgaaatactcacattccc

SEQ ID NO: 14191 - DNA, 1338 bp, Homo sapiens
  source 1..1338: mol_type = unassigned DNA
ttttctgtgtcttttctcgcccatctgtgtgcagggcactgataggccgggctgatgcgcaggcaatttatcatcttgatctcccactgagtcagggagctctcctgtcaccagtattgatttcagaggatggactaaatttcctaggatttccattaagaattaagaaaaaagctctaagcacgcagggtagccagacagacatggatatgagatggcactgtgaaaacttgcagaccacagatgacatccttgtggcctcagcagagtgtcccagcgatgatgaggacattgacccctgtgagccgagctcaggtgggttagccaacccaacccgagcaggcggcagagagccgtatccaggctcagcagaagtgatccgggagtccagcagcaccacgggtatggtcgttgggatagtagccgctgccgccctgtgcatccttatcctcctctatgccatgtacaagtacagaaaccgggatgaaggctcataccatgtggacgagagtcgaaactacatcagtaactcagcacagtccaatggggctgttgtaaaggagaaacaacccagcagtgcgaaaagctccaacaaaaataagaaaaacaaggataaagagtattatgtctgatcccaagatcttaaatggacacttgtatagaaatagtcttcattttatctgagacataatataaacttatttactttcctttttatgaagcacatacaaaagaagacagggaatgcaatcaggaaggaaagactttttaaaaaataaaaacaagtatctcatgctcttgtttctcaaaaaagaaaaacaaaaaacaaaaaacaggggccaataaattccctaacatccacagtgttttcatttactctgcttgtctttatgttgctggaacatttctaaaagacagtgatgaccgcacgcattcataaagcaaaggagtactacagcatcaaggcacaacacaaaaaccaacacaaaacataacacaaaaaagaagctacctatgatcctggatttagccaaagtgctagcgctttcctgagaagtcagtccaattgccagagaagactgtccttttgagtgactcaacctgcaaacctttaagagtttgccgcctggtgcaactggagcagtggttggaacttgcatttgaaacaaagtgctggcttttttgaagacttgtgtaggaacacattcaaaaagcccctttctggttgtgagagaggaaaaaaaagtatggaggccttattttcaaaaatgtgaaatataaggcacgttttcacacaaaatttcaaaacaaaaacaagagggcatagatgcaatcatt

SEQ ID NO: 14192 - DNA, 2873 bp, Homo sapiens
  source 1..2873: mol_type = unassigned DNA
tttttcttttctttttttctttttctttttctttttctgtttctctcccttactccttcgtctgcatcttcttctcagctgcctttccgccgttcgattcccacttccttcagaagggcgcactcttccctctgaacccctcgccgggcgtaagtgtcaggaggcggcggacgcggagattgcctcgggagcaggcgatgcgcgccgctgctccgcgcgctgcccgggggaggctggcgctagcgggcgagccggccggggctgaatggagggaaggggcgcctggattccatggggtctgcttctgtcttgaaaggaggttgggccggcgaagtggcctccctagtccccgcacacaaagctaaatggatttacctagtggattcgcggtggatgtctgtcatgtagaagtgaggaccttccaggaggagctttaaacaatttctcggccccccacccgccggcacgcactctcgcccgaaactctttgggagtatctctcgagaacctggagccctggaaatctgggagcagccacccgctccgcgcttgctgttcccggggctgcctttccggacaagcccctctccagctgcattcgcctcggctatgtttcggattgtttggggtgctaggcacggcggactccaggaccccgagaagactgtccgaaggagggagaggatgggtgccctggcgcggtgaggcggccggcccctcagcccactccgcgccgcccgctcccctgcgccctctcctctccccgcgccccaaactttgcctcccgcggcggctgcccctcggcgggcgccccgccatgtaccagaggatgctccggtgcggcgccgagctgggctcgcccgggggcggcggcggcggcggcggcggcggcggcgcaggggggcgcctggccctgctttggatagtcccgctcaccctcagcggcctcctaggagtggcgtggggggcatccagtttgggagcgcaccacatccaccatttccatggcagcagcaagcatcattcagtgcctattgcaatctacaggtcaccggcatccttgcgaggcggacacgctgggacgacatatatctttagcaaaggtggtggacaaatcacgtataagtggcctcctaatgaccgacccagtacacgagcagacagactggccataggttttagcactgttcagaaagaagccgtattggtgcgagtggacagttcttcaggcttgggtgactacctagaactgcatatacaccagggaaaaattggagttaagtttaatgttgggacagatgacatcgccattgaagaatccaatgcaatcattaatgatgggaaataccatgtagttcgtttcacgaggagtggtggcaatgccacgttgcaggtggacagctggccagtgatcgagcgctaccctgcaggaaacaatgataacgagcgcctggcgattgctagacagcgaattccatatcgacttggtcgagtagttgatgaatggctactcgacaaagggcgtcagctcacaatcttcaatagccaagcaaccataataattggcgggaaagagcagggccagcccttccagggccagctctctgggctgtactacaatggcttgaaagttctgaatatggcagccgaaaacgatgccaacatcgccatagtgggaaatgtgagactggttggtgaagtgccttcctctatgacaactgagtcaacagccactgccatgcaatcagagatgtccacatcaattatggagactaccacgaccctggctactagcacagccagaagaggaaagcccccgacaaaagaacccattagccagaccacagatgacatccttgtggcctcagcagagtgtcccagcgatgatgaggacattgacccctgtgagccgagctcaggtgggttagccaacccaacccgagcaggcggcagagagccgtatccaggctcagcagaagtgatccgggagtccagcagcaccacgggtatggtcgttgggatagtagccgctgccgccctgtgcatccttatcctcctctatgccatgtacaagtacagaaaccgggatgaaggctcataccatgtggacgagagtcgaaactacatcagtaactcagcacagtccaatggggctgttgtaaaggagaaacaacccagcagtgcgaaaagctccaacaaaaataagaaaaacaaggataaagagtattatgtctgatcccaagatcttaaatggacacttgtatagaaatagtcttcattttatctgagacataatataaacttatttactttcctttttatgaagcacatacaaaagaagacagggaatgcaatcaggaaggaaagactttttaaaaaataaaaacaagtatctcatgctcttgtttctcaaaaaagaaaaacaaaaaacaaaaaacaggggccaataaattccctaacatccacagtgttttcatttactctgcttgtctttatgttgctggaacatttctaaaagacagtgatgaccgcacgcattcataaagcaaaggagtactacagcatcaaggcacaacacaaaaaccaacacaaaacataacacaaaaaagaagctacctatgatcctggatttagccaaagtgctagcgctttcctgagaagtcagtccaattgccagagaagactgtccttttgagtgactcaacctgcaaacctttaagagtttgccgcctggtgcaactggagcagtggttggaacttgcatttgaaacaaagtgctggcttttttgaagacttgtgtaggaacacattcaaaaagcccctttctggttgtgagagaggaaaaaaaagtatggaggccttattttcaaaaa

SEQ ID NO: 14193 - DNA, 1679 bp, Homo sapiens
  source 1..1679: mol_type = unassigned DNA
accctcagcggcctcctaggagtggcgtggggggcatccagtttgggagcgcaccacatccaccatttccatggcagcagcaagcatcattcagtgcctattgcaatctacaggtcaccggcatccttgcgaggcggacacgctgggacgacatatatctttagcaaaggtggtggacaaatcacgtataagtggcctcctaatgaccgacccagtacacgagcagacagactggccataggttttagcactgttcagaaagaagccgtattggtgcgagtggacagttcttcaggcttgggtgactacctagaactgcatatagcctttgagtctttcactgcatccagatcttctgcatccagatgctagacaaggcaggaacaagagcaaagacaaagtacactggctctcaatgcatctgaggcttcagcaccagggaaaaattggagttaagtttaatgttgggacagatgacatcgccattgaagaatccaatgcaatcattaatgatgggaaataccatgtagttcgtttcacgaggagtggtggcaatgccacgttgcaggtggacagctggccagtgatcgagcgctaccctgcagggcgtcagctcacaatcttcaatagccaagcaaccataataattggcgggaaagagcagggccagcccttccagggccagctctctgggctgtactacaatggcttgaaagttctgaatatggcagccgaaaacgatgccaacatcgccatagtgggaaatgtgagactggttggtgaagtgccttcctctatgacaactgagtcaacagccactgccatgcaatcagagatgtccacatcaattatggagactaccacgaccctggctactagcacagccagaagaggaaagcccccgacaaaagaacccattagccagaccacagatgacatccttgtggcctcagcagagtgtcccagcgatgatgaggacattgacccctgtgagccgagctcaggtgggttagccaacccaacccgagcaggcggcagagagccgtatccaggctcagcagaagtgatccgggagtccagcagcaccacgggtatggtcgttgggatagtagccgctgccgccctgtgcatccttatcctcctctatgccatgtacaagtacagaaaccgggatgaaggctcataccatgtggacgagagtcgaaactacatcagtaactcagcacagtccaatggggctgttgtaaaggagaaacaacccagcagtgcgaaaagctccaacaaaaataagaaaaacaaggataaagagtattatgtctgatcccaagatcttaaatggacacttgtatagaaatagtcttcattttatctgagacataatataaacttatttactttcctttttatgaagcacatacaaaagaagacagggaatgcaatcaggaaggaaagactttttaaaaaataaaaacaagtatctcatgctcttgtttctcaaaaaagaaaaacaaaaaacaaaaaacaggggccaataaattccctaacatccacagtgttttcatttactctgcttgtctttatgttgctggaacatttctaaaagacagtgatgaccgcacgcattcataaagcaaaggagtactacagcatcaaggcacaacacaaaaaccaacacaaaa

SEQ ID NO: 14194 - DNA, 757 bp, Homo sapiens
  source 1..757: mol_type = unassigned DNA
tccacgatgattgtaagtttcctgaggcctccgtagccctgcggaactaccacagatgacatccttgtggcctcagcagagtgtcccagcgatgatgaggacattgacccctgtgagccgagctcaggtgggttagccaacccaacccgagcaggcggcagagagccgtatccaggctcagcagaagtgatccgggagtccagcagcaccacgggtatggtcgttgggatagtagccgctgccgccctgtgcatccttatcctcctctatgccatgtacaagtacagaaaccgggatgaaggctcataccatgtggacgagagtcgaaactacatcagtaactcagcacagtccaatggggctgttgtaaaggagaaacaacccagcagtgcgaaaagctccaacaaaaataagaaaaacaaggataaagagtattatgtctgatcccaagatcttaaatggacacttgtatagaaatagtcttcattttatctgagacataatataaacttatttactttcctttttatgaagcacatacaaaagaagacagggaatgcaatcaggaaggaaagactttttaaaaaataaaaacaagtatctcatgctcttgtttctcaaaaaagaaaaacaaaaaacaaaaaacaggggccaataaattccctaacatccacagtgttttcatttactctgcttgtctttatgttgctggaacatttctaaaagacagtgatgaccgcacgcattcataaagcaa

SEQ ID NO: 14195 - DNA, 5870 bp, Homo sapiens
  source 1..5870: mol_type = unassigned DNA
ctctttccctctcctccccctcctcctccttctcctcctcctcctcctcctgctcccctccgttgcctgttctcccctcccgcactcctggagatagacgctcaagcctgacgcctctgaaaaggcagcagcagtcgccttatccatagacctcaggaaattcgctttgaccgatgcatgcttcaggctctggctcgagctgaggggaataaccgggcagatgtctgagtccttaaaaaagacaagataaaaccaaaatgcatcaccaacacacaaccaattgatgtgctggcatcttagcttggccctgcagaggcagagagaaaagaagaggagctgttgcgatttccacatctaacagcttctggctatttcgcaactgctgggtttgagtcctactgttgccgtggctgaaaagagaagtaaaatccaacttgtgagaccacgcacaaggaattaggctttggctgcagcggtgctgaagcccatgctatgacagaagaagcaggcctttgaagctatcctcgggttaagaaatggtgccctaaagaggcaagcatccctttctccgttctgctgtaagacaccacatctgaaggagacagacttgaggcattcacaagcatccaaggatactggctcactgctggcttcctgtactttcttgagaaaagtgttttctttttactgactctcactgcttccttttggcctggtaccactggtggaacctggcagataatgggatttgaggagttaagtatctgttgacactgcagatactcttaaattagttaatcagactcaaatgggtcagtgctttcccttgatcttttgttgaagccttttccagaacgttgtctccaaagtgcatcctccctttggtctggaagttctgtggctaccctgtaccactggggtcaacgttttccagttggaagaggactacagggagagagggcggggttattggaagaagaagaagaaaaaaagaactagataaaggagggcacatccctctcactcccgcctttccccttacctttctgtctctcgggacccttatttcttcgtcacggtgtccaggaccattttgaccctgtcggccccggcacccccccgccgcaccccagccccgagcatggggacggcgctgctccagcgcgggggctgttttcttctgtgcctctcgctgctgctcctgggctgctgggcggagctgggcagcgggctggagtttccgggcgccgagggccaatggacgcgcttccccaagtggaacgcctgctgcgagagcgagatgagcttccagctcaagactcgcagcgcccgcggcctcgtgctctacttcgacgacgagggcttctgcgacttcctggagctgattctgacgcgcggcggccgcctgcagctcagcttctccatcttctgcgctgagcctgcgacgctcctggccgacacgccggttaacgacggcgcctggcacagcgtgcgcatccgccgccagttccgcaacaccacgctcttcatcgaccaggtggaggccaagtgggtggaggtcaagtccaagcgcagggacatgacggtgttcagcggccttttcgtcggggggctgcccccggaactgcgcgccgcggcgctcaagctcaccctggcctcggtgagggagcgggagcccttcaaggggtggattcgtgacgtgagggtcaactcctcgcaggtcctgcccgtggacagcggcgaggtgaagctggacgatgagccgcccaacagcggcgggggaagcccgtgcgaggcgggcgaggagggcgagggcggggtgtgcctcaacggaggtgtgtgctccgtggtggacgaccaggccgtgtgcgactgctcgcgaaccggcttccgcggcaaggactgcagccaagaagacaacaatgtggaaggtctggcgcacctgatgatgggcgaccaaggtaaaagtaaaggaaaagaagaatatattgccacgttcaaaggatctgaatacttctgctacgacttgtctcaaaaccccattcaaagcagcagtgatgaaataactctgtcatttaaaacccttcagaggaatggactgatgcttcacactgggaaatcggctgattatgtcaatcttgccctgaaaaatggagctgtctctctggtcattaatttgggatcaggggcctttgaagcactagtggagcctgtgaatggaaagtttaatgataatgcctggcatgatgtgaaagtcaccaggaatctgcgtcagcactcaggcattggacacgctatggtgacaatatcagtggatgggattcttaccacaacgggctacacgcaagaagattataccatgctggggtctgatgactttttctatgttggaggcagtcccagcacagccgaccttccagggtcaccagtcagtaacaactttatgggctgtctcaaagaggttgtatataaaaataatgatgtgaggctggaattatctcgacttgccaagcaaggagatcctaagatgaagatccatggagtggtggcatttaaatgtgagaatgttgcaactttagacccaatcacctttgaaaccccagagtctttcatctctttgcctaaatggaatgcaaagaaaactggctccatatcatttgatttccgtacaacagagccaaatggcctcatcttatttagccatggcaagccaagacatcagaaagatgccaagcacccacagatgataaaggtggacttctttgctattgagatgctagatggccacctctacctcctcctggacatggggtcaggtactataaaaataaaagccctgttgaagaaagtgaatgatggagaatggtatcatgtggacttccagagagacggacggtcaggtaccatttctgtcaacacgttgcgtactccctacactgctcctggtgagagtgagattctggacctggatgatgagttgtacctgggggggctgccagaaaataaagctggccttgtcttccccaccgaggtgtggactgctctgctcaactatggctacgtgggctgcatcagggatttgttcatcgatggccaaagcaaagatatccggcaaatggctgaagttcaaagtactgctggagtgaagccttcctgctcaaaggaaacagcaaaaccgtgccttagcaacccttgcaaaaacaatggcatgtgcagggatgggtggaacagatatgtctgtgattgttccggaacaggctatcttggcaggtcctgtgagagagaggcaacggttttgagctatgatgggagcatgtttatgaaaattcagctccccgtagtcatgcatacggaggctgaggatgtttccttacggttccgatcccagcgtgcatatggcattctgatggcaaccacttctagagactctgctgacaccctccgcctggagctagacgcaggacgtgtgaaactgacggtcaatctagattgtatcaggattaactgtaattccagcaaaggtcccgagactctttttgctggctataacctcaatgataacgagtggcacacagtgcgtgtagttcggcgtggaaaaagtttaaagttaacagtggatgaccaacaggccatgacaggtcaaatggcaggtgatcatactaggctggagttccataacatagagactggcatcatcacagaacgacggtatctttcttctgtcccctccaacttcattggacacctgcagagcttgacatttaatggaatggcatacattgacctgtgtaaaaatggcgacatagattactgtgagcttaatgccagatttggcttcaggaacatcatagcagatcctgtcaccttcaagaccaaatcgagctatgttgccttagctaccttgcaagcctacacttctatgcatctttttttccagttcaagacaacatccctagatggattaattctatataacagtggggatggaaatgactttattgtggttgaattagttaaagggtacttacattacgtgtttgatttgggaaatggtgctaacctcatcaaaggaagctcaaataaacctctcaatgacaatcagtggcacaacgtgatgatatcaagggacaccagcaacctccacactgtaaagattgacacaaaaatcacaacgcaaatcaccgccggagccaggaacttagacctcaagagtgacttatatataggaggagtagctaaagaaacatacaaatccttaccaaaacttgtacatgccaaagaaggctttcaaggctgcctggcatcagttgatttaaatggacggcttccggacctcatctccgatgctcttttctgcaacggacagatcgagagaggatgtgaagggcccagcacaacctgccaagaggactcatgttccaatcaaggtgtgtgcttgcaacaatgggatggcttcagctgtgactgtagtatgacttccttcagtggaccactctgcaatgaccctgggacgacatatatctttagcaaaggtggtggacaaatcacgtataagtggcctcctaatgaccgacccagtacacgagcagacagactggccataggttttagcactgttcagaaagaagccgtattggtgcgagtggacagttcttcaggcttgggtgactacctagaactgcatatacaccagggaaaaattggagttaagtttaatgttgggacagatgacatcgccattgaagaatccaatgcaatcattaatgatgggaaataccatgtagttcgtttcacgaggagtggtggcaatgccacgttgcaggtggacagctggccagtgatcgagcgctaccctgcaggaaacaatgataacgagcgcctggcgattgctagacagcgaattccatatcgacttggtcgagtagttgatgaatggctactcgacaaagggcgtcagctcacaatcttcaatagccaagcaaccataataattggcgggaaagagcagggccagcccttccagggccagctctctgggctgtactacaatggcttgaaagttctgaatatggcagccgaaaacgatgccaacatcgccatagtgggaaatgtgagactggttggtgaagtgccttcctctatgacaactgagtcaacagccactgccatgcaatcagagatgtccacatcaattatggagactaccacgaccctggctactagcacagccagaagaggaaagcccccgacaaaagaacccattagccagaccacagatgacatccttgtggcctcagcagagtgtcccagcgatgatgaggacattgacccctgtgagccgagctcaggtgggttagccaacccaacccgagcaggcggcagagagccgtatccaggctcagcagaagtgatccgggagtccagcagcaccacgggtatggtcgttgggatagtagccgctgccgccctgtgcatccttatcctcctctatgccatgtacaagtacagaaaccgggatgaaggctcataccatgtggacgagagtcgaaactacatcagtaactcagcacagtccaatggggctgttgtaaaggagaaacaacccagcagtgcgaaaagctccaacaaaaataagaaaaacaaggataaagagtattatgtctgatcccaagatcttaaatggacacttgtatagaaatagtcttcattttatctgagacataatataaacttatttactttcctttttatgaagcacatacaaaagaagacagggaatgcaatcaggaaggaaagactttttaaaaaataaaaacaagtatctcatgctcttgtttctcaaaaaagaaaaacaaaaaacaaaaaacagg

SEQ ID NO: 14196 - DNA, 837 bp, Homo sapiens
  source 1..837: mol_type = unassigned DNA
agcacagcttagatctgcagcatgcagggtttaagataccagaagcctaaaaacaataataatgaaaataagaataaactcatttggataaactaattttaagatttatgttaaaatatttcttcttgaagattgcatgtcaaatttatgcacgctgtatgtgaaatctagtccttattctcgagaaaagcaaaaatgccttggcattcaaacattccctaggcctgtggagaattagagctagcagaaaccacagatgacatccttgtggcctcagcagagtgtcccagcgatgatgaggacattgacccctgtgagccgagctcagccaacccaacccgagcaggcggcagagagccgtatccaggctcagcagaagtgatccgggagtccagcagcaccacgggtatggtcgttgggatagtagccgctgccgccctgtgcatccttatcctcctctatgccatgtacaagtacagaaaccgggatgaaggctcataccatgtggacgagagtcgaaactacatcagtaactcagcacagtccaatggggctgttgtaaaggagaaacaacccagcagtgcgaaaagctccaacaaaaataagaaaaacaaggataaagagtattatgtctgatcccaagatcttaaatggacacttgtatagaaatagtcttcattttatctgagacataatataaacttatttactttcctttttatgaagcacatacaaaagaagacagggaatgcaatcaggaaggaaagactttttaaaaaataaaaacaagtatctcatgctcttgtttctcaaaaaagaaaaacaaaaaacaaaaaa

SEQ ID NO: 14197 - DNA, 623 bp, Homo sapiens
  source 1..623: mol_type = unassigned DNA
acttatggagaacaggccaaaacccaaataagaaaacaaaccacagatgacatccttgtggcctcagcagagtgtcccagcgatgatgaggacattgacccctgtgagccgagctcaggtgggttagccaacccaacccgagcaggcggcagagagccgtatccaggctcagcagaagtgatccgggagtccagcagcaccacgggtatggtcgttgggatagtagccgctgccgccctgtgcatccttatcctcctctatgccatgtacaagtacagaaaccgggatgaaggctcataccatgtggacgagagtcgaaactacatcagtaactcagcacagtccaatggggctgttgtaaaggagaaacaacccagcagtgcgaaaagctccaacaaaaataagaaaaacaaggataaagagtattatgtctgatcccaagatcttaaatggacacttgtatagaaatagtcttcattttatctgagacataatataaacttatttactttcctttttatgaagcacatacaaaagaagacagggaatgcaatcaggaaggaaagactttttaaaaaataaaaacaagtatctcatgctcttgtttctcaaaaaagaaaaac

SEQ ID NO: 14198 - DNA, 2444 bp, Homo sapiens
  source 1..2444: mol_type = unassigned DNA
tagagccccttgcttcaccagcgtgtgtggtttttcttttctttttttctttttctttttctttttctgtttctctcccttactccttcgtctgcatcttcttctcagctgcctttccgccgttcgattcccacttccttcagaagggcgcactcttccctctgaacccctcgccgggcgtaagtgtcaggaggcggcggacgcggagattgcctcgggagcaggcgatgcgcgccgctgctccgcgcgctgcccgggggaggctggcgctagcgggcgagccggccggggctgaatggagggaaggggcgcctggattccatggggtctgcttctgtcttgaaaggaggttgggccggcgaagtggcctccctagtccccgcacacaaagctaaatggatttacctagtggattcgcggtggatgtctgtcatgtagaagtgaggaccttccaggaggagctttaaacaatttctcggccccccacccgccggcacgcactctcgcccgaaactctttgggagtatctctcgagaacctggagccctggaaatctgggagcagccacccgctccgcgcttgctgttcccggggctgcctttccggacaagcccctctccagctgcattcgcctcggctatgtttcggattgtttggggtgctaggcacggcggactccaggaccccgagaagactgtccgaaggagggagaggatgggtgccctggcgcggtgaggcggccggcccctcagcccactccgcgccgcccgctcccctgcgccctctcctctccccgcgccccaaactttgcctcccgcggcggctgcccctcggcgggcgccccgccatgtaccagaggatgctccggtgcggcgccgagctgggctcgcccgggggcggcggcggcggcggcggcggcggcggcgcaggggggcgcctggccctgctttggatagtcccgctcaccctcagcggcctcctaggagtggcgtggggggcatccagtttgggagcgcaccacatccaccatttccatggcagcagcaagcatcattcagtgcctattgcaatctacaggtcaccggcatccttgcgaggcggacacgctgggacgacatatatctttagcaaaggtggtggacaaatcacgtataagtggcctcctaatgaccgacccagtacacgagcagacagactggccataggttttagcactgttcagaaagaagccgtattggtgcgagtggacagttcttcaggcttgggtgactacctagaactgcatatacaccagggaaaaattggagttaagtttaatgttgggacagatgacatcgccattgaagaatccaatgcaatcattaatgatgggaaataccatgtagttcgtttcacgaggagtggtggcaatgccacgttgcaggtggacagctggccagtgatcgagcgctaccctgcaggaaacaatgataacgagcgcctggcgattgctagacagcgaattccatatcgacttggtcgagtagttgatgaatggctactcgacaaagggcgtcagctcacaatcttcaatagccaagcaaccataataattggcgggaaagagcagggccagcccttccagggccagctctctgggctgtactacaatggcttgaaagttctgaatatggcagccgaaaacgatgccaacatcgccatagtgggaaatgtgagactggttggtgaagtgccttcctctatgacaactgagtcaacagccactgccatgcaatcagagatgtccacatcaattatggagactaccacgaccctggctactagcacagccagaagaggaaagcccccgacaaaagaacccattagccagaccacagatgacatccttgtggcctcagcagagtgtcccagcgatgatgaggacattgacccctgtgagccgagctcagccaacccaacccgagcaggcggcagagagccgtatccaggctcagcagaagtgatccgggagtccagcagcaccacgggtatggtcgttgggatagtagccgctgccgccctgtgcatccttatcctcctctatgccatgtacaagtacagaaaccgggatgaaggctcataccatgtggacgagagtcgaaactacatcagtaactcagcacagtccaatggggctgttgtaaaggagaaacaacccagcagtgcgaaaagctccaacaaaaataagaaaaacaaggataaagagtattatgtctgatcccaagatcttaaatggacacttgtatagaaatagtcttcattttatctgagacataatataaacttatttactttcctttttatgaagcacatacaaaagaagacagggaatgcaatcaggaaggaaagactttttaaaaaataaaaacaagtatctcatgctcttgtttctcaaaaaagaaaaa

SEQ ID NO: 14199 - DNA, 5724 bp, Homo sapiens
  source 1..5724: mol_type = unassigned DNA
cctggagatagacgctcaagcctgacgcctctgaaaaggcagcagcagtcgccttatccatagacctcaggaaattcgctttgaccgatgcatgcttcaggctctggctcgagctgaggggaataaccgggcagatgtctgagtccttaaaaaagacaagataaaaccaaaatgcatcaccaacacacaaccaattgatgtgctggcatcttagcttggccctgcagaggcagagagaaaagaagaggagctgttgcgatttccacatctaacagcttctggctatttcgcaactgctgggtttgagtcctactgttgccgtggctgaaaagagaagtaaaatccaacttgtgagaccacgcacaaggaattaggctttggctgcagcggtgctgaagcccatgctatgacagaagaagcaggcctttgaagctatcctcgggttaagaaatggtgccctaaagaggcaagcatccctttctccgttctgctgtaagacaccacatctgaaggagacagacttgaggcattcacaagcatccaaggatactggctcactgctggcttcctgtactttcttgagaaaagtgttttctttttactgactctcactgcttccttttggcctggtaccactggtggaacctggcagataatgggatttgaggagttaagtatctgttgacactgcagatactcttaaattagttaatcagactcaaatgggtcagtgctttcccttgatcttttgttgaagccttttccagaacgttgtctccaaagtgcatcctccctttggtctggaagttctgtggctaccctgtaccactggggtcaacgttttccagttggaagaggactacagggagagagggcggggttattggaagaagaagaagaaaaaaagaactagataaaggagggcacatccctctcactcccgcctttccccttacctttctgtctctcgggacccttatttcttcgtcacggtgtccaggaccattttgaccctgtcggccccggcacccccccgccgcaccccagccccgagcatggggacggcgctgctccagcgcgggggctgttttcttctgtgcctctcgctgctgctcctgggctgctgggcggagctgggcagcgggctggagtttccgggcgccgagggccaatggacgcgcttccccaagtggaacgcctgctgcgagagcgagatgagcttccagctcaagactcgcagcgcccgcggcctcgtgctctacttcgacgacgagggcttctgcgacttcctggagctgattctgacgcgcggcggccgcctgcagctcagcttctccatcttctgcgctgagcctgcgacgctcctggccgacacgccggttaacgacggcgcctggcacagcgtgcgcatccgccgccagttccgcaacaccacgctcttcatcgaccaggtggaggccaagtgggtggaggtcaagtccaagcgcagggacatgacggtgttcagcggccttttcgtcggggggctgcccccggaactgcgcgccgcggcgctcaagctcaccctggcctcggtgagggagcgggagcccttcaaggggtggattcgtgacgtgagggtcaactcctcgcaggtcctgcccgtggacagcggcgaggtgaagctggacgatgagccgcccaacagcggcgggggaagcccgtgcgaggcgggcgaggagggcgagggcggggtgtgcctcaacggaggtgtgtgctccgtggtggacgaccaggccgtgtgcgactgctcgcgaaccggcttccgcggcaaggactgcagccaagaagacaacaatgtggaaggtctggcgcacctgatgatgggcgaccaaggaaaagaagaatatattgccacgttcaaaggatctgaatacttctgctacgacttgtctcaaaaccccattcaaagcagcagtgatgaaataactctgtcatttaaaacccttcagaggaatggactgatgcttcacactgggaaatcggctgattatgtcaatcttgccctgaaaaatggagctgtctctctggtcattaatttgggatcaggggcctttgaagcactagtggagcctgtgaatggaaagtttaatgataatgcctggcatgatgtgaaagtcaccaggaatctgcgtcaggtgacaatatcagtggatgggattcttaccacaacgggctacacgcaagaagattataccatgctggggtctgatgactttttctatgttggaggcagtcccagcacagccgaccttccagggtcaccagtcagtaacaactttatgggctgtctcaaagaggttgtatataaaaataatgatgtgaggctggaattatctcgacttgccaagcaaggagatcctaagatgaagatccatggagtggtggcatttaaatgtgagaatgttgcaactttagacccaatcacctttgaaaccccagagtctttcatctctttgcctaaatggaatgcaaagaaaactggctccatatcatttgatttccgtacaacagagccaaatggcctcatcttatttagccatggcaagccaagacatcagaaagatgccaagcacccacagatgataaaggtggacttctttgctattgagatgctagatggccacctctacctcctcctggacatggggtcaggtactataaaaataaaagccctgttgaagaaagtgaatgatggagaatggtatcatgtggacttccagagagacggacggtcaggtaccatttctgtcaacacgttgcgtactccctacactgctcctggtgagagtgagattctggacctggatgatgagttgtacctgggggggctgccagaaaataaagctggccttgtcttccccaccgaggtgtggactgctctgctcaactatggctacgtgggctgcatcagggatttgttcatcgatggccaaagcaaagatatccggcaaatggctgaagttcaaagtactgctggagtgaagccttcctgctcaaaggaaacagcaaaaccgtgccttagcaacccttgcaaaaacaatggcatgtgcagggatgggtggaacagatatgtctgtgattgttccggaacaggctatcttggcaggtcctgtgagagagaggcaacggttttgagctatgatgggagcatgtttatgaaaattcagctccccgtagtcatgcatacggaggctgaggatgtttccttacggttccgatcccagcgtgcatatggcattctgatggcaaccacttctagagactctgctgacaccctccgcctggagctagacgcaggacgtgtgaaactgacggtcaatctagattgtatcaggattaactgtaattccagcaaaggtcccgagactctttttgctggctataacctcaatgataacgagtggcacacagtgcgtgtagttcggcgtggaaaaagtttaaagttaacagtggatgaccaacaggccatgacaggtcaaatggcaggtgatcatactaggctggagttccataacatagagactggcatcatcacagaacgacggtatctttcttctgtcccctccaacttcattggacacctgcagagcttgacatttaatggaatggcatacattgacctgtgtaaaaatggcgacatagattactgtgagcttaatgccagatttggcttcaggaacatcatagcagatcctgtcaccttcaagaccaaatcgagctatgttgccttagctaccttgcaagcctacacttctatgcatctttttttccagttcaagacaacatccctagatggattaattctatataacagtggggatggaaatgactttattgtggttgaattagttaaagggtacttacattacgtgtttgatttgggaaatggtgctaacctcatcaaaggaagctcaaataaacctctcaatgacaatcagtggcacaacgtgatgatatcaagggacaccagcaacctccacactgtaaagattgacacaaaaatcacaacgcaaatcaccgccggagccaggaacttagacctcaagagtgacttatatataggaggagtagctaaagaaacatacaaatccttaccaaaacttgtacatgccaaagaaggctttcaaggctgcctggcatcagttgatttaaatggacggcttccggacctcatctccgatgctcttttctgcaacggacagatcgagagaggatgtgaagggcccagcacaacctgccaagaggactcatgttccaatcaaggtgtgtgcttgcaacaatgggatggcttcagctgtgactgtagtatgacttccttcagtggaccactctgcaatgaccctgggacgacatatatctttagcaaaggtggtggacaaatcacgtataagtggcctcctaatgaccgacccagtacacgagcagacagactggccataggttttagcactgttcagaaagaagccgtattggtgcgagtggacagttcttcaggcttgggtgactacctagaactgcatatacaccagggaaaaattggagttaagtttaatgttgggacagatgacatcgccattgaagaatccaatgcaatcattaatgatgggaaataccatgtagttcgtttcacgaggagtggtggcaatgccacgttgcaggtggacagctggccagtgatcgagcgctaccctgcaggaaacaatgataacgagcgcctggcgattgctagacagcgaattccatatcgacttggtcgagtagttgatgaatggctactcgacaaagggcgtcagctcacaatcttcaatagccaagcaaccataataattggcgggaaagagcagggccagcccttccagggccagctctctgggctgtactacaatggcttgaaagttctgaatatggcagccgaaaacgatgccaacatcgccatagtgggaaatgtgagactggttggtgaagtgccttcctctatgacaactgagtcaacagccactgccatgcaatcagagatgtccacatcaattatggagactaccacgaccctggctactagcacagccagaagaggaaagcccccgacaaaagaacccattagccagaccacagatgacatccttgtggcctcagcagagtgtcccagcgatgatgaggacattgacccctgtgagccgagctcaggtgggttagccaacccaacccgagcaggcggcagagagccgtatccaggctcagcagaagtgatccgggagtccagcagcaccacgggtatggtcgttgggatagtagccgctgccgccctgtgcatccttatcctcctctatgccatgtacaagtacagaaaccgggatgaaggctcataccatgtggacgagagtcgaaactacatcagtaactcagcacagtccaatggggctgttgtaaaggagaaacaacccagcagtgcgaaaagctccaacaaaaataagaaaaacaaggataaagagtattatgtctgatcccaagatcttaaatggacacttgtatagaaatagtcttcattttatctgagacataatataaacttatttactttcctttttatgaagcacatacaaaagaagacagggaatgcaatcaggaaggaaagactttttaaaaaataaaaacaagtatctcatgctcttgtttctcaaaaaa

SEQ ID NO: 14200 - DNA, 4500 bp, Homo sapiens
  source 1..4500: mol_type = unassigned DNA
atggggacggcgctgctccagcgcgggggctgttttcttctgtgcctctcgctgctgctcctgggctgctgggcggagctgggcagcgggctggagtttccgggcgccgagggccaatggacgcgcttccccaagtggaacgcctgctgcgagagcgagatgagcttccagctcaagactcgcagcgcccgcggcctcgtgctctacttcgacgacgagggcttctgcgacttcctggagctgattctgacgcgcggcggccgcctgcagctcagcttctccatcttctgcgctgagcctgcgacgctcctggccgacacgccggttaacgacggcgcctggcacagcgtgcgcatccgccgccagttccgcaacaccacgctcttcatcgaccaggtggaggccaagtgggtggaggtcaagtccaagcgcagggacatgacggtgttcagcggccttttcgtcggggggctgcccccggaactgcgcgccgcggcgctcaagctcaccctggcctcggtgagggagcgggagcccttcaaggggtggattcgtgacgtgagggtcaactcctcgcaggtcctgcccgtggacagcggcgaggtgaagctggacgatgagccgcccaacagcggcgggggaagcccgtgcgaggcgggcgaggagggcgagggcggggtgtgcctcaacggaggtgtgtgctccgtggtggacgaccaggccgtgtgcgactgctcgcgaaccggcttccgcggcaaggactgcagccaagaagacaacaatgtggaaggtctggcgcacctgatgatgggcgaccaaggtaaaagtaaaggaaaagaagaatatattgccacgttcaaaggatctgaatacttctgctacgacttgtctcaaaaccccattcaaagcagcagtgatgaaataactctgtcatttaaaacccttcagaggaatggactgatgcttcacactgggaaatcggctgattatgtcaatcttgccctgaaaaatggagctgtctctctggtcattaatttgggatcaggggcctttgaagcactagtggagcctgtgaatggaaagtttaatgataatgcctggcatgatgtgaaagtcaccaggaatctgcgtcaggtgacaatatcagtggatgggattcttaccacaacgggctacacgcaagaagattataccatgctggggtctgatgactttttctatgttggaggcagtcccagcacagccgaccttccagggtcaccagtcagtaacaactttatgggctgtctcaaagaggttgtatataaaaataatgatgtgaggctggaattatctcgacttgccaagcaaggagatcctaagatgaagatccatggagtggtggcatttaaatgtgagaatgttgcaactttagacccaatcacctttgaaaccccagagtctttcatctctttgcctaaatggaatgcaaagaaaactggctccatatcatttgatttccgtacaacagagccaaatggcctcatcttatttagccatggcaagccaagacatcagaaagatgccaagcacccacagatgataaaggtggacttctttgctattgagatgctagatggccacctctacctcctcctggacatggggtcaggtactataaaaataaaagccctgttgaagaaagtgaatgatggagaatggtatcatgtggacttccagagagacggacggtcaggtaccatttctgtcaacacgttgcgtactccctacactgctcctggtgagagtgagattctggacctggatgatgagttgtacctgggggggctgccagaaaataaagctggccttgtcttccccaccgaggtgtggactgctctgctcaactatggctacgtgggctgcatcagggatttgttcatcgatggccaaagcaaagatatccggcaaatggctgaagttcaaagtactgctggagtgaagccttcctgctcaaaggaaacagcaaaaccgtgccttagcaacccttgcaaaaacaatggcatgtgcagggatgggtggaacagatatgtctgtgattgttccggaacaggctatcttggcaggtcctgtgagagagaggcaacggttttgagctatgatgggagcatgtttatgaaaattcagctccccgtagtcatgcatacggaggctgaggatgtttccttacggttccgatcccagcgtgcatatggcattctgatggcaaccacttctagagactctgctgacaccctccgcctggagctagacgcaggacgtgtgaaactgacggtcaatctagattgtatcaggattaactgtaattccagcaaaggtcccgagactctttttgctggctataacctcaatgataacgagtggcacacagtgcgtgtagttcggcgtggaaaaagtttaaagttaacagtggatgaccaacaggccatgacaggtcaaatggcaggtgatcatactaggctggagttccataacatagagactggcatcatcacagaacgacggtatctttcttctgtcccctccaacttcattggacacctgcagagcttgacatttaatggaatggcatacattgacctgtgtaaaaatggcgacatagattactgtgagcttaatgccagatttggcttcaggaacatcatagcagatcctgtcaccttcaagaccaaatcgagctatgttgccttagctaccttgcaagcctacacttctatgcatctttttttccagttcaagacaacatccctagatggattaattctatataacagtggggatggaaatgactttattgtggttgaattagttaaagggtacttacattacgtgtttgatttgggaaatggtgctaacctcatcaaaggaagctcaaataaacctctcaatgacaatcagtggcacaacgtgatgatatcaagggacaccagcaacctccacactgtaaagattgacacaaaaatcacaacgcaaatcaccgccggagccaggaacttagacctcaagagtgacttatatataggaggagtagctaaagaaacatacaaatccttaccaaaacttgtacatgccaaagaaggctttcaaggctgcctggcatcagttgatttaaatggacggcttccggacctcatctccgatgctcttttctgcaacggacagatcgagagaggatgtgaagggcccagcacaacctgccaagaggactcatgttccaatcaaggtgtgtgcttgcaacaatgggatggcttcagctgtgactgtagtatgacttccttcagtggaccactctgcaatgaccctgggacgacatatatctttagcaaaggtggtggacaaatcacgtataagtggcctcctaatgaccgacccagtacacgagcagacagactggccataggttttagcactgttcagaaagaagccgtattggtgcgagtggacagttcttcaggcttgggtgactacctagaactgcatatacaccagggaaaaattggagttaagtttaatgttgggacagatgacatcgccattgaagaatccaatgcaatcattaatgatgggaaataccatgtagttcgtttcacgaggagtggtggcaatgccacgttgcaggtggacagctggccagtgatcgagcgctaccctgcaggaaacaatgataacgagcgcctggcgattgctagacagcgaattccatatcgacttggtcgagtagttgatgaatggctactcgacaaagggcgtcagctcacaatcttcaatagccaagcaaccataataattggcgggaaagagcagggccagcccttccagggccagctctctgggctgtactacaatggcttgaaagttctgaatatggcagccgaaaacgatgccaacatcgccatagtgggaaatgtgagactggttggtgaagtgccttcctctatgacaactgagtcaacagccactgccatgcaatcagagatgtccacatcaattatggagactaccacgaccctggctactagcacagccagaagaggaaagcccccgacaaaagaacccattagccagaccacagatgacatccttgtggcctcagcagagtgtcccagcgatgatgaggacattgacccctgtgagccgagctcaggtgggttagccaacccaacccgagcaggcggcagagagccgtatccaggctcagcagaagtgatccgggagtccagcagcaccacgggtatggtcgttgggatagtagccgctgccgccctgtgcatccttatcctcctctatgccatgtacaagtacagaaaccgggatgaaggctcataccatgtggacgagagtcgaaactacatcagtaactcagcacagtccaatggggctgttgtaaaggagaaacaacccagcagtgcgaaaagctccaacaaaaataagaaaaacaaggataaagagtattatgtctga

SEQ ID NO: 14201 - DNA, 1282 bp, Homo sapiens
  source 1..1282: mol_type = unassigned DNA
atcaagagcacactgtcttccttttctcaatcttgtggaggatgggttgaggaggcaggcagatacagatacaactggacatctgcttgtaaggaaaactggtttgaccgcttttataaaacatgactggaggcagaaatgaaattcagtctcaatctctttcctcattcaagctgggacgacatatatctttagcaaaggtggtggacaaatcacgtataagtggcctcctaatgaccgacccagtacacgagcagacagactggccataggttttagcactgttcagaaagaagccgtattggtgcgagtggacagttcttcaggcttgggtgactacctagaactgcatatacaccagggaaaaattggagttaagtttaatgttgggacagatgacatcgccattgaagaatccaatgcaatcattaatgatgggaaataccatgtagttcgtttcacgaggagtggtggcaatgccacgttgcaggtggacagctggccagtgatcgagcgctaccctgcaggaaacaatgataacgagcgcctggcgattgctagacagcgaattccatatcgacttggtcgagtagttgatgaatggctactcgacaaagggcgtcagctcacaatcttcaatagccaagcaaccataataattggcgggaaagagcagggccagcccttccagggccagctctctgggctgtactacaatggcttgaaagttctgaatatggcagccgaaaacgatgccaacatcgccatagtgggaaatgtgagactggttggtgaagtgccttcctctatgacaactgagtcaacagccactgccatgcaatcagagatgtccacatcaattatggagactaccacgaccctggctactagcacagccagaagaggaaagcccccgacaaaagaacccattagccagaccacagatgacatccttgtggcctcagcagagtgtcccagcgatgatgaggacattgacccctgtgagccgagctcaggtgggttagccaacccaacccgagcaggcggcagagagccgtatccaggctcagcagaagtgatccgggagtccagcagcaccacgggtatggtcgttgggatagtagccgctgccgccctgtgcatccttatcctcctctatgccatgtacaagtacagaaaccgggatgaaggctcataccatgtggacgagagtcgaaactacatcagtaactcagcacagtccaatggggctgttgtaaaggagaaacaacccagcagtgcg

SEQ ID NO: 14202 - DNA, 2717 bp, Homo sapiens
  source 1..2717: mol_type = unassigned DNA
acagtggggatggaaatgactttattgtggttgaattagttaaagggtacttacattacgtgtttgatttgggaaatggtgctaacctcatcaaaggaagctcaaataaacctctcaatgacaatcagtggcacaacgtgatgatatcaagggacaccagcaacctccacactgtaaagattgacacaaaaatcacaacgcaaatcaccgccggagccaggaacttagacctcaagagtgacttatatataggaggagtagctaaagaaacatacaaatccttaccaaaacttgtacatgccaaagaaggctttcaaggctgcctggcatcagttgatttaaatggacggcttccggacctcatctccgatgctcttttctgcaacggacagatcgagagaggatgtgaagggcccagcacaacctgccaagaggactcatgttccaatcaaggtgtgtgcttgcaacaatgggatggcttcagctgtgactgtagtatgacttccttcagtggaccactctgcaatgaccctgggacgacatatatctttagcaaaggtggtggacaaatcacgtataagtggcctcctaatgaccgacccagtacacgagcagacagactggccataggttttagcactgttcagaaagaagccgtattggtgcgagtggacagttcttcaggcttgggtgactacctagaactgcatatacaccagggaaaaattggagttaagtttaatgttgggacagatgacatcgccattgaagaatccaatgcaatcattaatgatgggaaataccatgtagttcgtttcacgaggagtggtggcaatgccacgttgcaggtggacagctggccagtgatcgagcgctaccctgcaggaaacaatgataacgagcgcctggcgattgctagacagcgaattccatatcgacttggtcgagtagttgatgaatggctactcgacaaagggcgtcagctcacaatcttcaatagccaagcaaccataataattggcgggaaagagcagggccagcccttccagggccagctctctgggctgtactacaatggcttgaaagttctgaatatggcagccgaaaacgatgccaacatcgccatagtgggaaatgtgagactggttggtgaagtgccttcctctatgacaactgagtcaacagccactgccatgcaatcagagatgtccacatcaattatggagactaccacgaccctggctactagcacagccagaagaggaaagcccccgacaaaagaacccattagccaggtatcagtgagaaaggtaggacacacaattccttggaagaacagaaggatgaataactacttgatttcaggaagaactggcaatgtatctagacagacatccaacttcatctgtaaaataggaataaaaacacctaatgcctggggtgctatgaaaattgtacaaaataacaaatataaagtgtttagcacagatggcagataatgttaataatgttttaatttttcttggtggcatacatgaactggttgattaggttaaaattatgcgtgaaagcacagctttacttttatgaaaaatgtatttgaggtccactaggttgtatgtgatgttgttgtccacctcatccaacccaccatgattttggtacttacatacttaaatgtccttggattggatccaaggaagaccagccatatacacatattcggccccgaagtgaattgtgctatggcaattatcccattgaattgctctttaaaaggtcaattcattagctttgcctttgcttccctcatttttgaatgtggtgctgattaaacctccatgaagccttgtattaaccttttattcaaagtaagtaaaaaccagttcaagattttcactgcaaagctgtcataggtcaccaggttgaaagcatttacaggagaaaaaatgggatgtattttcccagaaaaaaaaaatgacaccaggctcttaaatgttcttgggttcctttttagttggacagtaccaggggaactgtaatcttatcagtgtttctttatatcttacagcacatatttgcaaatggcattgaaaaagagaagtgatggaggttaaaggagtttcagatataataattcttaatcaaaatttcatttaggaaagagcagcacctagatttactaagcaaggtaaagtagtaggactttctttccaggaagaatgagagaaacacttggtagtaatttatgcctttcttatgggttccagtatattatggagtcagacatgtatatgtacatatatcaagggagcctcagcacctgctgcaaatcactatcttcagtgcattcttgtttcttccctgggtatcagtgaggaaggaaggacacatactcccttggcaggtgacagaatgatgtagtactacttaatttcagcaacaattgggaatatatgtagcctgaacctcagcattaactaaggatagaattcagtcttcctagaagctctatttttacctactatataagatattctggcaaccagtaaatttacaggccactgaatgaaagtctaacattgttgtgtcttgatatttcagtgactactcatcacagatttcatagaaagagtgaaaggaaattatggagtataactaaatacaaaacatctctttttgtaaaaattgagaatttgatttttttatacaaactt

SEQ ID NO: 14203 - DNA, 100 bp, Homo sapiens
  source 1..100: mol_type = unassigned DNA
ggtgcgagtggacagttcttcaggcttgggtgactacctagaactgcatatacagttctaaacaactggactaatttaatgctcatgaaagaggaattgc

SEQ ID NO: 14204 - DNA, 3010 bp, Homo sapiens
  source 1..3010: mol_type = unassigned DNA
ggaaagtttaatgataatgcctggcatgatgtgaaagtcaccaggaatctgcgtcaggtgacaatatcagtggatgggattcttaccacaacgggctacacgcaagaagattataccatgctggggtctgatgactttttctatgttggaggcagtcccagcacagccgaccttccagggtcaccagtcagtaacaactttatgggctgtctcaaagaggttgtatataaaaataatgatgtgaggctggaattatctcgacttgccaagcaaggagatcctaagatgaagatccatggagtggtggcatttaaatgtgagaatgttgcaactttagacccaatcacctttgaaaccccagagtctttcatctctttgcctaaatggaatgcaaagaaaactggctccatatcatttgatttccgtacaacagagccaaatggcctcatcttatttagccatggcaagccaagacatcagaaagatgccaagcacccacagatgataaaggtggacttctttgctattgagatgctagatggccacctctacctcctcctggacatggggtcaggtactataaaaataaaagccctgttgaagaaagtgaatgatggagaatggtatcatgtggacttccagagagacggacggtcaggtaccatttctgtcaacacgttgcgtactccctacactgctcctggtgagagtgagattctggacctggatgatgagttgtacctgggggggctgccagaaaataaagctggccttgtcttccccaccgaggtgtggactgctctgctcaactatggctacgtgggctgcatcagggatttgttcatcgatggccaaagcaaagatatccggcaaatggctgaagttcaaagtactgctggagtgaagccttcctgctcaaaggaaacagcaaaaccgtgccttagcaacccttgcaaaaacaatggcatgtgcagggatgggtggaacagatatgtctgtgattgttccggaacaggctatcttggcaggtcctgtgagagagaggcaacggttttgagctatgatgggagcatgtttatgaaaattcagctccccgtagtcatgcatacggaggctgaggatgtttccttacggttccgatcccagcgtgcatatggcattctgatggcaaccacttctagagactctgctgacaccctccgcctggagctagacgcaggacgtgtgaaactgacggtcaatctagattgtatcaggattaactgtaattccagcaaaggtcccgagactctttttgctggctataacctcaatgataacgagtggcacacagtgcgtgtagttcggcgtggaaaaagtttaaagttaacagtggatgaccaacaggccatgacaggtcaaatggcaggtgatcatactaggctggagttccataacatagagactggcatcatcacagaacgacggtatctttcttctgtcccctccaacttcattggacacctgcagagcttgacatttaatggaatggcatacattgacctgtgtaaaaatggcgacatagattactgtgagcttaatgccagatttggcttcaggaacatcatagcagatcctgtcaccttcaagaccaaatcgagctatgttgccttagctaccttgcaagcctacacttctatgcatctttttttccagttcaagacaacatccctagatggattaattctatataacagtggggatggaaatgactttattgtggttgaattagttaaagggtacttacattacgtgtttgatttgggaaatggtgctaacctcatcaaaggaagctcaaataaacctctcaatgacaatcagtggcacaacgtgatgatatcaagggacaccagcaacctccacactgtaaagattgacacaaaaatcacaacgcaaatcaccgccggagccaggaacttagacctcaagagtgacttatatataggaggagtagctaaagaaacatacaaatccttaccaaaacttgtacatgccaaagaaggctttcaaggctgcctggcatcagttgatttaaatggacggcttccggacctcatctccgatgctcttttctgcaacggacagatcgagagaggatgtgaagggcccagcacaacctgccaagaggactcatgttccaatcaaggtgtgtgcttgcaacaatgggatggcttcagctgtgactgtagtatgacttccttcagtggaccactctgcaatgaccctgggacgacatatatctttagcaaaggtggtggacaaatcacgtataagtggcctcctaatgaccgacccagtacacgagcagacagactggccataggttttagcactgttcagaaagaagccgtattggtgcgagtggacagttcttcaggcttgggtgactacctagaactgcatatagaggggttcttatcaggatggcctgttggatggccttgccttgaatttggttcttcggccattgtgaaggagtgaagtggaaagggcattggatcatgaggcccatgcttagatgctagcactggctcgaacacctactattatgtggcttagcaagtcactgatttctgaacctcaagttcatgaaatataatttgaaggcaataatctatagcctacccacattacaggcttgttgagaggtcatgtgggtaatatagtgaaattgtaggcaaatgatagcatgctacgcttgagctaagtatagcatgttactgttttaatggttattattatgattttttaaattatcattacttcagtgactacaagactggttctgttgttcttctggctttttaaatatttggacattttccgttctgaaataaaatccataattacaacagcaaatttttttttctaagagcttgacatatagtaatttatttaatccttccaacaacattataaggtatgtaatactattatctgttttatagaactgttaagaagattactgaat

SEQ ID NO: 14205 - DNA, 3044 bp, Homo sapiens
  source 1..3044: mol_type = unassigned DNA
atttgtgacttcttcagaccactttcatgacttctggaagcaaatgtcctagtacagactcaggaaaagaagaatatattgccacgttcaaaggatctgaatacttctgctacgacttgtctcaaaaccccattcaaagcagcagtgatgaaataactctgtcatttaaaacccttcagaggaatggactgatgcttcacactgggaaatcggctgattatgtcaatcttgccctgaaaaatggagctgtctctctggtcattaatttgggatcaggggcctttgaagcactagtggagcctgtgaatggaaagtttaatgataatgcctggcatgatgtgaaagtcaccaggaatctgcgtcaggtgacaatatcagtggatgggattcttaccacaacgggctacacgcaagaagattataccatgctggggtctgatgactttttctatgttggaggcagtcccagcacagccgaccttccagggtcaccagtcagtaacaactttatgggctgtctcaaagaggttgtatataaaaataatgatgtgaggctggaattatctcgacttgccaagcaaggagatcctaagatgaagatccatggagtggtggcatttaaatgtgagaatgttgcaactttagacccaatcacctttgaaaccccagagtctttcatctctttgcctaaatggaatgcaaagaaaactggctccatatcatttgatttccgtacaacagagccaaatggcctcatcttatttagccatggcaagccaagacatcagaaagatgccaagcacccacagatgataaaggtggacttctttgctattgagatgctagatggccacctctacctcctcctggacatggggtcaggtactataaaaataaaagccctgttgaagaaagtgaatgatggagaatggtatcatgtggacttccagagagacggacggtcaggtaccatttctgtcaacacgttgcgtactccctacactgctcctggtgagagtgagattctggacctggatgatgagttgtacctgggggggctgccagaaaataaagctggccttgtcttccccaccgaggtgtggactgctctgctcaactatggctacgtgggctgcatcagggatttgttcatcgatggccaaagcaaagatatccggcaaatggctgaagttcaaagtactgctggagtgaagccttcctgctcaaaggaaacagcaaaaccgtgccttagcaacccttgcaaaaacaatggcatgtgcagggatgggtggaacagatatgtctgtgattgttccggaacaggctatcttggcaggtcctgtgagagagaggcaacggttttgagctatgatgggagcatgtttatgaaaattcagctccccgtagtcatgcatacggaggctgaggatgtttccttacggttccgatcccagcgtgcatatggcattctgatggcaaccacttctagagactctgctgacaccctccgcctggagctagacgcaggacgtgtgaaactgacggtcaatctaggcaaaggtcccgagactctttttgctggctataacctcaatgataacgagtggcacacagtgcgtgtagttcggcgtggaaaaagtttaaagttaacagtggatgaccaacaggccatgacaggtcaaatggcaggtgatcatactaggctggagttccataacatagagactggcatcatcacagaacgacggtatctttcttctgtcccctccaacttcattggacacctgcagagcttgacatttaatggaatggcatacattgacctgtgtaaaaatggcgacatagattactgtgagcttaatgccagatttggcttcaggaacatcatagcagatcctgtcaccttcaagaccaaatcgagctatgttgccttagctaccttgcaagcctacacttctatgcatctttttttccagttcaagacaacatccctagatggattaattctatataacagtggggatggaaatgactttattgtggttgaattagttaaagggtacttacattacgtgtttgatttgggaaatggtgctaacctcatcaaaggaagctcaaataaacctctcaatgacaatcagtggcacaacgtgatgatatcaagggacaccagcaacctccacactgtaaagattgacacaaaaatcacaacgcaaatcaccgccggagccaggaacttagacctcaagagtgacttatatataggaggagtagctaaagaaacatacaaatccttaccaaaacttgtacatgccaaagaaggctttcaaggctgcctggcatcagttgatttaaatggacggcttccggacctcatctccgatgctcttttctgcaacggacagatcgagagaggatgtgaagggcccagcacaacctgccaagaggactcatgttccaatcaaggtgtgtgcttgcaacaatgggatggcttcagctgtgactgtagtatgacttccttcagtggaccactctgcaatgaccctgggacgacatatatctttagcaaaggtggtggacaaatcacgtataagtggcctcctaatgaccgacccagtacacgagcagacagactggccataggttttagcactgttcagaaagaagccgtattggtgcgagtggacagttcttcaggcttgggtgactacctagaactgcatataactcttcaatgatcagaatgcttttgtggaggcaactgctatgcttgaaagaacatagatggcctttgaagtataatatttgattcaaagtcaagttccgtcacatagtagctacggaatcataagcaaattatctaacatctgcaaccttctgtttccttattggaatccttgacctgcagtcattataatgaaatctggagccaatgatggatatatgaacctttggattcaatctttccaaacatatttctgactagaaggaatttggttttattttcatccagctaacgtgaaataaaattgtcctttcaaaat

SEQ ID NO: 14206 - DNA, 641 bp, Homo sapiens
  source 1..641: mol_type = unassigned DNA
gatttgggaaatggtgctaacctcatcaaaggaagctcaaataaacctctcaatgacaatcagtggcacaacgtgatgatatcaagggacaccagcaacctccacactgtaaagattgacacaaaaatcacaacgcaaatcaccgccggagccaggaacttagacctcaagagtgacttatatataggaggagtagctaaagaaacatacaaatccttaccaaaacttgtacatgccaaagaaggctttcaaggctgcctggcatcagttgatttaaatggacggcttccggacctcatctccgatgctcttttctgcaacggacagatcgagagaggatgtgaagttgcattgatgaaagctgacttgcaagggcccagcacaacctgccaagaggactcatgttccaatcaaggtgtgtgcttgcaacaatgggatggcttcagctgtgactgtagtatgacttccttcagtggaccactctgcaatgaccctgggacgacatatatctttagcaaaggtggtggacaaatcacgtataagtggcctcctaatgaccgacccagtacacgagcagacagactggccataggttttagcactgttcagaaagaagccgtattggtgcgagtggacagttc

SEQ ID NO: 14207 - DNA, 100 bp, Homo sapiens
  source 1..100: mol_type = unassigned DNA
atggaaggcagaagagaataaaggcattaaagaataacaggtcctaatccagctgggacgacatatatctttagcaaaggtggtggacaaatcacgtata

SEQ ID NO: 14208 - DNA, 100 bp, Homo sapiens
  source 1..100: mol_type = unassigned DNA
tcagctgtgactgtagtatgacttccttcagtggaccactctgcaatgaccgtaaattacttcctgcatttgttcctgcctcacagaaaatggcgtaaat

SEQ ID NO: 14209 - DNA, 100 bp, Homo sapiens
  source 1..100: mol_type = unassigned DNA
ttgcaacaatgggatggcttcagctgtgactgtagtatgacttccttcagtggaccactctgcaatgaccatatgtgcatcgcaatgtagaagatggggt

SEQ ID NO: 14210 - DNA, 360 bp, Homo sapiens
  source 1..360: mol_type = unassigned DNA
cgccggagccaggaacttagacctcaagagtgacttatatataggaggagtagctaaagaaacatacaaatccttaccaaaacttgtacatgccaaagaaggctttcaaggctgcctggcatcagttgatttaaatggacggcttccggacctcatctccgatgctcttttctgcaacggacagatcgagagaggatgtgaagggcccagcacaacctgccaagaggactcatgttccaatcaaggtgtgtgcttgcaacaatgggatggcttcagctgtgactgtagtatgacttccttcagtggaccactctgcaatgaccgtaagtacctctctgagtatggactgatactcatcgt

SEQ ID NO: 14211 - DNA, 574 bp, Homo sapiens
  source 1..574: mol_type = unassigned DNA
aagccaaacatctttgacatttaacaattctttacttcacttagatttgtcaccatgtagctttgtttgaattggccatttttaaaaccttctattgttgtttccaatggtaaacttttataacaaaacatctgggctttataagtatgtaaagaataatgatatggagtggccatatttgcatgtgtctgtccccggaagggtggactgtaattttattggatgtctgcagctattaccttgaaggatgaattttcatttttcatctattcttccccatctagattgtatcaggattaactgtaattccagcaaaggtcccgagactctttttgctggctataacctcaatgataacgagtggcacacagtgcgtgtagttcggcgtggaaaaagtttaaagttaacagtggatgaccaacaggccatgacaggtcaaatggcaggtgatcatactaggctggagttccataacatagagactggcatcatcacagaacgacggtatctttcttctgtcccctccaacttcattggacacctgcagagcttgacatttaatggaatggcatac

SEQ ID NO: 14212 - DNA, 490 bp, Homo sapiens
  source 1..490: mol_type = unassigned DNA
tgactgtgcctatttatgacagcaggttaattcacttgttatggatcaatgcgtaggattaaagattcttaaatggtcacacctgaatgtttgtaaaagttgtcattttccttgcttgctatgactctaatgggcttgaaaattggtccagcccgcctcttctctgtttcctttctctccctcctctctctctttcttcctttcttctttctctcctctctctccctcaccttccccccttgtctctttctctcactctctgtgaggttcatttgcttgactgattctgagtgtccataatgactgtttggcatattctacaggcaaaggtcccgagactctttttgctggctataacctcaatgataacgagtggcacacagtgcgtgtagttcggcgtggaaaaagtttaaagttaacagtggatgaccaacaggccatgacaggtcaaatggcaggtgatcatactaggctggagttccataacata

SEQ ID NO: 14213 - DNA, 506 bp, Homo sapiens
  source 1..506: mol_type = unassigned DNA
cagtaacaactttatgggctgtctcaaagaggttgtatataaaaataatgatgtgaggctggaattatctcgacttgccaagcaaggagatcctaagatgaagatccatggagtggtggcatttaaatgtgagaatgttgcaactttagacccaatcacctttgaaaccccagagtctttcatctctttgcctaaatggaatgcaaagaaaactggctccatatcatttgatttccgtacaacagagccaaatggcctcatcttatttagccatggcaagccaagacatcagaaagatgccaagcacccacagatgataaaggtggacttctttgctattgagatgctagatggccacctctacctcctcctggacatggggtcaggtactataaaaataaaagccctgttgaagaaagtgaatgatggagaatggtatcatgtggacttccagagagacggacggtcaggtcaaatggcaggtgatcatactaggctggagttcc

SEQ ID NO: 14214 - DNA, 100 bp, Homo sapiens
  source 1..100: mol_type = unassigned DNA
tgagcctccagtgtacacatcggacaggactgcacattccttaacttgacagcagtcactggaaagaacattcaatgaacaggcaaaggtcccgagactc

SEQ ID NO: 14215 - DNA, 100 bp, Homo sapiens
  source 1..100: mol_type = unassigned DNA
ggtaactcctttctgaggactgggatatgcaaccacagtaccatttctgtcaacacgttgcgtactccctacactgctcctggtgagagtgagattctgg

SEQ ID NO: 14216 - DNA, 100 bp, Homo sapiens
  source 1..100: mol_type = unassigned DNA
ttgagaaggagttgggagtgagtgtggagagaaggaaggtaccatttctgtcaacacgttgcgtactccctacactgctcctggtgagagtgagattctg

SEQ ID NO: 14217 - DNA, 100 bp, Homo sapiens
  source 1..100: mol_type = unassigned DNA
acttccagagagacggacggtcagacttcccctttgcctcttctctggtcccaccctcaacacaaaacagctgcccaggtaccatttctgtcaacacgtt

SEQ ID NO: 14218 - DNA, 100 bp, Homo sapiens
  source 1..100: mol_type = unassigned DNA
gttgaagaaagtgaatgatggagaatggtatcatgtggacttccagagagacggacggtcagacatttagggagcaggaaaatccatcaagaaggaaggt

SEQ ID NO: 14219 - DNA, 121 bp, Homo sapiens
  source 1..121: mol_type = unassigned DNA
tggacttccagagagacggacggtcagatcaagaagattgtgtttgcctgtttggaaatatgttttttacctaacaaaataaagaaatagaatatatggaaattgagaaggagttgggagt

SEQ ID NO: 14220 - DNA, 100 bp, Homo sapiens
  source 1..100: mol_type = unassigned DNA
taacaactttatgggctgtctcaaagagggagtgaaacaggcttacagagatttcccagttcggtaatgctggagccagaatttgaactcaggaagtcca

SEQ ID NO: 14221 - DNA, 1823 bp, Homo sapiens
  source 1..1823: mol_type = unassigned DNA
agaccactttcatgacttctggaagcaaatgtcctagtacagactcagcatcattactgcctagaaagtcaaggggtcttatggcttacattcttcctttggttcaactcacctcatcagtgggagaagactgttccttccaaatatccacctttctgtttgatctgtctagcatctcgtgagagccgccttgttactcctaaatctggaaaagaagaatatattgccacgttcaaaggatctgaatacttctgctacgacttgtctcaaaaccccattcaaagcagcagtgatgaaataactctgtcatttaaaacccttcagaggaatggactgatgcttcacactgggaaatcggctgattatgtcaatcttgccctgaaaaatggagctgtctctctggtcattaatttgggatcaggggcctttgaagcactagtggagcctgtgaatggaaagtttaatgataatgcctggcatgatgtgaaagtcaccaggaatctgcgtcaggtgacaatatcagtggatgggattcttaccacaacgggctacacgcaagaagattataccatgctggggtctgatgactttttctatgttggaggcagtcccagcacagccgaccttccagggtcaccagtcagtaacaactttatgggctgtctcaaagagattaaagaaaaaaaaggaaatcactcaacatattgaaacaacctataatctcatattccttagaagcaacttaggtctttccctatatggcatttaataatgtctatttgaaatgagactttgcttgcacgtagaacaactaaccctcaattggaaagttacttttgtgtatgtgattatcaaatttcaaaataaaataagattagctcaaaataatttggtaaaacctaacctgaacttcatatggtgctttgtttaaaatgacaaggaactttgaatggccgggaattcaaatagagatcaaagtagttttttttaaataattcatattttcatcacaagtaaatcaaagtctgggaaaatatctgtactcattgaaaaatgactcacaggtttaaatttgaaaaaaaagagttaaagaaaaattataaataataaattgccattatatgcagcccatacctatgaaattcttagaagataataggtctttaaaaaaatatgctttctaaatctgatttttgcaaaggcaacactgttttgacagaaatacttgtttatattatttgcattttgataacactgagtaagagctgaaatatatgttgcttaagaattttcgatcattttatatttaattaaattttctaacaagcagtttttgagtgactgctacaaaaggagaggaggttagaaaatcttgcagaaagagaaatcatggtgtctgagatgctcagactctatgaggacatcttgcccatttaccttagaccacttggaaagcattttcctgtagaaaagtcttacagttaattcttcaggtgctcactagatatattttaagaatctttaaagatagatgaaaatctcactagtatgtgtttctatcccaatattttcatcgtataagtgtttctgtagtcactgacctatcaggaagggtcatggcgctccctcattaatctccccctcagaacctgttcctgcaattattatgcatttcctggtctctttgtgcccccgaaatgctctgaaatgcttatttccctcctgcagagtgaacattatttaacgtagtttgttagtaaggaaatgaaactgaagaggtaggaaaggactgtgtgttaaataaaacaacctagaatccttta

SEQ ID NO: 14222 - DNA, 3243 bp, Homo sapiens
  source 1..3243: mol_type = unassigned DNA
ctgctcccctccgttgcctgttctcccctcccgcactcctggagatagacgctcaagcctgacgcctctgaaaaggcagcagcagtcgccttatccatagacctcaggaaattcgctttgaccgatgcatgcttcaggctctggctcgagctgaggggaataaccgggcagatgtctgagtccttaaaaaagacaagataaaaccaaaatgcatcaccaacacacaaccaattgatgtgctggcatcttagcttggccctgcagaggcagagagaaaagaagaggagctgttgcgatttccacatctaacagcttctggctatttcgcaactgctgggtttgagtcctactgttgccgtggctgaaaagagaagtaaaatccaacttgtgagaccacgcacaaggaattaggctttggctgcagcggtgctgaagcccatgctatgacagaagaagcaggcctttgaagctatcctcgggttaagaaatggtgccctaaagaggcaagcatccctttctccgttctgctgtaagacaccacatctgaaggagacagacttgaggcattcacaagcatccaaggatactggctcactgctggcttcctgtactttcttgagaaaagtgttttctttttactgactctcactgcttccttttggcctggtaccactggtggaacctggcagataatgggatttgaggagttaagtatctgttgacactgcagatactcttaaattagttaatcagactcaaatgggtcagtgctttcccttgatcttttgttgaagccttttccagaacgttgtctccaaagtgcatcctccctttggtctggaagttctgtggctaccctgtaccactggggtcaacgttttccagttggaagaggactacagggagagagggcggggttattggaagaagaagaagaaaaaaagaactagataaaggagggcacatccctctcactcccgcctttccccttacctttctgtctctcgggacccttatttcttcgtcacggtgtccaggaccattttgaccctgtcggccccggcacccccccgccgcaccccagccccgagcatggggacggcgctgctccagcgcgggggctgttttcttctgtgcctctcgctgctgctcctgggctgctgggcggagctgggcagcgggctggagtttccgggcgccgagggccaatggacgcgcttccccaagtggaacgcctgctgcgagagcgagatgagcttccagctcaagactcgcagcgcccgcggcctcgtgctctacttcgacgacgagggcttctgcgacttcctggagctgattctgacgcgcggcggccgcctgcagctcagcttctccatcttctgcgctgagcctgcgacgctcctggccgacacgccggttaacgacggcgcctggcacagcgtgcgcatccgccgccagttccgcaacaccacgctcttcatcgaccaggtggaggccaagtgggtggaggtcaagtccaagcgcagggacatgacggtgttcagcggccttttcgtcggggggctgcccccggaactgcgcgccgcggcgctcaagctcaccctggcctcggtgagggagcgggagcccttcaaggggtggattcgtgacgtgagggtcaactcctcgcaggtcctgcccgtggacagcggcgaggtgaagctggacgatgagccgcccaacagcggcgggggaagcccgtgcgaggcgggcgaggagggcgagggcggggtgtgcctcaacggaggtgtgtgctccgtggtggacgaccaggccgtgtgcgactgctcgcgaaccggcttccgcggcaaggactgcagccaaggaaaagaagaatatattgccacgttcaaaggatctgaatacttctgctacgacttgtctcaaaaccccattcaaagcagcagtgatgaaataactctgtcatttaaaacccttcagaggaatggactgatgcttcacactgggaaatcggctgattatgtcaatcttgccctgaaaaatggagctgtctctctggtcattaatttgggatcaggggcctttgaagcactagtggagcctgtgaatggaaagtttaatgataatgcctggcatgatgtgaaagtcaccaggaatctgcgtcaggtgacaatatcagtggatgggattcttaccacaacgggctacacgcaagaagattataccatgctggggtctgatgactttttctatgttggaggcagtcccagcacagccgaccttccagggtcaccagtcagtaacaactttatgggctgtctcaaagaggtaaatatcgttgccatcagaatcattcctaattcatggtctcatcatttcagatccagcatgaaagcacctttgctgaagacccgatgttccagagtcaaacggcacaactttaaattcaatattctactattgtttatgtaggattgggggagggaaacagctcatagatcattatgaaggaattaggttcctcttctttattagtctgtaagtaatttacatttgagatttgtgtggacagttgatattagctataaaagaaagtcaaacaaaaagagatactgggtctaaagttgagctaaatggtttacttgcttatttctacttaaatgccataggtgttatgcatacagtgatgacttttttgagtattaaaagaaaaaagaagaaaaagcaattagcctataggagaagcaacgactatgtaattcaaaacaaaactaaaacaaaataagtctatataatgacataattttcttcccttattttcaacacattctggaggaagtaaatgttatctggtgaatttacttgatatttatctgagcaagatcatcaaactaaatgacatcaataatttcatccctcattatcagctgtagttgtgtattgtaactttgtataagattggaatttgttgggttttggggagagaaagatgaagaagtccctgaatttcattttttaatgaatattttccataaaagctgtctttaaaaaaattcattcagacacaatccaatttctttgggctactggaaccagaggttcctcttacattgtatgcctacaatttaatggtgtagatttctaaacatcaaagttaaataactttgaattcactgttagccataggtgctgttggtaagcagtgatgtacttggtttattctgaagtaaataatttaatcat

SEQ ID NO: 14223 - DNA, 1164 bp, Homo sapiens
  source 1..1164: mol_type = unassigned DNA
gtgacttcttcagaccactttcatgacttctggaagcaaatgtcctagtacagactcaggaaaagaagaatatattgccacgttcaaaggatctgaatacttctgctacgacttgtctcaaaaccccattcaaagcagcagtgatgaaataactctgtcatttaaaacccttcagaggaatggactgatgcttcacactgggaaatcggctgattatgtcaatcttgccctgaaaaatggagctgtctctctggtcattaatttgggatcaggggcctttgaagcactagtggagcctgtgaatggaaagtttaatgataatgcctggcatgatgtgaaagtcaccaggaatctgcgtcaggtgacaatatcagtggatgggattcttaccacaacgggctacacgcaagaagattataccatgctggggtctgatgactttttctatgttggaggcagtcccagcacagccgaccttccagggtcaccaatccagcatgaaagcacctttgctgaagacccgatgttccagagtcaaacggcacaactttaaattcaatattctactattgtttatgtaggattgggggagggaaacagctcatagatcattatgaaggaattaggttcctcttctttattagtctgtaagtaatttacatttgagatttgtgtggacagttgatattagctataaaagaaagtcaaacaaaaagagatactgggtctaaagttgagctaaatggtttacttgcttatttctacttaaatgccataggtgttatgcatacagtgatgacttttttgagtattaaaagaaaaaagaagaaaaagcaattagcctataggagaagcaacgactatgtaattcaaaacaaaactaaaacaaaataagtctatataatgacataattttcttcccttattttcaacacattctggaggaagtaaatgttatctggtgaatttacttgatatttatctgagcaagatcatcaaactaaatgacatcaataatttcatccctcattatcagctgtagttgtgtattgtaactttgtataagattggaatttgttgggttttggggagagaaagatgaagaagtccctgaatttcattttttaatgaatattttccataaaagctgtctttaaaaaaatt

SEQ ID NO: 14224 - DNA, 796 bp, Homo sapiens
  source 1..796: mol_type = unassigned DNA
tcctctccaagaattcgtggtttagcaattccttctattctgaaaagaagaatatattgccacgttcaaaggatctgaatacttctgctacgacttgtctcaaaaccccattcaaagcagcagtgatgaaataactctgtcatttaaaacccttcagaggaatggactgatgcttcacactgggaaatcggctgattatgtcaatcttgccctgaaaaatggagctgtctctctggtcattaatttgggatcaggggcctttgaagcactagtggagcctgtgaatggaaagtttaatgataatgcctggcatgatgtgaaagtcaccaggaatctgcgtcaggtgacaatatcagtggatgggattcttaccacaacgggctacacgcaagaagattataccatgctggggtctgatgactttttctatgttggaggcagtcccagcacagccgaccttccagggtcaccaatccagcatgaaagcacctttgctgaagacccgatgttccagagtcaaacggcacaactttaaattcaatattctactattgtttatgtaggattgggggagggaaacagctcatagatcattatgaaggaattaggttcctcttctttattagtctgtaagtaatttacatttgagatttgtgtggacagttgatattagctataaaagaaagtcaaacaaaaagagatactgggtctaaagttgagctaaatggtttacttgcttatttctacttaaatgccataggtgttatgcatacagtgatgacttttttgagtatta

SEQ ID NO: 14225 - DNA, 574 bp, Homo sapiens
  source 1..574: mol_type = unassigned DNA
attaaccgacgttgaagataagtctgattccgttatggtttttcttctaatatagaagacaacaatgtggaaggtctggcgcacctgatgatgggcgaccaaggtaaaagtaaagaggactggctgaagttaagagtcttaaagagcagttggatttgcactgaccaatgaggtggaagaagagagaagctgattgatcccaaagaaagccaacacctagactgatgaatgtaatgtagctcattcataatgtcattttcctggatgtgctgaagtggctaaatgagcatagaagttatttctacattaacatggaaaagaagaatatattgccacgttcaaaggatctgaatacttctgctacgacttgtctcaaaaccccattcaaagcagcagtgatgaaataactctgtcatttaaaacccttcagaggaatggactgatgcttcacactgggaaatcggctgattatgtcaatcttgccctgaaaaatggagctgtctctctggtcattaatttgggatcaggggcctttgaagcactagtggagcctgtgaatggaaagtttaatgat

SEQ ID NO: 14226 - DNA, 518 bp, Homo sapiens
  source 1..518: mol_type = unassigned DNA
tcctcgcaggtcctgcccgtggacagcggcgaggtgaagctggacgatgagccgcccaacagcggcgggggaagcccgtgcgaggcgggcgaggagggcgagggcggggtgtgcctcaacggaggtgtgtgctccgtggtggacgaccaggccgtgtgcgactgctcgcgaaccggcttccgcggcaaggactgcagccaagaaataaaattcggtcttcagtgtgttttgccggtgctgttacatgacaatgaccaaggaaaatactgttgtataaatacagcaaagcctctaacagaaaaagacaacaatgtggaaggtctggcgcacctgatgatgggcgaccaaggtaaaagtaaagagaaacttgaaattttcagatggataaggaaggacttcactaatttctgactgcagactccagacatatcttcaataaagcaatgcaggagagctatctaatccattctaaattacatatattccctcaagtaagagaataaaaataatgtcactca

SEQ ID NO: 14227 - DNA, 100 bp, Homo sapiens
  source 1..100: mol_type = unassigned DNA
agaagagagaagctgattgatcccaaagaaagccaacacctagactgatgaatgttatggcagattggcatcctgtactttaaaagagatcactccttcc

SEQ ID NO: 14228 - DNA, 5078 bp, Homo sapiens
  source 1..5078: mol_type = unassigned DNA
cgcactcctggagatagacgctcaagcctgacgcctctgaaaaggcagcagcagtcgccttatccatagacctcaggaaattcgctttgaccgatgcatgcttcaggctctggctcgagctgaggggaataaccgggcagatgtctgagtccttaaaaaagacaagataaaaccaaaatgcatcaccaacacacaaccaattgatgtgctggcatcttagcttggccctgcagaggcagagagaaaagaagaggagctgttgcgatttccacatctaacagcttctggctatttcgcaactgctgggtttgagtcctactgttgccgtggctgaaaagagaagtaaaatccaacttgtgagaccacgcacaaggaattaggctttggctgcagcggtgctgaagcccatgctatgacagaagaagcaggcctttgaagctatcctcgggttaagaaatggtgccctaaagaggcaagcatccctttctccgttctgctgtaagacaccacatctgaaggagacagacttgaggcattcacaagcatccaaggatactggctcactgctggcttcctgtactttcttgagaaaagtgttttctttttactgactctcactgcttccttttggcctggtaccactggtggaacctggcagataatgggatttgaggagttaagtatctgttgacactgcagatactcttaaattagttaatcagactcaaatgggtcagtgctttcccttgatcttttgttgaagccttttccagaacgttgtctccaaagtgcatcctccctttggtctggaagttctgtggctaccctgtaccactggggtcaacgttttccagttggaagaggactacagggagagagggcggggttattggaagaagaagaagaaaaaaagaactagataaaggagggcacatccctctcactcccgcctttccccttacctttctgtctctcgggacccttatttcttcgtcacggtgtccaggaccattttgaccctgtcggccccggcacccccccgccgcaccccagccccgagcatggggacggcgctgctccagcgcgggggctgttttcttctgtgcctctcgctgctgctcctgggctgctgggcggagctgggcagcgggctggagtttccgggcgccgagggccaatggacgcgcttccccaagtggaacgcctgctgcgagagcgagatgagcttccagctcaagactcgcagcgcccgcggcctcgtgctctacttcgacgacgagggcttctgcgacttcctggagctgattctgacgcgcggcggccgcctgcagctcagcttctccatcttctgcgctgagcctgcgacgctcctggccgacacgccggttaacgacggcgcctggcacagcgtgcgcatccgccgccagttccgcaacaccacgctcttcatcgaccaggtggaggccaagtgggtggaggtcaagtccaagcgcagggacatgacggtgttcagcggccttttcgtcggggggctgcccccggaactgcgcgccgcggcgctcaagctcaccctggcctcggtgagggagcgggagcccttcaaggggtggattcgtgacgtgagggtcaactcctcgcaggtcctgcccgtggacagcggcgaggtgaagctggacgatgagccgcccaacagcggcgggggaagcccgtgcgaggcgggcgaggagggcgagggcggggtgtgcctcaacggaggtgtgtgctccgtggtggacgaccaggccgtgtgcgactgctcgcgaaccggcttccgcggcaaggactgcagccaagaagacaacaatgtggaaggtctggcgcacctgatgatgggcgaccaaggtaaaagtaaagattaattcaacaaatctatattctagagcagaaatacaatcatgactatgacatggcatccacagagtgttcatataacaaggaaatgaaaacatttgggcaagttagaatgaatgacagaatggaagtgctgtgagactggtacaaagtgaagtaggaattcagaaaaaggaaagcataacatcaatccaagtctgtcttatgtgaatatccccaccttgtgccatctgttggaggaattaaaaaaaaatctggaaaaaataatttaggaactttacattgcaatttcctatgtggagttaaatcctagttgtgcataaaatcggggttaagtctggacagtttatataactgatttacagtgtaaacttatgtttcctaaatttttatatctcaatataatcatggagcaattttctcaatttccccacttttctcttgtgtgagtagtgaattcaggggatctggaatgaagttttgtggattaatgtctttctttatgaaaaaaagactataaaaaaataaattcaagaacatcttcattattttgatttcttctttatgaattcttaaatattttctaactgtttaaatgtccagtgatagatgaatatatttcattaaaaaataattaacacatgtaaaaagaacatgccttttgataaccttcttcatcctcctctcaagtcctttctctcgaggtaagcactggtctcactttgtgatgtgtccttacagagttgatgttgatccttctgtgctccataacaactcagggtttggaaactgcaaaatcccttatcatgtgtacatgacaaaaatggcgaagtcagctggagacatgttagagaccactgctgtgggctggcagaatcacaatgaattaaacacgagtttactcattcttctcataggccatagtgcctcctatttttaattagtcatcctgtttcaaactttagagtcagtctgttacttgtgttttttacattcctaaacaaagatatgtcacctttaactggatatggttaagaataaactttgaatgaattatagttttctttggggcagctgaagatctgttattcaaagccaaccttacttttgctggttgtgggtagatggattcaaatagtcttcatgaaatttggatcacatttttttggggcttgaaatttgtcaatgatgttgttgttaggatcattgataatgctaattttattctcctttctatttagaatttaggtttatctgtttgccttgaatgaagtatgtcttttctcttttgttcttgtttcttttcctatgtatgtgtaactggtcacttcattccaataattgctttgattgtttatttatattttactttaatggcttatcagaaatgaatgactatttaaattacaaaaaagtcaaaatatgttatacatgaaaatcaagccataatagctggttaatagctcaggagcacaagttaataattatcagcgaatgttggcactttgattggaggcttgtacttttccttcataagtcatcataattgtaattacatatttgtatttgtgattatacttaatgctaacttttcctagtagagtgtaagctctatgagggcagaaagcttgtctttctctttgaccattgtatttccagaacatttttcttattgtatcttgaatttgcgattttcatgacttaaatgtatttgtttgggggcggtggtttcaactgtccattttaaagagtcaaatggacatttactgtttaattatccaggcttctcatgttactagaagagcaaaatattacaagtagaactgaaaagaatatagttacacattctgaaagtgcataagccttattctctttgtgaagagtagatcttaaattagtataatttataaaagtaataaagatagatttttctcaaaactaattgttaaagctaattgtaattgttaagacctggatacaactcttccacctgaactaattgatgagtaatatctaatattaccatgtgctttaaatttttatctatactgtcataccacaataatatttcattaaacttactcttataatagatttgatattattaatacttagaaaagaataaagcatttggtgtttttttaatacattttcttttgtctttgtcttagtccatttgggcttctatataaaaataccataaactgggtagcttgtaagtaacagaaacttatttctcaaacgtctggaggctgggaagtccaagaccaagggctgacacagtcggtgtccagtgagattttgcttcctggttcatagatcactaccttctctttgtgtcctcacttgaaagggagaaagagagctctctggagtgtcttttataaggacagcaatcccattcataaaggctctgccctcaggacctaatcaaatcccaaaatccccctctcctaatccgtcattttgtgggttcggatttcagtttatcaattttggaaagatacaacattcagatcacacagtttccatgatttttatttttataccattttcaagtcctgtgttgctatatagcgaatttgtctgtgaagtgcacaacttccagttactaaaatcctaatgcatatttgttttatgctttttaaaatatattttgctgtgatttctgatatagacctaatttggttattaaaatatgatatgtatcttcttctgtataaattcttaaattgtatttcctcatttagtttcataataataagtcatctgtttgttcagaaaagtttgtgaatgttgacagacccttactgttgaaatgcctgtgtttggtgcatatacaaactaagaagtaagaatatttgtttaaattttctactgtgttacctctactcttgcaatactggatccccttaactcacagccgcagaccgtgggaagaccggagtttcaccttataatatcagacattaaatatctacttttatctatacagtacacatagaaggctatgtgactatttagaattcaatgtttgtttactagttcatctttagcttacatgttcattagttctgagtagaaccaagaaaaactaattgaagagtatatgcttatgtattatctcttgctgtgatttaaccaatcttgttacatgtattactaataaaagtcccagcttgaatgta

SEQ ID NO: 14229 - DNA, 2832 bp, Homo sapiens
  source 1..2832: mol_type = unassigned DNA
ggtgttcagcggccttttcgtcggggggctgcccccggaactgcgcgccgcggcgctcaagctcaccctggcctcggtgagggagcgggagcccttcaaggggtggattcgtgacgtgagggtcaactcctcgcaggtcctgcccgtggacagcggcgaggtgaagctggacgatgagccgcccaacagcggcgggggaagcccgtgcgaggcgggcgaggagggcgagggcggggtgtgcctcaacggaggtgtgtgctccgtggtggacgaccaggccgtgtgcgactgctcgcgaaccggcttccgcggcaaggactgcagccaagaagacaacaatgtggaaggtctggcgcacctgatgatgggcgaccaaggtaaaagtaaagagttgatgttgatccttctgtgctccataacaactcagggtttggaaactgcaaaatcccttatcatgtgtacatgacaaaaatggcgaagtcagctggagacatgttagagaccactgctgtgggctggcagaatcacaatgaattaaacacgagtttactcattcttctcataggccatagtgcctcctatttttaattagtcatcctgtttcaaactttagagtcagtctgttacttgtgttttttacattcctaaacaaagatatgtcacctttaactggatatggttaagaataaactttgaatgaattatagttttctttggggcagctgaagatctgttattcaaagccaaccttacttttgctggttgtgggtagatggattcaaatagtcttcatgaaatttggatcacatttttttggggcttgaaatttgtcaatgatgttgttgttaggatcattgataatgctaattttattctcctttctatttagaatttaggtttatctgtttgccttgaatgaagtatgtcttttctcttttgttcttgtttcttttcctatgtatgtgtaactggtcacttcattccaataattgctttgattgtttatttatattttactttaatggcttatcagaaatgaatgactatttaaattacaaaaaagtcaaaatatgttatacatgaaaatcaagccataatagctggttaatagctcaggagcacaagttaataattatcagcgaatgttggcactttgattggaggcttgtacttttccttcataagtcatcataattgtaattacatatttgtatttgtgattatacttaatgctaacttttcctagtagagtgtaagctctatgagggcagaaagcttgtctttctctttgaccattgtatttccagaacatttttcttattgtatcttgaatttgcgattttcatgacttaaatgtatttgtttgggggcggtggtttcaactgtccattttaaagagtcaaatggacatttactgtttaattatccaggcttctcatgttactagaagagcaaaatattacaagtagaactgaaaagaatatagttacacattctgaaagtgcataagccttattctctttgtgaagagtagatcttaaattagtataatttataaaagtaataaagatagatttttctcaaaactaattgttaaagctaattgtaattgttaagacctggatacaactcttccacctgaactaattgatgagtaatatctaatattaccatgtgctttaaatttttatctatactgtcataccacaataatatttcattaaacttactcttataatagatttgatattattaatacttagaaaagaataaagcatttggtgtttttttaatacattttcttttgtctttgtcttagtccatttgggcttctatataaaaataccataaactgggtagcttgtaagtaacagaaacttatttctcaaacgtctggaggctgggaagtccaagaccaagggctgacacagtcggtgtccagtgagattttgcttcctggttcatagatcactaccttctctttgtgtcctcacttgaaagggagaaagagagctctctggagtgtcttttataaggacagcaatcccattcataaaggctctgccctcaggacctaatcaaatcccaaaatccccctctcctaatccgtcattttgtgggttcggatttcagtttatcaattttggaaagatacaacattcagatcacacagtttccatgatttttatttttataccattttcaagtcctgtgttgctatatagcgaatttgtctgtgaagtgcacaacttccagttactaaaatcctaatgcatatttgttttatgctttttaaaatatattttgctgtgatttctgatatagacctaatttggttattaaaatatgatatgtatcttcttctgtataaattcttaaattgtatttcctcatttagtttcataataataagtcatctgtttgttcagaaaagtttgtgaatgttgacagacccttactgttgaaatgcctgtgtttggtgcatatacaaactaagaagtaagaatatttgtttaaattttctactgtgttacctctactcttgcaatactggatccccttaactcacagccgcagaccgtgggaagaccggagtttcaccttataatatcagacattaaatatctacttttatctatacagtacacatagaaggctatgtgactatttagaattcaatgtttgtttactagttcatctttagcttacatgttcattagttctgagtagaaccaagaaaaactaattgaagagtatatgcttatgtattatctcttgctgtgatttaaccaatcttgttacatgtattactaataaaagtcccagcttgaa

SEQ ID NO: 14230 - DNA, 3651 bp, Homo sapiens
  source 1..3651: mol_type = unassigned DNA
gctcaagcctgacgcctctgaaaaggcagcagcagtcgccttatccatagacctcaggaaattcgctttgaccgatgcatgcttcaggctctggctcgagctgaggggaataaccgggcagatgtctgagtccttaaaaaagacaagataaaaccaaaatgcatcaccaacacacaaccaattgatgtgctggcatcttagcttggccctgcagaggcagagagaaaagaagaggagctgttgcgatttccacatctaacagcttctggctatttcgcaactgctgggtttgagtcctactgttgccgtggctgaaaagagaagtaaaatccaacttgtgagaccacgcacaaggaattaggctttggctgcagcggtgctgaagcccatgctatgacagaagaagcaggcctttgaagctatcctcgggttaagaaatggtgccctaaagaggcaagcatccctttctccgttctgctgtaagacaccacatctgaaggagacagacttgaggcattcacaagcatccaaggatactggctcactgctggcttcctgtactttcttgagaaaagtgttttctttttactgactctcactgcttccttttggcctggtaccactggtggaacctggcagataatgggatttgaggagttaagtatctgttgacactgcagatactcttaaattagttaatcagactcaaatgggtcagtgctttcccttgatcttttgttgaagccttttccagaacgttgtctccaaagtgcatcctccctttggtctggaagttctgtggctaccctgtaccactggggtcaacgttttccagttggaagaggactacagggagagagggcggggttattggaagaagaagaagaaaaaaagaactagataaaggagggcacatccctctcactcccgcctttccccttacctttctgtctctcgggacccttatttcttcgtcacggtgtccaggaccattttgaccctgtcggccccggcacccccccgccgcaccccagccccgagcatggggacggcgctgctccagcgcgggggctgttttcttctgtgcctctcgctgctgctcctgggctgctgggcggagctgggcagcgggctggagtttccgggcgccgagggccaatggacgcgcttccccaagtggaacgcctgctgcgagagcgagatgagcttccagctcaagactcgcagcgcccgcggcctcgtgctctacttcgacgacgagggcttctgcgacttcctggagctgattctgacgcgcggcggccgcctgcagctcagcttctccatcttctgcgctgagcctgcgacgctcctggccgacacgccggttaacgacggcgcctggcacagcgtgcgcatccgccgccagttccgcaacaccacgctcttcatcgaccaggtggaggccaagtgggtggaggtcaagtccaagcgcagggacatgacggtgttcagcggccttttcgtcggggggctgcccccggaactgcgcgccgcggcgctcaagctcaccctggcctcggtgagggagcgggagcccttcaaggggtggattcgtgacgtgagggtcaactcctcgcaggtcctgcccgtggacagcggcgaggtgaagctggacgatgagccgcccaacagcggcgggggaagcccgtgcgaggcgggcgaggagggcgagggcggggtgtgcctcaacggaggtgtgtgctccgtggtggacgaccaggccgtgtgcgactgctcgcgaaccggcttccgcggcaaggactgcagccaagaagacaacaatgtggaaggtctggcgcacctgatgatgggcgaccaaggtaaaagtaaagaaatgaatgactatttaaattacaaaaaagtcaaaatatgttatacatgaaaatcaagccataatagctggttaatagctcaggagcacaagttaataattatcagcgaatgttggcactttgattggaggcttgtacttttccttcataagtcatcataattgtaattacatatttgtatttgtgattatacttaatgctaacttttcctagtagagtgtaagctctatgagggcagaaagcttgtctttctctttgaccattgtatttccagaacatttttcttattgtatcttgaatttgcgattttcatgacttaaatgtatttgtttgggggcggtggtttcaactgtccattttaaagagtcaaatggacatttactgtttaattatccaggcttctcatgttactagaagagcaaaatattacaagtagaactgaaaagaatatagttacacattctgaaagtgcataagccttattctctttgtgaagagtagatcttaaattagtataatttataaaagtaataaagatagatttttctcaaaactaattgttaaagctaattgtaattgttaagacctggatacaactcttccacctgaactaattgatgagtaatatctaatattaccatgtgctttaaatttttatctatactgtcataccacaataatatttcattaaacttactcttataatagatttgatattattaatacttagaaaagaataaagcatttggtgtttttttaatacattttcttttgtctttgtcttagtccatttgggcttctatataaaaataccataaactgggtagcttgtaagtaacagaaacttatttctcaaacgtctggaggctgggaagtccaagaccaagggctgacacagtcggtgtccagtgagattttgcttcctggttcatagatcactaccttctctttgtgtcctcacttgaaagggagaaagagagctctctggagtgtcttttataaggacagcaatcccattcataaaggctctgccctcaggacctaatcaaatcccaaaatccccctctcctaatccgtcattttgtgggttcggatttcagtttatcaattttggaaagatacaacattcagatcacacagtttccatgatttttatttttataccattttcaagtcctgtgttgctatatagcgaatttgtctgtgaagtgcacaacttccagttactaaaatcctaatgcatatttgttttatgctttttaaaatatattttgctgtgatttctgatatagacctaatttggttattaaaatatgatatgtatcttcttctgtataaattcttaaattgtatttcctcatttagtttcataataataagtcatctgtttgttcagaaaagtttgtgaatgttgacagacccttactgttgaaatgcctgtgtttggtgcatatacaaactaagaagtaagaatatttgtttaaattttctactgtgttacctctactcttgcaatactggatccccttaactcacagccgcagaccgtgggaagaccggagtttcaccttataatatcagacattaaatatctacttttatctatacagtacacatagaaggctatgtgactatttagaattcaatgtttgtttactagttcatctttagcttacatgttcattagttctgagtagaaccaagaaaaactaattgaagagtatatgcttatgtattatctcttgctgtgatttaaccaatcttgttacatgtatta

SEQ ID NO: 14231 - DNA, 2543 bp, Homo sapiens
  source 1..2543: mol_type = unassigned DNA
ctctctctctctctctctctctctctttctttctttccgatggggaagagagggtggtgacaagttagaagcgcttgcggaaggtccccgcccccaggatcaggctccccctgcaaggggacgatgcaaaggtaaaagcacctcgctccgcagcatccagacctggaggggctgcgaccacgggccgagcccacccattccccagccaaaggacgggcccgccgctctccatggtactgcggagagctcagctccgcccttctctttcagaaggacagcacccggcgtcacgtaacccagccttctcaggctccaccaccgccttttccttcccagctctttccctctcctccccctcctcctccttctcctcctcctcctcctcctgctcccctccgttgcctgttctcccctcccgcactcctggagatagacgctcaagcctgacgcctctgaaaaggcagcagcagtcgccttatccatagacctcaggaaattcgctttgaccgatgcatgcttcaggctctggctcgagctgaggggaataaccgggcagatgtctgagtccttaaaaaagacaagataaaaccaaaatgcatcaccaacacacaaccaattgatgtgctggcatcttagcttggccctgcagaggcagagagaaaagaagaggagctgttgcgatttccacatctaacagcttctggctatttcgcaactgctgggtttgagtcctactgttgccgtggctgaaaagagaagtaaaatccaacttgtgagaccacgcacaaggaattaggctttggctgcagcggtgctgaagcccatgctatgacagaagaagcaggcctttgaagctatcctcgggttaagaaatggtgccctaaagaggcaagcatccctttctccgttctgctgtaagacaccacatctgaaggagacagacttgaggcattcacaagcatccaaggatactggctcactgctggcttcctgtactttcttgagaaaagtgttttctttttactgactctcactgcttccttttggcctggtaccactggtggaacctggcagataatgggatttgaggagttaagtatctgttgacactgcagatactcttaaattagttaatcagactcaaatgggtcagtgctttcccttgatcttttgttgaagccttttccagaacgttgtctccaaagtgcatcctccctttggtctggaagttctgtggctaccctgtaccactggggtcaacgttttccagttggaagaggactacagggagagagggcggggttattggaagaagaagaagaaaaaaagaactagataaaggagggcacatccctctcactcccgcctttccccttacctttctgtctctcgggacccttatttcttcgtcacggtgtccaggaccattttgaccctgtcggccccggcacccccccgccgcaccccagccccgagcatggggacggcgctgctccagcgcgggggctgttttcttctgtgcctctcgctgctgctcctgggctgctgggcggagctgggcagcgggctggagtttccgggcgccgagggccaatggacgcgcttccccaagtggaacgcctgctgcgagagcgagatgagcttccagctcaagactcgcagcgcccgcggcctcgtgctctacttcgacgacgagggcttctgcgacttcctggagctgattctgacgcgcggcggccgcctgcagctcagcttctccatcttctgcgctgagcctgcgacgctcctggccgacacgccggttaacgacggcgcctggcacagcgtgcgcatccgccgccagttccgcaacaccacgctcttcatcgaccaggtggaggccaagtgggtggaggtcaagtccaagcgcagggacatgacggtgttcagcggccttttcgtcggggggctgcccccggaactgcgcgccgcggcgctcaagctcaccctggcctcggtgagggagcgggagcccttcaaggggtggattcgtgacgtgagggtcaactcctcgcaggtcctgcccgtggacagcggcgaggtgaagctggacgatgagccgcccaacagcggcgggggaagcccgtgcgaggcgggcgaggagggcgagggcggggtgtgcctcaacggaggtgtgtgctccgtggtggacgaccaggccgtgtgcgactgctcgcgaaccggcttccgcggcaaggactgcagccaagacaacaatgtggaaggtctggcgcacctgatgatgggcgaccaaggtaaaagtaaagattaattcaacaaatctatattctagagcagaaatacaatcatgactatgacatggcatccacagagtgttcatataacaaggaaatgaaaacatttgggcaagttagaatgaatgacagaatggaagtgctgtgagactggtacaaagtgaagtaggaattcagaaaaaggaaagcataacatcaatccaagtctgtcttatgtgaatatccccaccttgtgccatctgttggagg

SEQ ID NO: 14232 - DNA, 464 bp, Homo sapiens
  source 1..464: mol_type = unassigned DNA
ccccggaactgcgcgccgcggcgctcaagctcaccctggcctcggtgagggagcgggagcccttcaaggggtggattcgtgacgtgagggtcaactcctcgcaggtcctgcccgtggacagcggcgaggtgaagctggacgatgagccgcccaacagcggcgggggaagcccgtgcgaggcgggcgaggagggcgagggcggggtgtgcctcaacggaggtgtgtgctccgtggtggacgaccaggccgtgtgcgactgctcgcgaaccggcttccgcggcaaggactgcagccaaggtctggcgcacctgatgatgggcgaccaaggtatgggctctgttccttttccactctgctttcagtgttttcttgttctgtagctgctttcaaaccatcactgcaaaggatgggcaaatgcttgcaaattatatggctgcaaattaaatacatatcttttgttcaca

SEQ ID NO: 14233 - DNA, 100 bp, Homo sapiens
  source 1..100: mol_type = unassigned DNA
tggtggacgaccaggccgtgtgcgactgctcgcgaaccggcttccgcggcaaggactgcagccaagctggtgtgagccaactacacataaactccaggtg

SEQ ID NO: 14234 - DNA, 1246 bp, Homo sapiens
  source 1..1246: mol_type = unassigned DNA
actctacaattctttggcagttagggaaggcgttctaatgttggaagaagtgttttaactttaaattgaagatgagaattagcaagagtttatcaagtggattaagaaagaaaggccataccatgcagagggactggaccctgaaaaatcaaggaggactgacagaactccataaatcaaagatatgttaataatttaggacatatggatattgttcaaaacattttatgagcaatgatattcaaagagaaaaaaaaaatactccgtttcctcactgaggacccaggaggcatttaaccaagttatttttgtcgtggtgtgaagctgaagtgagcgcaaataacatcccatgcggaagaacttccacaagaagaaatccaaaggttcactaggcacaatcaattttccaatcaattaaacttgagatgtctgagtccttaaaaaagacaagataaaaccaaaatgcatcaccaacacacaaccaattgatgtgctggcatcttagcttggccctgcagaggcagagagaaaagaagaggagctgttgcgatttccacatctaacagcttctggctatttcgcaactgctgggtttgagtcctactgttgccgtggctgaaaagagaagtaaaatccaacttgtgagaccacgcacaaggaattaggctttggctgcagcggtgctgaagcccatgctatgacagaagaagcaggcctttgaagctatcctcgggttaagaaatggtgccctaaagaggcaagcatccctttctccgttctgctgtaagacaccacatctgaaggagacagacttgaggcattcacaagcatccaaggatactggctcactgctggcttcctgtactttcttgagaaaagtgttttctttttactgactctcactgcttccttttggcctggtaccactggtggaacctggcagataatgggatttgaggagttaagtatctgttgacactgcagatactcttaaattagttaatcagactcaaatgggtcagtgctttcccttgatcttttgttgaagccttttccagaacgttgtctccaaagtgcatcctccctttggtctggaagttctgtggctaccctgtaccactggggtcaacgttttccagttggaagaggactacagggagagagggcggggttattggaagaagaagaagaaaaaaagaactagataaaggagggcacatccctctcactcccgcctttcccctta

SEQ ID NO: 14235 - DNA, 94 bp, Homo sapiens
  source 1..94: mol_type = unassigned DNA
gaagcgcttgcggaaggtccccgcccccaggatcaggctccccctgcaaggggacgatgcaaagatgtctgagtccttaaaaaagacaagataa

SEQ ID NO: 14236 - DNA, 100 bp, Homo sapiens
  source 1..100: mol_type = unassigned DNA
gacaggctgcagtaaaaagcaccttgtcagacacagttgatcgtcgtctgcaagttggcatcttaccctgatgtctgagtccttaaaaaagacaagataa

SEQ ID NO: 14237 - DNA, 100 bp, Homo sapiens
  source 1..100: mol_type = unassigned DNA
ccaggatcaggctccccctgcaaggggacgatgcaaagaaggacagcacccggcgtcacgtaacccagccttctcaggctccaccaccgccttttccttc

SEQ ID NO: 14238 - DNA, 715 bp, Homo sapiens
  source 1..715: mol_type = unassigned DNA
agatccaggaagctatgagaatgccctctgatgtctacggatggtgagtcaacaaaagaaagtcaagaacctgaaccagcccaccaacaacaatgaaaagtcagcagtctgcaacctggaagagggtcctcaccagaacctgaccaggctggcacacccatctcagacttccagcctccagaggcatttaaccaagttatttttgtcgtggtgtgaagctgaagtgagcgcaaataacatcccatgcggaagaacttccacaagaagaaatccaaaggttcactaggcacaatcaattttccaatcaattaaacttgaggttttaccagctgcaaaagggaggaggagacggagggaagagttaaacaggtagaaaacttggttcaagacagagcacagaaggctggagaatgacgacaggctgcagtaaaaagcaccttgtcagacacagttgatcgtcgtctgcaagttggcatcttaccctggtgggttccttttacatctttttggcacagcctaggcaagtcatgaagatttgttgtgattacccaaggcagagccacagtaaggggtggggcaagggacatcggatctagaagaatgccagtgcctgtgtgagtcttgcttgcccctgcattcctcgaaaagctgcagcttcttttcaagggttccgagcaggagaccaaggtgcacaagtaaagccagagctcatcat

SEQ ID NO: 14239 - DNA, 789 bp, Homo sapiens
  source 1..789: mol_type = unassigned DNA
agatccaggaagctatgagaatgccctctgatgtctacggatggtgagtcaacaaaagaaagtcaagaacctgaaccagcccaccaacaacaatgaaaagtcagcagtctgcaacctggaagagggtcctcaccagaacctgaccaggctggcacacccatctcagacttccagcctccagaggctggtctgcgatttgctttggctgacagaatatgatgaagtgatgttatatgggttccttactcagcctttaagtggacttgcagctactgctctctactccacactgctaccaccatctgaagaaccctacagtaggagacacttggcccagataatcacaaagaaaaagagtatgcagtgagaaggacaagtctcataaccacatgttgttaatgaagaagctgaggcaccaagcgacttaaggatttgaccaaaatcagacagcagcagattcaaagataatgccagctcctcatcttcgtttctggtgctgtttacaccgtgatacttcaacactgaaagaaacacctatcaattctcgtacaactttaaagatgcattcttactgtctcgaggcatcctctaattttgtgttcctatttgcttcatctagtttaggttattaactcctaaaggctagggcatacattttgaaatttttttttctcaggacattaggaaccttaataaattacttttgatggttactttccacaaggcaagacttttaaaatcccaagctcctgtttttttctagtaaaaataataaagtttatatcccat

SEQ ID NO: 14240 - DNA, 736 bp, Homo sapiens
  source 1..736: mol_type = unassigned DNA
acggatggtgagtcaacaaaaggtacaatttgagaactccctcttggtgactaggatataaaagaaagtcaagaacctgaaccagcccaccaacaacaatgaaaagtcagcagtctgcaacctggaagagggtcctcaccagaacctgaccaggctggcacacccatctcagacttccagcctccagaggctggtctgcgatttgctttggctgacagaatatgatgaagtgatgttatatgggttccttactcagcctttaagtggacttgcagctactgctctctactccacactgctaccaccatctgaagaaccctacagtaggagacacttggcccagataatcacaaagaaaaagagtatgcagtgagaaggacaagtctcataaccacatgttgttaatgaagaagctgaggcaccaagcgacttaaggatttgaccaaaatcagacagcagcagattcaaagataatgccagctcctcatcttcgtttctggtgctgtttacaccgtgatacttcaacactgaaagaaacacctatcaattctcgtacaactttaaagatgcattcttactgtctcgaggcatcctctaattttgtgttcctatttgcttcatctagtttaggttattaactcctaaaggctagggcatacattttgaaatttttttttctcaggacattaggaaccttaataaattacttttgatggttactttccacaaggcaaga

SEQ ID NO: 14241 - DNA, 754 bp, Homo sapiens
  source 1..754: mol_type = unassigned DNA
gtctacggatggtgagtcaacaaaagaaagtcaagaacctgaaccagcccaccaacaacaatgaaaagtcagcagtctgcaacctggaagagggtcctcaccagaacctgaccaggctggcacacccatctcagacttccagcctccagaggctggtctgcgatttgctttggctgacagaatatgatgaagtgatgttatatgggttccttactcagcctttaagtggacttgcagctactgctctctactccacactgctaccaccatctgaagaaccctacagtaggagacacttggcccagataagtaagatcaattcacatcatggaaccccaggatttgaaccacaggataactgcagtcacaggttcacaaagaaaaagagtatgcagtgagaaggacaagtctcataaccacatgttgttaatgaagaagctgaggcaccaagcgacttaaggatttgaccaaaatcagacagcagcagattcaaagataatgccagctcctcatcttcgtttctggtgctgtttacaccgtgatacttcaacactgaaagaaacacctatcaattctcgtacaactttaaagatgcattcttactgtctcgaggcatcctctaattttgtgttcctatttgcttcatctagtttaggttattaactcctaaaggctagggcatacattttgaaatttttttttctcaggacattaggaaccttaataaattacttttgatggttactttccacaa

SEQ ID NO: 14242 - DNA, 637 bp, Homo sapiens
  source 1..637: mol_type = unassigned DNA
acaatgaaaagtcagcagtctgcaacctggaagagggtcctcaccagaacctgaccaggctggcacacccatctcagacttccagcctccagagttttcaaatttaggctggtctgcgatttgctttggctgacagaatatgatgaagtgatgttatatgggttccttactcagcctttaagtggacttgcagctactgctctctactccacactgctaccaccatctgaagaaccctacagtaggagacacttggcccagataatcacaaagaaaaagagtatgcagtgagaaggacaagtctcataaccacatgttgttaatgaagaagctgaggcaccaagcgacttaaggatttgaccaaaatcagacagcagcagattcaaagataatgccagctcctcatcttcgtttctggtgctgtttacaccgtgatacttcaacactgaaagaaacacctatcaattctcgtacaactttaaagatgcattcttactgtctcgaggcatcctctaattttgtgttcctatttgcttcatctagtttaggttattaactcctaaaggctagggcatacattttgaaatttttttttctcaggacattaggaaccttaataaattacttttgatggtta

SEQ ID NO: 14243 - DNA, 736 bp, Homo sapiens
  source 1..736: mol_type = unassigned DNA
agaaacagcccagatccaggaagctatgagaatgccctctgatgtctacggatgaaagtcaagaacctgaaccagcccaccaacaacaatgaaaagtcagcagtctgcaacctggaagagggtcctcaccagaacctgaccaggctggcacacccatctcagacttccagcctccagagtatgaccatcttagttttcaaatttaggctggtctgcgatttgctttggctgacagaatatgatgaagtgatgttatatgggttccttactcagcctttaagtggacttgcagctactgctctctactccacactgctaccaccatctgaagaaccctacagtaggagacacttggcccagataatcacaaagaaaaagagtatgcagtgagaaggacaagtctcataaccacatgttgttaatgaagaagctgaggcaccaagcgacttaaggatttgaccaaaatcagacagcagcagattcaaagataatgccagctcctcatcttcgtttctggtgctgtttacaccgtgatacttcaacactgaaagaaacacctatcaattctcgtacaactttaaagatgcattcttactgtctcgaggcatcctctaattttgtgttcctatttgcttcatctagtttaggttattaactcctaaaggctagggcatacattttgaaatttttttttctcaggacattaggaaccttaataaattacttttgatggtta

SEQ ID NO: 14244 - DNA, 1857 bp, Homo sapiens
  source 1..1857: mol_type = unassigned DNA
agccctggaaatctgggagcagccacccgctccgcgcttgctgttcccggggctgcctttccggacaagcccctctccagctgcattcgcctcggctatgtttcggattgtttggggtgctaggcacggcggactccaggaccccgagaagactgtccgaaggagggagaggatgggtgccctggcgcggtgaggcggccggcccctcagcccactccgcgccgcccgctcccctgcgccctctcctctccccgcgccccaaactttgcctcccgcggcggctgcccctcggcgggcgccccgccatgtaccagaggatgctccgctttggatagtcccgctcaccctcagcggcctcctaggagtggcgtggggggcatccagtttgggagcgcaccacatccaccatttccatggcagcagcaagcatcattcagtgcctattgcaatctacaggtcaccggcatccttgcgaggcggacacgctgggacgacatatatctttagcaaaggtggtggacaaatcacgtataagtggcctcctaatgaccgacccagtacacgagcagacagactggccataggttttagcactgttcagaaagaagccgtattggtgcgagtggacagttcttcaggcttgggtgactacctagaactgcatatacaccagggaaaaattggagttaagtttaatgttgggacagatgacatcgccattgaagaatccaatgcaatcattaatgatgggaaataccatgtagttcgtttcacgaggagtggtggcaatgccacgttgcaggtggacagctggccagtgatcgagcgctaccctgcagggcgtcagctcacaatcttcaatagccaagcaaccataataattggcgggaaagagcagggccagcccttccagggccagctctctgggctgtactacaatggcttgaaagttctgaatatggcagccgaaaacgatgccaacatcgccatagtgggaaatgtgagactggttggtgaagtgccttcctctatgacaactgagtcaacagccactgccatgcaatcagagatgtccacatcaattatggagactaccacgaccctggctactagcacagccagaagaggaaagcccccgacaaaagaacccattagccagaccacagatgacatccttgtggcctcagcagagtgtcccagcgatgatgaggacattgacccctgtgagccgagctcaggtgggttagccaacccaacccgagcaggcggcagagagccgtatccaggctcagcagaagtgatccgggagtccagcagcaccacgggtatggtcgttgggatagtagccgctgccgccctgtgcatccttatcctcctctatgccatgtacaagtacagaaaccgggatgaaggctcataccatgtggacgagagtcgaaactacatcagtaactcagcacagtccaatggggctgttgtaaaggagaaacaacccagcagtgcgaaaagctccaacaaaaataagaaaaacaaggataaagagtattatgtctgatcccaagatcttaaatggacacttgtatagaaatagtcttcattttatctgagacataatataaacttatttactttcctttttatgaagcacatacaaaagaagacagggaatgcaatcaggaaggaaagactttttaaaaaataaaaacaagtatctcatgctcttgtttctcaaaaaagaaaaacaaaaaacaaaaaacaggggccaataaattccctaacatccacagtgttttcatttactctgcttgtctttatgttgctggaacatttctaaaagacagtgatgaccgcacgcat

SEQ ID NO: 14245 - DNA, 2553 bp, Homo sapiens
  source 1..2553: mol_type = unassigned DNA
ggaaaagaagaatatattgccacgttcaaaggatctgaatacttctgctacgacttgtctcaaaaccccattcaaagcagcagtgatgaaataactctgtcatttaaaacccttcagaggaatggactgatgcttcacactgggaaatcggctgattatgtcaatcttgccctgaaaaatggagctgtctctctggtcattaatttgggatcaggggcctttgaagcactagtggagcctgtgaatggaaagtttaatgataatgcctggcatgatgtgaaagtcaccaggaatctgcgtcagcactcaggcattggacacgctatggtaaacaaactacattgttcggtgacaatatcagtggatgggattcttaccacaacgggctacacgcaagaagattataccatgctggggtctgatgactttttctatgttggaggcagtcccagcacagccgaccttccagggtcaccagtcagtaacaactttatgggctgtctcaaagaggttgtatataaaaataatgatgtgaggctggaattatctcgacttgccaagcaaggagatcctaagatgaagatccatggagtggtggcatttaaatgtgagaatgttgcaactttagacccaatcacctttgaaaccccagagtctttcatctctttgcctaaatggaatgcaaagaaaactggctccatatcatttgatttccgtacaacagagccaaatggcctcatcttatttagccatggcaagccaagacatcagaaagatgccaagcacccacagatgataaaggtggacttctttgctattgagatgctagatggccacctctacctcctcctggacatggggtcaggtactataaaaataaaagccctgttgaagaaagtgaatgatggagaatggtatcatgtggacttccagagagacggacggtcaggtaccatttctgtcaacacgttgcgtactccctacactgctcctggtgagagtgagattctggacctggatgatgagttgtacctgggggggctgccagaaaataaagctggccttgtcttccccaccgaggtgtggactgctctgctcaactatggctacgtgggctgcatcagggatttgttcatcgatggccaaagcaaagatatccggcaaatggctgaagttcaaagtactgctggagtgaagccttcctgctcaaaggaaacagcaaaaccgtgccttagcaacccttgcaaaaacaatggcatgtgcagggatgggtggaacagatatgtctgtgattgttccggaacaggctatcttggcaggtcctgtgagagagaggcaacggttttgagctatgatgggagcatgtttatgaaaattcagctccccgtagtcatgcatacggaggctgaggatgtttccttacggttccgatcccagcgtgcatatggcattctgatggcaaccacttctagagactctgctgacaccctccgcctggagctagacgcaggacgtgtgaaactgacggtcaatctagattgtatcaggattaactgtaattccagcaaaggtcccgagactctttttgctggctataacctcaatgataacgagtggcacacagtgcgtgtagttcggcgtggaaaaagtttaaagttaacagtggatgaccaacaggccatgacaggtcaaatggcaggtgatcatactaggctggagttccataacatagagactggcatcatcacagaacgacggtatctttcttctgtcccctccaacttcattggacacctgcagagcttgacatttaatggaatggcatacattgacctgtgtaaaaatggcgacatagattactgtgagcttaatgccagatttggcttcaggaacatcatagcagatcctgtcaccttcaagaccaaatcgagctatgttgccttagctaccttgcaagcctacacttctatgcatctttttttccagttcaagacaacatccctagatggattaattctatataacagtggggatggaaatgactttattgtggttgaattagttaaagggtacttacattacgtgtttgatttgggaaatggtgctaacctcatcaaaggaagctcaaataaacctctcaatgacaatcagtggcacaacgtgatgatatcaagggacaccagcaacctccacactgtaaagattgacacaaaaatcacaacgcaaatcaccgccggagccaggaacttagacctcaagagtgacttatatataggaggagtagctaaagaaacatacaaatccttaccaaaacttgtacatgccaaagaaggctttcaaggctgcctggcatcagttgatttaaatggacggcttccggacctcatctccgatgctcttttctgcaacggacagatcgagagaggatgtgaagggcccagcacaacctgccaagaggactcatgttccaatcaaggtgtgtgcttgcaacaatgggatggcttcagctgtgactgtagtatgacttccttcagtggaccactctgcaatgac

SEQ ID NO: 14246 - DNA, 2508 bp, Homo sapiens
  source 1..2508: mol_type = unassigned DNA
ggaaaagaagaatatattgccacgttcaaaggatctgaatacttctgctacgacttgtctcaaaaccccattcaaagcagcagtgatgaaataactctgtcatttaaaacccttcagaggaatggactgatgcttcacactgggaaatcggctgattatgtcaatcttgccctgaaaaatggagctgtctctctggtcattaatttgggatcaggggcctttgaagcactagtggagcctgtgaatggaaagtttaatgataatgcctggcatgatgtgaaagtcaccaggaatctgcgtcaggtgacaatatcagtggatgggattcttaccacaacgggctacacgcaagaagattataccatgctggggtctgatgactttttctatgttggaggcagtcccagcacagccgaccttccagggtcaccagtcagtaacaactttatgggctgtctcaaagaggttgtatataaaaataatgatgtgaggctggaattatctcgacttgccaagcaaggagatcctaagatgaagatccatggagtggtggcatttaaatgtgagaatgttgcaactttagacccaatcacctttgaaaccccagagtctttcatctctttgcctaaatggaatgcaaagaaaactggctccatatcatttgatttccgtacaacagagccaaatggcctcatcttatttagccatggcaagccaagacatcagaaagatgccaagcacccacagatgataaaggtggacttctttgctattgagatgctagatggccacctctacctcctcctggacatggggtcaggtactataaaaataaaagccctgttgaagaaagtgaatgatggagaatggtatcatgtggacttccagagagacggacggtcaggtaccatttctgtcaacacgttgcgtactccctacactgctcctggtgagagtgagattctggacctggatgatgagttgtacctgggggggctgccagaaaataaagctggccttgtcttccccaccgaggtgtggactgctctgctcaactatggctacgtgggctgcatcagggatttgttcatcgatggccaaagcaaagatatccggcaaatggctgaagttcaaagtactgctggagtgaagccttcctgctcaaaggaaacagcaaaaccgtgccttagcaacccttgcaaaaacaatggcatgtgcagggatgggtggaacagatatgtctgtgattgttccggaacaggctatcttggcaggtcctgtgagagagaggcaacggttttgagctatgatgggagcatgtttatgaaaattcagctccccgtagtcatgcatacggaggctgaggatgtttccttacggttccgatcccagcgtgcatatggcattctgatggcaaccacttctagagactctgctgacaccctccgcctggagctagacgcaggacgtgtgaaactgacggtcaatctagattgtatcaggattaactgtaattccagcaaaggtcccgagactctttttgctggctataacctcaatgataacgagtggcacacagtgcgtgtagttcggcgtggaaaaagtttaaagttaacagtggatgaccaacaggccatgacaggtcaaatggcaggtgatcatactaggctggagttccataacatagagactggcatcatcacagaacgacggtatctttcttctgtcccctccaacttcattggacacctgcagagcttgacatttaatggaatggcatacattgacctgtgtaaaaatggcgacatagattactgtgagcttaatgccagatttggcttcaggaacatcatagcagatcctgtcaccttcaagaccaaatcgagctatgttgccttagctaccttgcaagcctacacttctatgcatctttttttccagttcaagacaacatccctagatggattaattctatataacagtggggatggaaatgactttattgtggttgaattagttaaagggtacttacattacgtgtttgatttgggaaatggtgctaacctcatcaaaggaagctcaaataaacctctcaatgacaatcagtggcacaacgtgatgatatcaagggacaccagcaacctccacactgtaaagattgacacaaaaatcacaacgcaaatcaccgccggagccaggaacttagacctcaagagtgacttatatataggaggagtagctaaagaaacatacaaatccttaccaaaacttgtacatgccaaagaaggctttcaaggctgcctggcatcagttgatttaaatggacggcttccggacctcatctccgatgctcttttctgcaacggacagatcgagagaggatgtgaagggcccagcacaacctgccaagaggactcatgttccaatcaaggtgtgtgcttgcaacaatgggatggcttcagctgtgactgtagtatgacttccttcagtggaccactctgcaatgac

SEQ ID NO: 14247 - DNA, 3232 bp, Homo sapiens
  source 1..3232: mol_type = unassigned DNA
ttttctaaaaaccaaaccaaaacaacaaactcagagggttaaaccgacccccagatccactaaaaacaaacagaacagcccaaccccacccagctgggaattctgaggtgtcatactggagtgtggggtgagattggagctggagcgggttttattggctgtcagtgagcgaagcaaggtccctttaacattttccacttctgtgcttgcatgtccaggtggggaggaagggctcggcttaacagggcctggtcccaggcagtgctgggccttggcagtccgggagaagagaggggatcctggccaggggtcagaaggcctggttgtaggtgggaggtcagcctgggcaggttgctgcttccacacaccatcactctgtctcacctccttctctgctctcacacgcaccgactccaccttggcctggcagctacctcctctgtctctgcctctttgtctcctctatctgcctcttccaggggctccatggcttcagggcttggggctggacactggggcaggatgtttggggaagcagagggagaagatggggatggactgagggaagaggatgaagaggggagatgaccttggagctggagaggagagggaatggggaaggtgggaaggcttgcacatggtggggaggagggactgggctccccttccccagcccatgtgtaccctgggtgccctccccttctggggtccccacctggctgggctaggggctgtggctgacaaggactttccctttggctttctgccccttcctcatttctccccgtcccctcctcccttactggctttctcctccattcctctttcctctccttggcttccttcttttcttccttcccttcctggtctcccctcactgcctgccccttctctgtcacccccttccactcctgcaaggccgccagctgaccatcttcaacagccaggctgccatcaagatcgggggccgggatcagggccgccccttccagggccaggtgtccggcctctactacaatgggctcaaggtgctggcgctggccgccgagagcgaccccaatgtgcggactgagggtcacctgcgcctggtgggggaggggccgtccgtgctgctcagtgcggagaccacggccaccaccctgctggctgacatggccaccaccatcatggagactaccaccaccatggccactaccaccacgcgccggggccgctcccccacactgagggacagcaccacccagaacacagatgacctgctggtggcctctgctgagtgtccaagcgatgatgaggacctggaggagtgtgagcccagtactggaggagagttaatattgcccattatcacggaggactccttagacccccctcccgtggccacccgatcccccttcgtgcccccgccccctaccttctaccccttcctcacgggagtgggcgccacccaagacacgctgcccccgcccgccgcgcgccgcccgccctctgggggcccgtgccaggccgagcgggacgacagcgactgcgaggagcccatcgaggcctcgggcttcgcctccggggaggtctttgactccagcctcccccccacggacgacgaggacttttacaccacctttcccctggtcacggaccgcaccaccctcctgtcaccccgcaaacccgctccccggcccaacctcaggacagatggggccacgggcgcccctggggtgctgtttgccccctccgccccggcccccaacctgccggcgggcaaaatgaaccaccgagacccgcttcagcccttgctggagaacccgcccttggggcccggggcccccacgtcctttgagccgcggaggccccctcccctgcgccccggcgtgacctcagcccccggcttcccccatctgcccacagccaaccccacagggcctggggagcggggcccgccgggcgcagtggaggtgatccgggagtccagcagcaccacgggcatggtggtgggcattgtggcggcggcggcgctctgcatcctcatcctcctctacgccatgtataagtaccgcaatcgtgatgagggctcctaccaggtggaccagagccgaaactacatcagtaactcggcccagagcaatggggcggtggtgaaagagaaggccccggctgcccccaagacgcccagcaaggccaagaagaacaaagacaaggagtattatgtctgagcccccggcactgcgccccactgccagctgcccctcctgggagggcccgggaggagggtgccaccctctccctgccaggggcctggggaccctctccctggctgcctcaggcttctcttacgaagaggaaacgcaaaaaaagaaaaggaaaaaccccgtgctcgcccccttcctcctgccgtccactgcgcggcctcgtcagtcccggggctgactgtccctctcagctctgcgcctgccaggcagggcacgtgctcacagccctgggttgatttatttttttaagggggtagttttattttggtggggttgggtgggaaggaaggctgggggttttgtaaagtgtccactgctcgtcctgttaattttcctcaatttttcttcttcttccttctgtccctcctgccttccttctcttcccaagccctccaatccccatcccaggcttgctgtgtctcactgtccccaccctccttccctacttctttttttgtgtgtctggtttctcccttcctttcctccctttgggtttccagagtcggtgggagaagggcgggagggtgggcccgagtggcccagtgggtgggtggggtggggtggggcaagtgccccaactcccctcaccaggagaggcacctgcttggtgccgcccagggaaggggctcaggcctgacggaaggcctgttctgtgtgtgccgccgggcgacgtgcattgatggggaagctgctggaggagcaggggtggggggtgggagggaggggaaaggcaaatgcagatatatattacagacaaatactctagattccacgagcagcagcctgtggcacccgctgggcgcgggcagcagggaagagggagcaaggcattgtccacagactgctggggtcacttctttgcccacgggctccctgctcccccagttttttttctctctttgttaacaaatgtgtctgagtcttggaaaacaccccaaccccggaaatgtgtgggaaaaagaaaacaaaaactttccaaattccaa

SEQ ID NO: 14248 - DNA, 3535 bp, Homo sapiens
  source 1..3535: mol_type = unassigned DNA
ggcagcagcggcgcggccggccccagtcgccgtcggtctcccgccttcgggggaaccaggtctccgtccctcttctctcctccagcccgcaccgccccgctccccagctcggtttttccgcaggatttccctcgctctcccctccctgcttggcccccgcgctcccctccctctccactcggcaccatgccccctcccccgggcgctcccccgggtttctgacggccctctgcgccgctccgaccccgccgggatgcagagagacccctagctcctcgcgatggacccaggcatcctggaccttggcgttgccgctccgcggacccccgatttcccggcgggatccagttgattttgttggctccggaccgaggcttgggccctggtttacctccgcttcatccctaccccgctcccggagctcggagccggaggggggcttcgcggggctgcgcagccccgcgtccccgcccccggccatggggctgtgaggcggtcgcccccgggccgaaatgccccccggggggagcgggccgggggggtgcccgcgccgccccccggccctggctgggcccctgccgccgcctccaccgccgccgccgccacctctgctgccgctgttgccgctgttgctgctgttgctgctgggggcggccgagggggcccgggtctcctccagcctcagcaccacccaccacgtccaccacttccacagcaagcacggcaccgtgcccatcgccatcaaccgcatgcccttcctcacccgcggcggccacgccgggaccacatacatctttgggaaggggggagcgctcatcacctacacgtggccccccaatgacaggcccagcacgaggatggatcgcctggccgtgggcttcagcacccaccagcggagcgctgtgctggtgcgggtggacagcgcctccggccttggagactacctgcagctgcacatcgaccagggcaccgtgggggtgatctttaacgtgggcacggacgacattaccatcgacgagcccaacgccatagtaagcgacggcaaataccacgtggtgcgcttcactcgaagcggcggcaacgccaccctgcaggtggacagctggccggtcaacgagcggtacccggcaggaaactttgataacgagcgcctggcgattgctagacagagaatcccctaccggcttggtcgagtagtagatgagtggctgctcgacaaaggccgccagctgaccatcttcaacagccaggctgccatcaagatcgggggccgggatcagggccgccccttccagggccaggtgtccggcctctactacaatgggctcaaggtgctggcgctggccgccgagagcgaccccaatgtgcggactgagggtcacctgcgcctggtgggggaggggccgtccgtgctgctcagtgcggagaccacggccaccaccctgctggctgacatggccaccaccatcatggagactaccaccaccatggccactaccaccacgcgccggggccgctcccccacactgagggacagcaccacccagaacacagatgacctgctggtggcctctgctgagtgtccaagcgatgatgaggacctggaggagtgtgagcccagtactggaggagagttaatattgcccattatcacggaggactccttagacccccctcccgtggccacccgatcccccttcgtgcccccgccccctaccttctaccccttcctcacgggagtgggcgccacccaagacacgctgcccccgcccgccgcgcgccgcccgccctctgggggcccgtgccaggccgagcgggacgacagcgactgcgaggagcccatcgaggcctcgggcttcgcctccggggaggtctttgactccagcctcccccccacggacgacgaggacttttacaccacctttcccctggtcacggaccgcaccaccctcctgtcaccccgcaaacccgctccccggcccaacctcaggacagatggggccacgggcgcccctggggtgctgtttgccccctccgccccggcccccaacctgccggcgggcaaaatgaaccaccgagacccgcttcagcccttgctggagaacccgcccttggggcccggggcccccacgtcctttgagccgcggaggccccctcccctgcgccccggcgtgacctcagcccccggcttcccccatctgcccacagccaaccccacagggcctggggagcggggcccgccgggcgcagtggaggtgatccgggagtccagcagcaccacgggcatggtggtgggcattgtggcggcggcggcgctctgcatcctcatcctcctctacgccatgtataagtaccgcaatcgtgatgagggctcctaccaggtggaccagagccgaaactacatcagtaactcggcccagagcaatggggcggtggtgaaagagaaggccccggctgcccccaagacgcccagcaaggccaagaagaacaaagacaaggagtattatgtctgagcccccggcactgcgccccactgccagctgcccctcctgggagggcccgggaggagggtgccaccctctccctgccaggggcctggggaccctctccctggctgcctcaggcttctcttacgaagaggaaacgcaaaaaaagaaaaggaaaaaccccgtgctcgcccccttcctcctgccgtccactgcgcggcctcgtcagtcccggggctgactgtccctctcagctctgcgcctgccaggcagggcacgtgctcacagccctgggttgatttatttttttaagggggtagttttattttggtggggttgggtgggaaggaaggctgggggttttgtaaagtgtccactgctcgtcctgttaattttcctcaatttttcttcttcttccttctgtccctcctgccttccttctcttcccaagccctccaatccccatcccaggcttgctgtgtctcactgtccccaccctccttccctacttctttttttgtgtgtctggtttctcccttcctttcctccctttgggtttccagagtcggtgggagaagggcgggagggtgggcccgagtggcccagtgggtgggtggggtggggtggggcaagtgccccaactcccctcaccaggagaggcacctgcttggtgccgcccagggaaggggctcaggcctgacggaaggcctgttctgtgtgtgccgccgggcgacgtgcattgatggggaagctgctggaggagcaggggtggggggtgggagggaggggaaaggcaaatgcagatatatattacagacaaatactctagattccacgagcagcagcctgtggcacccgctgggcgcgggcagcagggaagagggagcaaggcattgtccacagactgctggggtcacttctttgcccacgggctccctgctcccccagttttttttctctctttgttaacaaatgtgtctgagtcttggaaaacaccccaaccccggaaatgtgtgggaaaaagaaaacaaaaactttccaaattccaa

SEQ ID NO: 14249 - DNA, 6373 bp, Homo sapiens
  source 1..6373: mol_type = unassigned DNA
ggcgggggaggggcgccgccgccgccgcctgagggaagccggcatctgggcctctgcgcgcctcgccccgcggccgggcccatggcactgtgagcctgcaagggagccccgctcagcgcggggagcgcccggccccctcccgccccatgcgcccgcggctctgaagcctgagcgggggccgggggccgggcggggccggggccgccgtaggcatggcgtccgggagccggtggcggccgacaccgccgccgctgctgttgctgctgctgctggcgctggcggcgcgcgcggacggcctggagttcggcggcggccccgggcagtgggctcgctacgcgcgctgggcgggcgcggcgagcagcggcgagctcagcttcagcctgcgcaccaacgccacgcgcgcgctgctgctctacctggacgacggcggcgactgcgacttcctggagctgctgctggtggacggccgcctgcggctgcgcttcacgctttcgtgcgccgagccggccacgctgcagctggacacgccggtggccgacgaccgctggcacatggtgctgctgacccgcgacgcgcgccgcacggcgctggcggtggacggcgaggcccgcgccgccgaggtgcgctccaagcggcgcgagatgcaggtggccagcgacctgttcgtgggcggcatcccgcccgacgtgcgcctctcggcgcttacgctgagcaccgtcaagtacgagccgcccttccgcggcctcttggccaacctgaagctgggcgagcggccccccgcgctgctgggcagccagggcctgcgcggcgccaccgccgacccgctgtgcgcgcccgcgcgcaacccctgcgccaacggcggcctctgcaccgtgctggcccccggcgaggtgggctgcgactgcagccacacgggcttcggcggcaagttctgcagcgaagaggagcaccccatggaaggtccggctcacctgacgttaaacagcgaagtagggtccttactgttctccgaggggggggccgggagaggaggagccggcgatgtgcaccagccaacaaaaggcaaggaggagtttgtggcgaccttcaaaggcaatgagttcttctgctacgacctgtcacacaaccccatccagagcagcactgatgagatcacactggccttccgcaccctgcaacgcaacggcctgatgctgcatacaggcaagtcggccgactacgtcaacctgtccctcaagtctggggctgtctggctggtcatcaacctaggctcaggtgccttcgaggcccttgtggaacccgtcaatggcaagttcaacgacaacgcctggcacgacgtccgggtcacccgaaacctgcgccagcacgcagggattggacacgctatggtaaacaaactgcattatctggtgaccatctcggtggacgggatcctgaccaccacaggctacacgcaggaggattacaccatgctgggctctgatgacttcttctacattgggggcagccccaacacagctgacctgccgggctcgcccgtcagcaacaacttcatgggctgcctcaaggacgtggtctataagaacaatgacttcaaattggaactatcccgcctggcaaaggaaggggaccccaagatgaagctgcagggggacttgtcattccgctgtgaggatgtggctgccctggaccctgtgacctttgagagtcccgaggcctttgtggcgctgccccgctggagcgctaagcgcactggctccatctccctagacttccgcaccaccgagcccaatgggctgctgctcttcagccagggccggcgggctgggggtggagctggcagccacagctctgctcagcgggccgactactttgccatggagctattggacggccacctctatcttctgctggacatgggatctgggggcatcaagctgcgggcatccagccgcaaggtcaatgatggcgagtggtgtcacgtggacttccagagggatgggcgaaaaggctccatctcagtgaatagtcgcagcacgccgttcttggccactggagacagcgagattctggacctggagagtgagctgtacctgggcggtctccctgaggggggccgggtggacctgcccctgcccccagaggtgtggacagcagcactccgggcaggctacgtgggctgtgtgcgggacctcttcatagatgggcgtagccgagacctccggggcctggctgaggctcagggggctgtgggcgttgcccccttttgctcccgggagacgctgaagcagtgtgcatctgccccctgtcgcaatgggggcgtctgtcgagaaggctggaaccgcttcatctgtgactgcatcgggaccggctttcttgggcgggtctgtgagagagaggccacggtcctgagctacgatggctccatgtacatgaagatcatgctgcctaacgccatgcacacggaggcagaggatgtgtccctgcgtttcatgtcccagcgggcctacggactcatgatggccaccacttccagggagtctgccgacaccctacgcctggagctggatggggggcagatgaagctcactgtcaacctcgactgcctgcgcgtcggctgcgcacccagtaaaggccccgaaacgctgtttgcggggcacaagctcaatgacaatgagtggcacacggtgagggtggtccggcgtggcaagagcctgcagctgtctgtggacaacgtgactgtggagggacagatggcaggagcccatatgcggctggagttccacaacattgagacgggcatcatgacggagcggcggtttatctccgtggtgccctccaacttcatcgggcatctgagtgggctcgtgttcaatggccagccctacatggaccagtgcaaggatggtgacatcacctactgtgagctcaatgctcgctttggcctgcgtgccatcgtggccgatcccgtcaccttcaagagtcgcagcagctacctggcactcgccacgctccaagcctatgcttccatgcacctcttcttccagttcaagaccacggcccctgatgggcttcttctgttcaactcgggcaacggcaatgacttcattgtcatcgagctggtcaaggggtacatccactacgtgtttgacctggggaatggcccgtccttgatgaaggggaactcagacaaaccagtcaatgacaaccagtggcacaacgtggtggtgtccagggacccaggcaacgtgcacacgctcaagattgactcccgcactgtcacgcagcactccaatggcgcccgaaacctcgatctcaaaggggagttgtacattggcggtctgagcaagaatatgttcagcaacctgcccaagctggtggcctcccgggatggctttcagggctgcctggcctcagtggacctcaacggacgtctcccagacctcatcgccgacgccctgcaccgcattgggcaggtggagaggggctgtgatggccccagcaccacctgcactgaagagtcctgtgccaaccagggcgtctgcttgcagcagtgggatggcttcacctgcgactgcaccatgacttcctatggaggccctgtctgcaatgatcccgggaccacatacatctttgggaaggggggagcgctcatcacctacacgtggccccccaatgacaggcccagcacgaggatggatcgcctggccgtgggcttcagcacccaccagcggagcgctgtgctggtgcgggtggacagcgcctccggccttggagactacctgcagctgcacatcgaccagggcaccgtgggggtgatctttaacgtgggcacggacgacattaccatcgacgagcccaacgccatagtaagcgacggcaaataccacgtggtgcgcttcactcgaagcggcggcaacgccaccctgcaggtggacagctggccggtcaacgagcggtacccggcaggaaactttgataacgagcgcctggcgattgctagacagagaatcccctaccggcttggtcgagtagtagatgagtggctgctcgacaaaggccgccagctgaccatcttcaacagccaggctgccatcaagatcgggggccgggatcagggccgccccttccagggccaggtgtccggcctctactacaatgggctcaaggtgctggcgctggccgccgagagcgaccccaatgtgcggactgagggtcacctgcgcctggtgggggaggggccgtccgtgctgctcagtgcggagaccacggccaccaccctgctggctgacatggccaccaccatcatggagactaccaccaccatggccactaccaccacgcgccggggccgctcccccacactgagggacagcaccacccagaacacagatgacctgctggtggcctctgctgagtgtccaagcgatgatgaggacctggaggagtgtgagcccagtactggaggagagttaatattgcccattatcacggaggactccttagacccccctcccgtggccacccgatcccccttcgtgcccccgccccctaccttctaccccttcctcacgggagtgggcgccacccaagacacgctgcccccgcccgccgcgcgccgcccgccctctgggggcccgtgccaggccgagcgggacgacagcgactgcgaggagcccatcgaggcctcgggcttcgcctccggggaggtctttgactccagcctcccccccacggacgacgaggacttttacaccacctttcccctggtcacggaccgcaccaccctcctgtcaccccgcaaacccgctccccggcccaacctcaggacagatggggccacgggcgcccctggggtgctgtttgccccctccgccccggcccccaacctgccggcgggcaaaatgaaccaccgagacccgcttcagcccttgctggagaacccgcccttggggcccggggcccccacgtcctttgagccgcggaggccccctcccctgcgccccggcgtgacctcagcccccggcttcccccatctgcccacagccaaccccacagggcctggggagcggggcccgccgggcgcagtggaggtgatccgggagtccagcagcaccacgggcatggtggtgggcattgtggcggcggcggcgctctgcatcctcatcctcctctacgccatgtataagtaccgcaatcgtgatgagggctcctaccaggtggaccagagccgaaactacatcagtaactcggcccagagcaatggggcggtggtgaaagagaaggccccggctgcccccaagacgcccagcaaggccaagaagaacaaagacaaggagtattatgtctgagcccccggcactgcgccccactgccagctgcccctcctgggagggcccgggaggagggtgccaccctctccctgccaggggcctggggaccctctccctggctgcctcaggcttctcttacgaagaggaaacgcaaaaaaagaaaaggaaaaaccccgtgctcgcccccttcctcctgccgtccactgcgcggcctcgtcagtcccggggctgactgtccctctcagctctgcgcctgccaggcagggcacgtgctcacagccctgggttgatttatttttttaagggggtagttttattttggtggggttgggtgggaaggaaggctgggggttttgtaaagtgtccactgctcgtcctgttaattttcctcaatttttcttcttcttccttctgtccctcctgccttccttctcttcccaagccctccaatccccatcccaggcttgctgtgtctcactgtccccaccctccttccctacttctttttttgtgtgtctggtttctcccttcctttcctccctttgggtttccagagtcggtgggagaagggcgggagggtgggcccgagtggcccagtgggtgggtggggtggggtggggcaagtgccccaactcccctcaccaggagaggcacctgcttggtgccgcccagggaaggggctcaggcctgacggaaggcctgttctgtgtgtgccgccgggcgacgtgcattgatggggaagctgctggaggagcaggggtggggggtgggagggaggggaaaggcaaatgcagatatatattacagacaaatactctagattccacgagcagcagcctgtggcacccgctgggcgcgggcagcagggaagagggagcaaggcattgtccacagactgctggggtcacttctttgcccacgggctccctgctcccccagttttttttctctctttgttaacaaatgtgtctgagtcttggaaaacaccccaaccccggaaatgtgtgggaaaaagaaaacaaaaactttccaaattccaa

SEQ ID NO: 14250 - DNA, 6413 bp, Homo sapiens
  source 1..6413: mol_type = unassigned DNA
tgcagggatgcggcggcgggagcagccgccctgactcgcggagcatcctcctcggagaggcaccgcggcggggcgggcgggcgggcggggacgcggcggggagggagagaggcgcgaggcggcagacaccgctagccctggctctgccacccgtcggagacggggcggccctgtagctctgctacccaccctccagcttctggcgccccgagaaccaggcatccctccctgctcttctgtcggagcccgcggcgggggaggggcgccgccgccgccgcctgagggaagccggcatctgggcctctgcgcgcctcgccccgcggccgggcccatggcactgtgagcctgcaagggagccccgctcagcgcggggagcgcccggccccctcccgccccatgcgcccgcggctctgaagcctgagcgggggccgggggccgggcggggccggggccgccgtaggcatggcgtccgggagccggtggcggccgacaccgccgccgctgctgttgctgctgctgctggcgctggcggcgcgcgcggacggcctggagttcggcggcggccccgggcagtgggctcgctacgcgcgctgggcgggcgcggcgagcagcggcgagctcagcttcagcctgcgcaccaacgccacgcgcgcgctgctgctctacctggacgacggcggcgactgcgacttcctggagctgctgctggtggacggccgcctgcggctgcgcttcacgctttcgtgcgccgagccggccacgctgcagctggacacgccggtggccgacgaccgctggcacatggtgctgctgacccgcgacgcgcgccgcacggcgctggcggtggacggcgaggcccgcgccgccgaggtgcgctccaagcggcgcgagatgcaggtggccagcgacctgttcgtgggcggcatcccgcccgacgtgcgcctctcggcgcttacgctgagcaccgtcaagtacgagccgcccttccgcggcctcttggccaacctgaagctgggcgagcggccccccgcgctgctgggcagccagggcctgcgcggcgccaccgccgacccgctgtgcgcgcccgcgcgcaacccctgcgccaacggcggcctctgcaccgtgctggcccccggcgaggtgggctgcgactgcagccacacgggcttcggcggcaagttctgcagcgaagaggagcaccccatggaaggtccggctcacctgacgttaaacagcgaaggcaaggaggagtttgtggcgaccttcaaaggcaatgagttcttctgctacgacctgtcacacaaccccatccagagcagcactgatgagatcacactggccttccgcaccctgcaacgcaacggcctgatgctgcatacaggcaagtcggccgactacgtcaacctgtccctcaagtctggggctgtctggctggtcatcaacctaggctcaggtgccttcgaggcccttgtggaacccgtcaatggcaagttcaacgacaacgcctggcacgacgtccgggtcacccgaaacctgcgccagcacgcagggattggacacgctatggtgaccatctcggtggacgggatcctgaccaccacaggctacacgcaggaggattacaccatgctgggctctgatgacttcttctacattgggggcagccccaacacagctgacctgccgggctcgcccgtcagcaacaacttcatgggctgcctcaaggacgtggtctataagaacaatgacttcaaattggaactatcccgcctggcaaaggaaggggaccccaagatgaagctgcagggggacttgtcattccgctgtgaggatgtggctgccctggaccctgtgacctttgagagtcccgaggcctttgtggcgctgccccgctggagcgctaagcgcactggctccatctccctagacttccgcaccaccgagcccaatgggctgctgctcttcagccagggccggcgggctgggggtggagctggcagccacagctctgctcagcgggccgactactttgccatggagctattggacggccacctctatcttctgctggacatgggatctgggggcatcaagctgcgggcatccagccgcaaggtcaatgatggcgagtggtgtcacgtggacttccagagggatgggcgaaaaggctccatctcagtgaatagtcgcagcacgccgttcttggccactggagacagcgagattctggacctggagagtgagctgtacctgggcggtctccctgaggggggccgggtggacctgcccctgcccccagaggtgtggacagcagcactccgggcaggctacgtgggctgtgtgcgggacctcttcatagatgggcgtagccgagacctccggggcctggctgaggctcagggggctgtgggcgttgcccccttttgctcccgggagacgctgaagcagtgtgcatctgccccctgtcgcaatgggggcgtctgtcgagaaggctggaaccgcttcatctgtgactgcatcgggaccggctttcttgggcgggtctgtgagagagaggccacggtcctgagctacgatggctccatgtacatgaagatcatgctgcctaacgccatgcacacggaggcagaggatgtgtccctgcgtttcatgtcccagcgggcctacggactcatgatggccaccacttccagggagtctgccgacaccctacgcctggagctggatggggggcagatgaagctcactgtcaacctcggtaaaggccccgaaacgctgtttgcggggcacaagctcaatgacaatgagtggcacacggtgagggtggtccggcgtggcaagagcctgcagctgtctgtggacaacgtgactgtggagggacagatggcaggagcccatatgcggctggagttccacaacattgagacgggcatcatgacggagcggcggtttatctccgtggtgccctccaacttcatcgggcatctgagtgggctcgtgttcaatggccagccctacatggaccagtgcaaggatggtgacatcacctactgtgagctcaatgctcgctttggcctgcgtgccatcgtggccgatcccgtcaccttcaagagtcgcagcagctacctggcactcgccacgctccaagcctatgcttccatgcacctcttcttccagttcaagaccacggcccctgatgggcttcttctgttcaactcgggcaacggcaatgacttcattgtcatcgagctggtcaaggggtacatccactacgtgtttgacctggggaatggcccgtccttgatgaaggggaactcagacaaaccagtcaatgacaaccagtggcacaacgtggtggtgtccagggacccaggcaacgtgcacacgctcaagattgactcccgcactgtcacgcagcactccaatggcgcccgaaacctcgatctcaaaggggagttgtacattggcggtctgagcaagaatatgttcagcaacctgcccaagctggtggcctcccgggatggctttcagggctgcctggcctcagtggacctcaacggacgtctcccagacctcatcgccgacgccctgcaccgcattgggcaggtggagaggggctgtgatggccccagcaccacctgcactgaagagtcctgtgccaaccagggcgtctgcttgcagcagtgggatggcttcacctgcgactgcaccatgacttcctatggaggccctgtctgcaatgatcccgggaccacatacatctttgggaaggggggagcgctcatcacctacacgtggccccccaatgacaggcccagcacgaggatggatcgcctggccgtgggcttcagcacccaccagcggagcgctgtgctggtgcgggtggacagcgcctccggccttggagactacctgcagctgcacatcgaccagggcaccgtgggggtgatctttaacgtgggcacggacgacattaccatcgacgagcccaacgccatagtaagcgacggcaaataccacgtggtgcgcttcactcgaagcggcggcaacgccaccctgcaggtggacagctggccggtcaacgagcggtacccggcaggccgccagctgaccatcttcaacagccaggctgccatcaagatcgggggccgggatcagggccgccccttccagggccaggtgtccggcctctactacaatgggctcaaggtgctggcgctggccgccgagagcgaccccaatgtgcggactgagggtcacctgcgcctggtgggggaggggccgtccgtgctgctcagtgcggagaccacggccaccaccctgctggctgacatggccaccaccatcatggagactaccaccaccatggccactaccaccacgcgccggggccgctcccccacactgagggacagcaccacccagaacacagatgacctgctggtggcctctgctgagtgtccaagcgatgatgaggacctggaggagtgtgagcccagtactggaggagagttaatattgcccattatcacggaggactccttagacccccctcccgtggccacccgatcccccttcgtgcccccgccccctaccttctaccccttcctcacgggagtgggcgccacccaagacacgctgcccccgcccgccgcgcgccgcccgccctctgggggcccgtgccaggccgagcgggacgacagcgactgcgaggagcccatcgaggcctcgggcttcgcctccggggaggtctttgactccagcctcccccccacggacgacgaggacttttacaccacctttcccctggtcacggaccgcaccaccctcctgtcaccccgcaaacccgctccccggcccaacctcaggacagatggggccacgggcgcccctggggtgctgtttgccccctccgccccggcccccaacctgccggcgggcaaaatgaaccaccgagacccgcttcagcccttgctggagaacccgcccttggggcccggggcccccacgtcctttgagccgcggaggccccctcccctgcgccccggcgtgacctcagcccccggcttcccccatctgcccacagccaaccccacagggcctggggagcggggcccgccgggcgcagtggaggtgatccgggagtccagcagcaccacgggcatggtggtgggcattgtggcggcggcggcgctctgcatcctcatcctcctctacgccatgtataagtaccgcaatcgtgatgagggctcctaccaggtggaccagagccgaaactacatcagtaactcggcccagagcaatggggcggtggtgaaagagaaggccccggctgcccccaagacgcccagcaaggccaagaagaacaaagacaaggagtattatgtctgagcccccggcactgcgccccactgccagctgcccctcctgggagggcccgggaggagggtgccaccctctccctgccaggggcctggggaccctctccctggctgcctcaggcttctcttacgaagaggaaacgcaaaaaaagaaaaggaaaaaccccgtgctcgcccccttcctcctgccgtccactgcgcggcctcgtcagtcccggggctgactgtccctctcagctctgcgcctgccaggcagggcacgtgctcacagccctgggttgatttatttttttaagggggtagttttattttggtggggttgggtgggaaggaaggctgggggttttgtaaagtgtccactgctcgtcctgttaattttcctcaatttttcttcttcttccttctgtccctcctgccttccttctcttcccaagccctccaatccccatcccaggcttgctgtgtctcactgtccccaccctccttccctacttctttttttgtgtgtctggtttctcccttcctttcctccctttgggtttccagagtcggtgggagaagggcgggagggtgggcccgagtggcccagtgggtgggtggggtggggtggggcaagtgccccaactcccctcaccaggagaggcacctgcttggtgccgcccagggaaggggctcaggcctgacggaaggcctgttctgtgtgtgccgccgggcgacgtgcattgatggggaagctgctggaggagcaggggtggggggtgggagggaggggaaaggcaaatgcagatatatattacagacaaatactctagattccacgagcagcagcctgtggcacccgctgggcgcgggcagcagggaagagggagcaaggcattgtccacagactgctggggtcacttctttgcccacgggctccctgctcccccagttttttttctctctttgttaacaaatgtgtctgagtcttggaaaacaccccaaccccggaaatgtgtgggaaaaagaaaacaaaaactttccaaattccaa

SEQ ID NO: 14251 - DNA, 6381 bp, Homo sapiens
  source 1..6381: mol_type = unassigned DNA
gcatccctccctgctcttctgtcggagcccgcggcgggggaggggcgccgccgccgccgcctgagggaagccggcatctgggcctctgcgcgcctcgccccgcggccgggcccatggcactgtgagcctgcaagggagccccgctcagcgcggggagcgcccggccccctcccgccccatgcgcccgcggctctgaagcctgagcgggggccgggggccgggcggggccggggccgccgtaggcatggcgtccgggagccggtggcggccgacaccgccgccgctgctgttgctgctgctgctggcgctggcggcgcgcgcggacggcctggagttcggcggcggccccgggcagtgggctcgctacgcgcgctgggcgggcgcggcgagcagcggcgagctcagcttcagcctgcgcaccaacgccacgcgcgcgctgctgctctacctggacgacggcggcgactgcgacttcctggagctgctgctggtggacggccgcctgcggctgcgcttcacgctttcgtgcgccgagccggccacgctgcagctggacacgccggtggccgacgaccgctggcacatggtgctgctgacccgcgacgcgcgccgcacggcgctggcggtggacggcgaggcccgcgccgccgaggtgcgctccaagcggcgcgagatgcaggtggccagcgacctgttcgtgggcggcatcccgcccgacgtgcgcctctcggcgcttacgctgagcaccgtcaagtacgagccgcccttccgcggcctcttggccaacctgaagctgggcgagcggccccccgcgctgctgggcagccagggcctgcgcggcgccaccgccgacccgctgtgcgcgcccgcgcgcaacccctgcgccaacggcggcctctgcaccgtgctggcccccggcgaggtgggctgcgactgcagccacacgggcttcggcggcaagttctgcagcgaagaggagcaccccatggaaggtccggctcacctgacgttaaacagcgaagtagggtccttactgttctccgaggggggggccgggagaggaggagccggcgatgtgcaccagccaacaaaaggcaaggaggagtttgtggcgaccttcaaaggcaatgagttcttctgctacgacctgtcacacaaccccatccagagcagcactgatgagatcacactggccttccgcaccctgcaacgcaacggcctgatgctgcatacaggcaagtcggccgactacgtcaacctgtccctcaagtctggggctgtctggctggtcatcaacctaggctcaggtgccttcgaggcccttgtggaacccgtcaatggcaagttcaacgacaacgcctggcacgacgtccgggtcacccgaaacctgcgccagcacgcagggattggacacgctatggtgaccatctcggtggacgggatcctgaccaccacaggctacacgcaggaggattacaccatgctgggctctgatgacttcttctacattgggggcagccccaacacagctgacctgccgggctcgcccgtcagcaacaacttcatgggctgcctcaaggacgtggtctataagaacaatgacttcaaattggaactatcccgcctggcaaaggaaggggaccccaagatgaagctgcagggggacttgtcattccgctgtgaggatgtggctgccctggaccctgtgacctttgagagtcccgaggcctttgtggcgctgccccgctggagcgctaagcgcactggctccatctccctagacttccgcaccaccgagcccaatgggctgctgctcttcagccagggccggcgggctgggggtggagctggcagccacagctctgctcagcgggccgactactttgccatggagctattggacggccacctctatcttctgctggacatgggatctgggggcatcaagctgcgggcatccagccgcaaggtcaatgatggcgagtggtgtcacgtggacttccagagggatgggcgaaaaggctccatctcagtgaatagtcgcagcacgccgttcttggccactggagacagcgagattctggacctggagagtgagctgtacctgggcggtctccctgaggggggccgggtggacctgcccctgcccccagaggtgtggacagcagcactccgggcaggctacgtgggctgtgtgcgggacctcttcatagatgggcgtagccgagacctccggggcctggctgaggctcagggggctgtgggcgttgcccccttttgctcccgggagacgctgaagcagtgtgcatctgccccctgtcgcaatgggggcgtctgtcgagaaggctggaaccgcttcatctgtgactgcatcgggaccggctttcttgggcgggtctgtgagagagaggccacggtcctgagctacgatggctccatgtacatgaagatcatgctgcctaacgccatgcacacggaggcagaggatgtgtccctgcgtttcatgtcccagcgggcctacggactcatgatggccaccacttccagggagtctgccgacaccctacgcctggagctggatggggggcagatgaagctcactgtcaacctcgactgcctgcgcgtcggctgcgcacccagtaaaggccccgaaacgctgtttgcggggcacaagctcaatgacaatgagtggcacacggtgagggtggtccggcgtggcaagagcctgcagctgtctgtggacaacgtgactgtggagggacagatggcaggagcccatatgcggctggagttccacaacattgagacgggcatcatgacggagcggcggtttatctccgtggtgccctccaacttcatcgggcatctgagtgggctcgtgttcaatggccagccctacatggaccagtgcaaggatggtgacatcacctactgtgagctcaatgctcgctttggcctgcgtgccatcgtggccgatcccgtcaccttcaagagtcgcagcagctacctggcactcgccacgctccaagcctatgcttccatgcacctcttcttccagttcaagaccacggcccctgatgggcttcttctgttcaactcgggcaacggcaatgacttcattgtcatcgagctggtcaaggggtacatccactacgtgtttgacctggggaatggcccgtccttgatgaaggggaactcagacaaaccagtcaatgacaaccagtggcacaacgtggtggtgtccagggacccaggcaacgtgcacacgctcaagattgactcccgcactgtcacgcagcactccaatggcgcccgaaacctcgatctcaaaggggagttgtacattggcggtctgagcaagaatatgttcagcaacctgcccaagctggtggcctcccgggatggctttcagggctgcctggcctcagtggacctcaacggacgtctcccagacctcatcgccgacgccctgcaccgcattgggcaggtggagaggggctgtgatggccccagcaccacctgcactgaagagtcctgtgccaaccagggcgtctgcttgcagcagtgggatggcttcacctgcgactgcaccatgacttcctatggaggccctgtctgcaatgatcccgggaccacatacatctttgggaaggggggagcgctcatcacctacacgtggccccccaatgacaggcccagcacgaggatggatcgcctggccgtgggcttcagcacccaccagcggagcgctgtgctggtgcgggtggacagcgcctccggccttggagactacctgcagctgcacatcgaccagggcaccgtgggggtgatctttaacgtgggcacggacgacattaccatcgacgagcccaacgccatagtaagcgacggcaaataccacgtggtgcgcttcactcgaagcggcggcaacgccaccctgcaggtggacagctggccggtcaacgagcggtacccggcaggaaactttgataacgagcgcctggcgattgctagacagagaatcccctaccggcttggtcgagtagtagatgagtggctgctcgacaaaggccgccagctgaccatcttcaacagccaggctgccatcaagatcgggggccgggatcagggccgccccttccagggccaggtgtccggcctctactacaatgggctcaaggtgctggcgctggccgccgagagcgaccccaatgtgcggactgagggtcacctgcgcctggtgggggaggggccgtccgtgctgctcagtgcggagaccacggccaccaccctgctggctgacatggccaccaccatcatggagactaccaccaccatggccactaccaccacgcgccggggccgctcccccacactgagggacagcaccacccagaacacagatgacctgctggtggcctctgctgagtgtccaagcgatgatgaggacctggaggagtgtgagcccagtactggaggagagttaatattgcccattatcacggaggactccttagacccccctcccgtggccacccgatcccccttcgtgcccccgccccctaccttctaccccttcctcacgggagtgggcgccacccaagacacgctgcccccgcccgccgcgcgccgcccgccctctgggggcccgtgccaggccgagcgggacgacagcgactgcgaggagcccatcgaggcctcgggcttcgcctccggggaggtctttgactccagcctcccccccacggacgacgaggacttttacaccacctttcccctggtcacggaccgcaccaccctcctgtcaccccgcaaacccgctccccggcccaacctcaggacagatggggccacgggcgcccctggggtgctgtttgccccctccgccccggcccccaacctgccggcgggcaaaatgaaccaccgagacccgcttcagcccttgctggagaacccgcccttggggcccggggcccccacgtcctttgagccgcggaggccccctcccctgcgccccggcgtgacctcagcccccggcttcccccatctgcccacagccaaccccacagggcctggggagcggggcccgccgggcgcagtggaggtgatccgggagtccagcagcaccacgggcatggtggtgggcattgtggcggcggcggcgctctgcatcctcatcctcctctacgccatgtataagtaccgcaatcgtgatgagggctcctaccaggtggaccagagccgaaactacatcagtaactcggcccagagcaatggggcggtggtgaaagagaaggccccggctgcccccaagacgcccagcaaggccaagaagaacaaagacaaggagtattatgtctgagcccccggcactgcgccccactgccagctgcccctcctgggagggcccgggaggagggtgccaccctctccctgccaggggcctggggaccctctccctggctgcctcaggcttctcttacgaagaggaaacgcaaaaaaagaaaaggaaaaaccccgtgctcgcccccttcctcctgccgtccactgcgcggcctcgtcagtcccggggctgactgtccctctcagctctgcgcctgccaggcagggcacgtgctcacagccctgggttgatttatttttttaagggggtagttttattttggtggggttgggtgggaaggaaggctgggggttttgtaaagtgtccactgctcgtcctgttaattttcctcaatttttcttcttcttccttctgtccctcctgccttccttctcttcccaagccctccaatccccatcccaggcttgctgtgtctcactgtccccaccctccttccctacttctttttttgtgtgtctggtttctcccttcctttcctccctttgggtttccagagtcggtgggagaagggcgggagggtgggcccgagtggcccagtgggtgggtggggtggggtggggcaagtgccccaactcccctcaccaggagaggcacctgcttggtgccgcccagggaaggggctcaggcctgacggaaggcctgttctgtgtgtgccgccgggcgacgtgcattgatggggaagctgctggaggagcaggggtggggggtgggagggaggggaaaggcaaatgcagatatatattacagacaaatactctagattccacgagcagcagcctgtggcacccgctgggcgcgggcagcagggaagagggagcaaggcattgtccacagactgctggggtcacttctttgcccacgggctccctgctcccccagttttttttctctctttgttaacaaatgtgtctgagtcttggaaaacaccccaaccccggaaatgtgtgggaaaaagaaaacaaaaactttccaaattc

SEQ ID NO: 14252 - DNA, 580 bp, Homo sapiens
  source 1..580: mol_type = unassigned DNA
cgcgccggggccgctcccccacactgagggacagcaccacccagaacacagatgacctgctggtggcctctgctgagtgtccaagcgatgatgaggacctggaggagtgtgagcccagtactgccaaccccacagggcctggggagcggggcccgccgggcgcagtggaggtgatccgggagtccagcagcaccacgggcatggtggtgggcattgtggcggcggcggcgctctgcatcctcatcctcctctacgccatgtataagtaccgcaatcgtgatgagggctcctaccaggtggaccagagccgaaactacatcagtaactcggcccagagcaatggggcggtggtgaaagagaaggccccggctgcccccaagacgcccagcaaggccaagaagaacaaagacaaggagtattatgtctgagcccccggcactgcgccccactgccagctgcccctcctgggagggcccgggaggagggtgccaccctctccctgccaggggcctggggaccctctccctggctgcctcaggcttctcttacgaagaggaaacgcaaaaaaagaaaaggaaaa

SEQ ID NO: 14253 - DNA, 828 bp, Homo sapiens
  source 1..828: mol_type = unassigned DNA
ttgctgctgttgctgctgggggcggccgagggggcccgggtctcctccagcctcagcaccacccaccacgtccaccacttccacagcaagcacggcaccgtgcccatcgccatcaaccgcatgcccttcctcacccgcggcggccacgccgggaccacatacatctttgggaaggggggagcgctcatcacctacacgtggccccccaatgacaggcccagcacgaggatggatcgcctggccgtgggcttcagcacccaccagcggagcgctgtgctggtgcgggtggacagcgcctccggccttggagactacctgcagctgcacatcgaccagggcaccgtgggggtgatctttaacgtgggcacggacgacattaccatcgacgagcccaacgccatagtaagcgacggcaaataccacgtggtgcgcttcactcgaagcggcggcaacgccaccctgcaggtggacagctggccggtcaacgagcggtacccggcaggccgccagctgaccatcttcaacagccaggctgccatcaagatcgggggccgggatcagggccgccccttccagggccaggtgtccggcctctactacaatgggctcaaggtgctggcgctggccgccgagagcgaccccaatgtgcggactgagggtcacctgcgcctggtgggggaggggccgtccgtgctgctcagtgcggagaccacggccaccaccctgctggctgacatggccaccaccatcatggagactaccaccaccatggccactaccaccacgcgccggggccgctcccccacactgagggacagcaccacccag

SEQ ID NO: 14254 - DNA, 392 bp, Homo sapiens
  source 1..392: mol_type = unassigned DNA
ctactgggctccccacctccaggcgctgcccttccaggcagccgggaccacatacatctttgggaaggggggagcgctcatcacctacacgtggccccccaatgacaggcccagcacgaggatggatcgcctggccgtgggcttcagcacccaccagcggagcgctgtgctggtgcgggtggacagcgcctccggccttggagactacctgcagctgcacatcgaccagggcaccgtgggggtgatctttaacgtgggcacggacgacattaccatcgacgagcccaacgccatagtaagcgacggcaaataccacgtggtgcgcttcactcgaagcggcggcaacgccaccctgcaggtggacagctggccggtcaacgagcggtacccgg

SEQ ID NO: 14255 - DNA, 562 bp, Homo sapiens
  source 1..562: mol_type = unassigned DNA
ctcgcaggctcgcgcctttcctcggctcagccccgctcccctcctctcctatcccctcctctcctatcccttcattcccccctcacccggatttgcttcccttcccccttctcccgcccccccctcccccggccgctccctcctttcccccggcctccgtcgggcggcagcggcagcagcggcgcggccggccccagtcgccgtcggtctcccgccttcgggggaaccagcaagcacggcaccgtgcccatcgccatcaaccgcatgcccttcctcacccgcggcggccacgccgggaccacatacatctttgggaaggggggagcgctcatcacctacacgtggccccccaatgacaggcccagcacgaggatggatcgcctggccgtgggcttcagcacccaccagcggagcgctgtgctggtgcgggtggacagcgcctccggccttggagactacctgcagctgcacatcgaccagggcaccgtgggggtgatctttaacgtgggcacggacgacattaccatcgacgagcccaacgccatagtaagcgacggcaaat

SEQ ID NO: 14256 - DNA, 538 bp, Homo sapiens
  source 1..538: mol_type = unassigned DNA
aacccacagggcctgggcggggaaggaacccagactgcctgcgcgtcggctgcgcacccagtaaaggccccgaaacgctgtttgcggggcacaagctcaatgacaatgagtggcacacggtgagggtggtccggcgtggcaagagcctgcagctgtctgtggacaacgtgactgtggagggacagatggcaggagcccatatgcggctggagttccacaacattgagacgggcatcatgacggagcggcggtttatctccgtggtgccctccaacttcatcgggcatctgagtgggctcgtgttcaatggccagccctacatggaccagtgcaaggatggtgacatcacctactgtgagctcaatgctcgctttggcctgcgtgccatcgtggccgatcccgtcaccttcaagagtcgcagcagctacctggcactcgccacgctccaagcctatgcttccatgcacctcttcttccagttcaagaccacggcccctgatgggcttcttctgttcaactcgggcaacggcaatgactt

SEQ ID NO: 14257 - DNA, 611 bp, Homo sapiens
  source 1..611: mol_type = unassigned DNA
attctgcagctgggctggggctgcgtcacagaagcctctgagcctgggggcctttgtcaagcagtttttgcagtgagtgaggccgagcttccagcccaggactgctgctcgtcctcctgagcctgctgcagggcacaaggtggaggggcccacacaaggctccatctcagtgaatagtcgcagcacgccgttcttggccactggagacagcgagattctggacctggagagtgagctgtacctgggcggtctccctgaggggggccgggtggacctgcccctgcccccagaggtgtggacagcagcactccgggcaggctacgtgggctgtgtgcgggacctcttcatagatgggcgtagccgagacctccggggcctggctgaggctcagggggctgtgggcgttgcccccttttgctcccgggagacgctgaagcagtgtgcatctgccccctgtcgcaatgggggcgtctgtcgagaaggctggaaccgcttcatctgtgactgcatcgggaccggctttcttgggcgggtctgtgagagagaggccacggtcctgagctacgatggctccatgtacatgaagatcatgctgcctaacgccatgcaca

SEQ ID NO: 14258 - DNA, 878 bp, Homo sapiens
  source 1..878: mol_type = unassigned DNA
agcgtgagtcctgcggcgacctgtgggcagcctgtgtggtcagaggagcaccccatggaaggtccggctcacctgacgttaaacagcgaagtagggtccttactgttctccgaggggggggccgggagaggaggagccggcgatgtgcaccagccaacaaaaggcaaggaggagtttgtggcgaccttcaaaggcaatgagttcttctgctacgacctgtcacacaaccccatccagagcagcactgatgagatcacactggccttccgcaccctgcaacgcaacggcctgatgctgcatacaggcaagtcggccgactacgtcaacctgtccctcaagtctggggctgtctggctggtcatcaacctaggctcaggtgccttcgaggcccttgtggaacccgtcaatggcaagttcaacgacaacgcctggcacgacgtccgggtcacccgaaacctgcgccaggtgaccatctcggtggacgggatcctgaccaccacaggctacacgcaggaggattacaccatgctgggctctgatgacttcttctacattgggggcagccccaacacagctgacctgccgggctcgcccgtcagcaacaacttcatgggctgcctcaaggacgtggtctataagaacaatgacttcaaattggaactatcccgcctggcaaaggaaggggaccccaagatgaagctgcagggggacttgtcattccgctgtgaggatgtggctgccctggaccctgtgacctttgagagtcccgaggcctttgtggcgctgccccgctggagcgctaagcgcactggctccatctccctagacttccgcaccaccgagcccaatgggctgctgctcttcagccagggccggcg

SEQ ID NO: 14259 - DNA, 618 bp, Homo sapiens
  source 1..618: mol_type = unassigned DNA
tctgcagcgaagaggagcaccccatggaaggtccggctcacctgacgttaaacagcgaagtagggtccttactgttctccgaggggggggccgggagaggaggagccggcgatgtgcaccagccaacaaaaggcaaggaggagtttgtggcgaccttcaaaggcaatgagttcttctgctacgacctgtcacacaaccccatccagagcagcactgatgagatcacactggccttccgcaccctgcaacgcaacggcctgatgctgcatacaggcaagtcggccgactacgtcaacctgtccctcaagtctggggctgtctggctggtcatcaacctaggctcaggtgccttcgaggcccttgtggaacccgtcaatggcaagttcaacgacaacgcctggcacgacgtccgggtcacccgaaacctgcgccaggtgaccatctcggtggacgggatcctgaccaccacaggctacacgcaggaggattacaccatgctgggctctgatgacttcttctacattgggggcagccccaacacagctgacctgccgggctcgcccgtcagcaacaacttcatgggctgcctcaaggacgtggtctataagaacaatgact

SEQ ID NO: 14260 - DNA, 643 bp, Homo sapiens
  source 1..643: mol_type = unassigned DNA
cgccgacccgctgtgcgcgcccgcgcgcaacccctgcgccaacggcggcctctgcaccgtgctggcccccggcgaggtgggctgcgactgcagccacacgggcttcggcggcaagttctgcagcgaagaggagcaccccatggaagtagggtccttactgttctccgaggggggggccgggagaggaggagccggcgatgtgcaccagccaacaaaaggcaaggaggagtttgtggcgaccttcaaaggcaatgagttcttctgctacgacctgtcacacaaccccatccagagcagcactgatgagatcacactggccttccgcaccctgcaacgcaacggcctgatgctgcatacaggcaagtcggccgactacgtcaacctgtccctcaagtctggggctgtctggctggtcatcaacctaggctcaggtgccttcgaggcccttgtggaacccgtcaatggcaagttcaacgacaacgcctggcacgacgtccgggtcacccgaaacctgcgccaggtgaccatctcggtggacgggatcctgaccaccacaggctacacgcaggaggattacaccatgctgggctctgatgacttcttctacattgggggcagccccaacacagctgacctgccgggc

SEQ ID NO: 14261 - DNA, 3155 bp, Homo sapiens
  source 1..3155: mol_type = unassigned DNA
gcatccctccctgctcttctgtcggagcccgcggcgggggaggggcgccgccgccgccgcctgagggaagccggcatctgggcctctgcgcgcctcgccccgcggccgggcccatggcactgtgagcctgcaagggagccccgctcagcgcggggagcgcccggccccctcccgccccatgcgcccgcggctctgaagcctgagcgggggccgggggccgggcggggccggggccgccgtaggcatggcgtccgggagccggtggcggccgacaccgccgccgctgctgttgctgctgctgctggcgctggcggcgcgcgcggacggcctggagttcggcggcggccccgggcagtgggctcgctacgcgcgctgggcgggcgcggcgagcagcggcgagctcagcttcagcctgcgcaccaacgccacgcgcgcgctgctgctctacctggacgacggcggcgactgcgacttcctggagctgctgctggtggacggccgcctgcggctgcgcttcacgctttcgtgcgccgagccggccacgctgcagctggacacgccggtggccgacgaccgctggcacatggtgctgctgacccgcgacgcgcgccgcacggcgctggcggtggacggcgaggcccgcgccgccgaggtgcgctccaagcggcgcgagatgcaggtggccagcgacctgttcgtgggcggcatcccgcccgacgtgcgcctctcggcgcttacgctgagcaccgtcaagtacgagccgcccttccgcggcctcttggccaacctgaagctgggcgagcggccccccgcgctgctgggcagccagggcctgcgcggcgccaccgccgacccgctgtgcgcgcccgcgcgcaacccctgcgccaacggcggcctctgcaccgtgctggcccccggcgaggtgggctgcgactgcagccacacgggcttcggcggcaagttctgcagcgaagaggagcaccccatggaaggcaaggaggagtttgtggcgaccttcaaaggcaatgagttcttctgctacgacctgtcacacaaccccatccagagcagcactgatgagatcacactggccttccgcaccctgcaacgcaacggcctgatgctgcatacaggcaagtcggccgactacgtcaacctgtccctcaagtctggggctgtctggctggtcatcaacctaggctcaggtgccttcgaggcccttgtggaacccgtcaatggcaagttcaacgacaacgcctggcacgacgtccgggtcacccgaaacctgcgccagcacgcagggattggacacgctatggtaaacaaactgcattatctggtagatatcactctaattgtcttaccgtttggtttgccgtgggtttttttaactgttcgattctccctcttttgtttcctctccctgtttggttttttggttgttttgctcttccaattgttttttgcgtcctggacaatctttagattttgcttctcttttagtttccctctttcccttttctttcttttttggtccaaactgaaatacaaaagacaaatggaaatcgaggaatttggcttgtccctgctgtaatccctaactcctgaattcagattcctggccagagagacctgggggcaggccccatgttcatcggctctggttagaccagccccgatgccaggctgcttatttctattgctttattttgttcttttccctcccctcccttgttttttctctttgatttagtttcttggtctcctgaaaatccatggaaaacaccatcccatgacatgctatgctctgctcactgtcagctccctggacagggccgctcaagtttgaggaggggtctgggggtgagacctccagtggcagccagtggggtgggttcccaggggtggagggcatggccttgggagatgcggagctgcctgagatcagtccagacctcatgcaaatcatcagttcatagcagtttgggggctgccccatgctggctgctctgggaaaggtgccatcccctccctcacttctcagccttgagggttcctggttccatgtcccccacattttgcatggcatgaatggtcttttcccctgaccagggatagcgtccagttcccccaactgctccgctgctctgactaacactgtgtttcacactgtcttccttcccgtcaccccctgccctctctgcccgctgcctgccccgcatggcctctgacaggggctggtttccttccctgttgaggggagcgagaggaggaggcctgcaggggtgggaaggggcagcattggttgtccttgtcaccgagctcctctgtttgggttaggctcagtcctggtgagtgttggtgtgggtgtctgtgtaaatgcagctggtgtgtgttggtgtgtgggtgtgactgtgtgtaaatgttggcgtgacatttcggggtgttagtgggaagctgtactgtgtgtgcgaggctctgctggtgactctccacgtgtgagctggtgtgagctgggggctgcgtgactatgtgggtttttgagcctggtgaggactctgtgtggaggtggactgtggagactggcccttcagttgcagtgccatggcagtcaggaacagggaaggagctggggctagccctttgctccttgccttgcctcagagtgtgtgtgcgcaggccctgctgcgtgtgatcccctgggattccctcgtgcctgcccagtcctggctctgcagcagcagccggttagtcatcgcctattaataatgcagagtgactgaacaccaggctggggaccctgcagatggacgtgtctgctcccgtggggcagctgcctggcctgcccagcctcccaggtttgtatggctggctggtgaggagggaagcgtgacagttggggctcccaatctgagtgtctctcccacttccctaggaggctctacctctgaggctacatctggcttttcctgatacttttgcagatccatgttttcctgcacccatatagactagtgcccatggccaaagccattccagccctccccaatttaagacctcaggtggccactcccagtggtcttggtgttccaatggggcatacagtgccaggtttcttgttcctccagctgctgcttctaggagttagctgctac

SEQ ID NO: 14262 - DNA, 6621 bp, Homo sapiens
  source 1..6621: mol_type = unassigned DNA
tgcagggatgcggcggcgggagcagccgccctgactcgcggagcatcctcctcggagaggcaccgcggcggggcgggcgggcgggcggggacgcggcggggagggagagaggcgcgaggcggcagacaccgctagccctggctctgccacccgtcggagacggggcggccctgtagctctgctacccaccctccagcttctggcgccccgagaaccaggcatccctccctgctcttctgtcggagcccgcggcgggggaggggcgccgccgccgccgcctgagggaagccggcatctgggcctctgcgcgcctcgccccgcggccgggcccatggcactgtgagcctgcaagggagccccgctcagcgcggggagcgcccggccccctcccgccccatgcgcccgcggctctgaagcctgagcgggggccgggggccgggcggggccggggccgccgtaggcatggcgtccgggagccggtggcggccgacaccgccgccgctgctgttgctgctgctgctggcgctggcggcgcgcgcggacggcctggagttcggcggcggccccgggcagtgggctcgctacgcgcgctgggcgggcgcggcgagcagcggcgagctcagcttcagcctgcgcaccaacgccacgcgcgcgctgctgctctacctggacgacggcggcgactgcgacttcctggagctgctgctggtggacggccgcctgcggctgcgcttcacgctttcgtgcgccgagccggccacgctgcagctggacacgccggtggccgacgaccgctggcacatggtgctgctgacccgcgacgcgcgccgcacggcgctggcggtggacggcgaggcccgcgccgccgaggtgcgctccaagcggcgcgagatgcaggtggccagcgacctgttcgtgggcggcatcccgcccgacgtgcgcctctcggcgcttacgctgagcaccgtcaagtacgagccgcccttccgcggcctcttggccaacctgaagctgggcgagcggccccccgcgctgctgggcagccagggcctgcgcggcgccaccgccgacccgctgtgcgcgcccgcgcgcaacccctgcgccaacggcggcctctgcaccgtgctggcccccggcgaggtgggctgcgactgcagccacacgggcttcggcggcaagttctgcagcgaagaggagcaccccatggaaggtccggctcacctgacgttaaacagcgaagtagggtccttactgttctccgaggggggggccgggagaggaggagccggcgatgtgcaccagccaacaaaaggcaaggaggagtttgtggcgaccttcaaaggcaatgagttcttctgctacgacctgtcacacaaccccatccagagcagcactgatgagatcacactggccttccgcaccctgcaacgcaacggcctgatgctgcatacaggcaagtcggccgactacgtcaacctgtccctcaagtctggggctgtctggctggtcatcaacctaggctcaggtgccttcgaggcccttgtggaacccgtcaatggcaagttcaacgacaacgcctggcacgacgtccgggtcacccgaaacctgcgccagcacgcagggattggacacgctatggtaaacaaactgcattatctggtgaccatctcggtggacgggatcctgaccaccacaggctacacgcaggaggattacaccatgctgggctctgatgacttcttctacattgggggcagccccaacacagctgacctgccgggctcgcccgtcagcaacaacttcatgggctgcctcaaggacgtggtctataagaacaatgacttcaaattggaactatcccgcctggcaaaggaaggggaccccaagatgaagctgcagggggacttgtcattccgctgtgaggatgtggctgccctggaccctgtgacctttgagagtcccgaggcctttgtggcgctgccccgctggagcgctaagcgcactggctccatctccctagacttccgcaccaccgagcccaatgggctgctgctcttcagccagggccggcgggctgggggtggagctggcagccacagctctgctcagcgggccgactactttgccatggagctattggacggccacctctatcttctgctggacatgggatctgggggcatcaagctgcgggcatccagccgcaaggtcaatgatggcgagtggtgtcacgtggacttccagagggatgggcgaaaaggctccatctcagtgaatagtcgcagcacgccgttcttggccactggagacagcgagattctggacctggagagtgagctgtacctgggcggtctccctgaggggggccgggtggacctgcccctgcccccagaggtgtggacagcagcactccgggcaggctacgtgggctgtgtgcgggacctcttcatagatgggcgtagccgagacctccggggcctggctgaggctcagggggctgtgggcgttgcccccttttgctcccgggagacgctgaagcagtgtgcatctgccccctgtcgcaatgggggcgtctgtcgagaaggctggaaccgcttcatctgtgactgcatcgggaccggctttcttgggcgggtctgtgagagagaggccacggtcctgagctacgatggctccatgtacatgaagatcatgctgcctaacgccatgcacacggaggcagaggatgtgtccctgcgtttcatgtcccagcgggcctacggactcatgatggccaccacttccagggagtctgccgacaccctacgcctggagctggatggggggcagatgaagctcactgtcaacctcgactgcctgcgcgtcggctgcgcacccagtaaaggccccgaaacgctgtttgcggggcacaagctcaatgacaatgagtggcacacggtgagggtggtccggcgtggcaagagcctgcagctgtctgtggacaacgtgactgtggagggacagatggcaggagcccatatgcggctggagttccacaacattgagacgggcatcatgacggagcggcggtttatctccgtggtgccctccaacttcatcgggcatctgagtgggctcgtgttcaatggccagccctacatggaccagtgcaaggatggtgacatcacctactgtgagctcaatgctcgctttggcctgcgtgccatcgtggccgatcccgtcaccttcaagagtcgcagcagctacctggcactcgccacgctccaagcctatgcttccatgcacctcttcttccagttcaagaccacggcccctgatgggcttcttctgttcaactcgggcaacggcaatgacttcattgtcatcgagctggtcaaggggtacatccactacgtgtttgacctggggaatggcccgtccttgatgaaggggaactcagacaaaccagtcaatgacaaccagtggcacaacgtggtggtgtccagggacccaggcaacgtgcacacgctcaagattgactcccgcactgtcacgcagcactccaatggcgcccgaaacctcgatctcaaaggggagttgtacattggcggtctgagcaagaatatgttcagcaacctgcccaagctggtggcctcccgggatggctttcagggctgcctggcctcagtggacctcaacggacgtctcccagacctcatcgccgacgccctgcaccgcattgggcaggtggagaggggctgtgatggccccagcaccacctgcactgaagagtcctgtgccaaccagggcgtctgcttgcagcagtgggatggcttcacctgcgactgcaccatgacttcctatggaggccctgtctgcaatgatcccgggaccacatacatctttgggaaggggggagcgctcatcacctacacgtggccccccaatgacaggcccagcacgaggatggatcgcctggccgtgggcttcagcacccaccagcggagcgctgtgctggtgcgggtggacagcgcctccggccttggagactacctgcagctgcacatcgaccagggcaccgtgggggtgatctttaacgtgggcacggacgacattaccatcgacgagcccaacgccatagtaagcgacggcaaataccacgtggtgcgcttcactcgaagcggcggcaacgccaccctgcaggtggacagctggccggtcaacgagcggtacccggcaggaaactttgataacgagcgcctggcgattgctagacagagaatcccctaccggcttggtcgagtagtagatgagtggctgctcgacaaaggccgccagctgaccatcttcaacagccaggctgccatcaagatcgggggccgggatcagggccgccccttccagggccaggtgtccggcctctactacaatgggctcaaggtgctggcgctggccgccgagagcgaccccaatgtgcggactgagggtcacctgcgcctggtgggggaggggccgtccgtgctgctcagtgcggagaccacggccaccaccctgctggctgacatggccaccaccatcatggagactaccaccaccatggccactaccaccacgcgccggggccgctcccccacactgagggacagcaccacccagaacacagatgacctgctggtggcctctgctgagtgtccaagcgatgatgaggacctggaggagtgtgagcccagtactggaggagagttaatattgcccattatcacggaggactccttagacccccctcccgtggccacccgatcccccttcgtgcccccgccccctaccttctaccccttcctcacgggagtgggcgccacccaagacacgctgcccccgcccgccgcgcgccgcccgccctctgggggcccgtgccaggccgagcgggacgacagcgactgcgaggagcccatcgaggcctcgggcttcgcctccggggaggtctttgactccagcctcccccccacggacgacgaggacttttacaccacctttcccctggtcacggaccgcaccaccctcctgtcaccccgcaaacccgctccccggcccaacctcaggacagatggggccacgggcgcccctggggtgctgtttgccccctccgccccggcccccaacctgccggcgggcaaaatgaaccaccgagacccgcttcagcccttgctggagaacccgcccttggggcccggggcccccacgtcctttgagccgcggaggccccctcccctgcgccccggcgtgacctcagcccccggcttcccccatctgcccacagccaaccccacagggcctggggagcggggcccgccgggcgcagtggaggtgatccgggagtccagcagcaccacgggcatggtggtgggcattgtggcggcggcggcgctctgcatcctcatcctcctctacgccatgtataagtaccgcaatcgtgatgagggctcctaccaggtggaccagagccgaaactacatcagtaactcggcccagagcaatggggcggtggtgaaagagaaggccccggctgcccccaagacgcccagcaaggccaagaagaacaaagacaaggagtattatgtctgagcccccggcactgcgccccactgccagctgcccctcctgggagggcccgggaggagggtgccaccctctccctgccaggggcctggggaccctctccctggctgcctcaggcttctcttacgaagaggaaacgcaaaaaaagaaaaggaaaaaccccgtgctcgcccccttcctcctgccgtccactgcgcggcctcgtcagtcccggggctgactgtccctctcagctctgcgcctgccaggcagggcacgtgctcacagccctgggttgatttatttttttaagggggtagttttattttggtggggttgggtgggaaggaaggctgggggttttgtaaagtgtccactgctcgtcctgttaattttcctcaatttttcttcttcttccttctgtccctcctgccttccttctcttcccaagccctccaatccccatcccaggcttgctgtgtctcactgtccccaccctccttccctacttctttttttgtgtgtctggtttctcccttcctttcctccctttgggtttccagagtcggtgggagaagggcgggagggtgggcccgagtggcccagtgggtgggtggggtggggtggggcaagtgccccaactcccctcaccaggagaggcacctgcttggtgccgcccagggaaggggctcaggcctgacggaaggcctgttctgtgtgtgccgccgggcgacgtgcattgatggggaagctgctggaggagcaggggtggggggtgggagggaggggaaaggcaaatgcagatatatattacagacaaatactctagattccacgagcagcagcctgtggcacccgctgggcgcgggcagcagggaagagggagcaaggcattgtccacagactgctggggtcacttctttgcccacgggctccctgctcccccagttttttttctctctttgttaacaaatgtgtctgagtcttggaaaacaccccaaccccggaaatgtgtgggaaaaagaaaacaaaaactttccaaattcc

SEQ ID NO: 14263 - DNA, 6069 bp, Homo sapiens
  source 1..6069: mol_type = unassigned DNA
agtctcaggctcagcgctcagccctacacatcgcctcttgcatgcaactcacagagagggagaggcaacctgtcctcccctctctcagcctcggcatctccagccaccaaggacctgcttttcgcacctccaacaacccctcccttctaccctgccactccctcccagagagaaaggaaaaggagagagaaagattctggaatttgaacctacccaaagaggaaacatacccagcaaactcagttgattaaacatcaaacagacatacagacagatcccaaatcttctgttcaactggaaaggtcttttctctggagtcctgggaggcaagttatgggcagcactgcttctggccgcaccatgaagcctgagtctgcttgcgctctgcccagggccctgctctgtctgagcattgggcttctagctgcccccctccccacagcctgccgctgctaggaggtagaactttaggagtggtccttggcctgtttctacctgtcacctggctcacctcaccactcactcctcctccatcacagcaccccggccctccctgtccctggcctccctggctggggcatttgggggtccgctgggaggagtgcatcgctgaaggcttcttcctactctcctgcaccttctcctccttgagtcaaggcctccggatccacatggatagctgagatcttttcttggagaaagacgctttcctctttactccagtccctcacttccccacctgattttcctcctcttctgctggtcctgtctttttctactgcctctttattcaatttcttgcttgtgtgcccctctgggactctcttgtacactttcctccatctccactatctcaggatctgtgtgtgtgctgccttcctcctgtgtgctttctgtccccccatctctgtcttgtctttcccacttctattgccaaagggagagatcctctccgggctgttccctggcctgtctgctcctccgggctctgtcccagcagcgacaatgagctccacactccactcggttttcttcaccctgaaggtcagcatcctgctggggtccctgctggggctctgcctgggccttgagttcatgggcctccccaaccagtgggcccgctacctccgctgggatgccagcacacgcagtgacctgagtttccagttcaagaccaacgtctctacggggctgctcctctacctggatgatggcggcgtctgcgacttcctatgcctctccctggtggatggccgcgttcagctccgcttcagcatggactgtgccgagactgccgtgctgtccaacaagcaggtgaatgacagcagctggcacttcctcatggtgagccgtgaccgcctgcgcacggtgctgatgcttgatggcgagggccagtctggggagctgcagccccagcggccctacatggatgtggtcagtgacttgttccttggtggagtccctactgacatacgaccttctgccctgacccttgatggagttcaggccatgcccggcttcaaggggttaattctggatctcaagtatggaaactcggagcctcggcttctggggagccggggtgtccagatggatgccgagggaccctgtggtgagcgtccctgtgaaaatggtgggatctgctttctcctggacggccaccccacctgtgactgttctaccactggctatggtggcaagctctgctcagaaggcctctcccacctcatgatgagtgaacaaggtagaagtaaagctcgagaggagaatgtggccactttccgaggctcagagtatctgtgctacgacctgtctcagaacccgatccagagcagcagtgatgaaatcaccctctcctttaagacctggcagcgtaacggcctcatcctgcacacgggcaagtcggctgactatgtcaacctggctctgaaggatggtgcggtctccttggtcattaacctggggtccggggcctttgaggccattgtggagccagtgaatggaaaattcaacgacaacgcctggcatgatgtcaaagtgacacgcaacctccggcaggtgacaatctctgtggatggcattcttaccacgacgggctacactcaagaggactataccatgctgggctcggacgacttcttctatgtaggaggaagcccaagtaccgctgacttgcctggctcccctgtcagcaacaacttcatgggctgccttaaagaggttgtttataagaataatgacatccgtctggagctgtctcgcctggcccggattgcggacaccaagatgaaaatctatggcgaagttgtgtttaagtgtgagaatgtggccacactggaccccatcaactttgagaccccagaggcttacatcagcttgcccaagtggaacactaaacgtatgggctccatctcctttgacttccgcaccacagagcccaatggcctgatcctcttcactcatggaaagccccaagagaggaaggatgctcggagccagaagaatacaaaagtagacttctttgccgtggaactcctcgatggcaacctgtacttgctgcttgacatgggctctggcaccatcaaagtgaaagccactcagaagaaagccaatgatggggaatggtaccatgtggacattcagcgagatggcagatcaggtactatatcagtgaacagcaggcgcacgccattcaccgccagtggggagagcgagatcctggacctggaaggagacatgtacctgggagggctgccggagaaccgtgctggccttattctccccaccgagctgtggactgccatgctcaactatggctacgtgggctgcatccgcgacctattcattgatgggcgcagcaagaacattcgacagctggcagagatgcagaatgctgcgggtgtcaagtcctcctgttcacggatgagtgccaagcagtgtgacagctacccctgcaagaataatgctgtgtgcaaggacggctggaaccgcttcatctgcgactgcaccggcaccggatactggggaagaacctgcgaaagggaggcatccatcctgagctatgatggtagcatgtacatgaagatcatcatgcccatggtcatgcatactgaggcagaggatgtgtccttccgcttcatgtcccagcgagcttatgggctgctggtggctacgacctccagggactctgccgacaccctgcgtctggagctggatggggggcgtgtcaagctcatggttaacttaggcaaaggaccagagaccttgtatgcagggcagaagctcaatgacaacgagtggcacaccgttcgggtggtgcggagaggaaaaagccttaagttaaccgtggatgatgatgtggctgagggtacaatggtgggagaccatacccgtttggagttccacaacattgaaacgggaatcatgactgagaaacgctacatctccgttgtcccctccagctttattggccatctgcagagcctcatgtttaatggccttctctacattgacttgtgcaaaaatggtgacattgattattgtgagctgaaggctcgttttggactgaggaacatcatcgctgaccctgtcacctttaagaccaagagcagctacctgagccttgccactcttcaggcttacacctccatgcacctcttcttccagttcaagaccacctcaccagatggcttcattctcttcaatagtggtgatggcaatgacttcattgcagtcgagcttgtcaaggggtatatacactacgtttttgacctcggaaacggtcccaatgtgatcaaaggcaacagtgaccgccccctgaatgacaaccagtggcacaatgtcgtcatcactcgggacaatagtaacactcatagcctgaaagtggacaccaaagtggtcactcaggttatcaatggtgccaaaaatctggatttgaaaggtgatctctatatggctggtctggcccaaggcatgtacagcaacctcccaaagctcgtggcctctcgagatggctttcagggctgtctagcatcagtggacttgaatggacgcctgccagacctcatcaatgatgctcttcatcggagcggacagatcgagcgtggctgtgaaggacccagtaccacctgccaggaagattcatgtgccaaccagggggtctgcatgcaacaatgggagggcttcacctgtgattgttctatgacctcttattctggaaaccagtgcaatgatcctggcgctacgtacatctttgggaaaagtggtgggcttatcctctacacctggccagccaatgacaggcccagcacgcggtctgaccgccttgccgtgggcttcagcaccactgtgaaggatggcatcttggtccgcatcgacagtgctccaggacttggtgacttcctccagcttcacatagaacaggggaaaattggagttgtcttcaacattggcacagttgacatctccatcaaagaggagagaacccctgtaaatgacggcaaataccatgtggtacgcttcaccaggaacggcggcaacgccaccctgcaggtggacaactggccagtgaatgaacattatcctacaggcaacactgataatgaacgcttccaaatggtaaaacagaaaatccccttcaaatataatcggcctgtagaggagtggctgcaggaaaaaggccggcagttaaccatcttcaacactcaggcgcaaatagccattggtggaaaggacaaaggacgcctcttccaaggccaactctctgggctctattatgatggtttgaaagtactgaacatggcggctgagaacaaccccaatattaaaatcaatggaagtgttcggctggttggagaagtcccatcaattttgggaacaacacagacgacctccatgccaccagaaatgtctactactgtcatggaaaccactactacaatggcgactaccacaacccgtaagaatcgctctacagccagcattcagccaacatcagatgatcttgtttcatctgctgaatgttcaagtgatgatgaagactttgttgaatgtgagccgagtacaggtaggtcaggaggtgaattagttatccctcttcttgtagaagaccctttagctacccctcctattgctactcgtgcaccttccattacactcccccctacctttcgccccctcctcaccattattgagaccaccaaagattccctgtccatgacctctgaggcggggttaccttgcttgtcggaccaaggcagcgatggttgtgatgatgatggcttggtgatatctgggtatggctcaggggaaacctttgactctaacctgccccctactgatgatgaagatttttacaccaccttctccttggtaacagataagagtctttccacttcaatcttcgaaggtggctacaaagcacatgcgcccaagtgggaatccaaggactttagacctaacaaagtctccgaaactagtaggactactaccacatctttatcccctgagctgatccgcttcacagcttcctcctcgtctgggatggtgcccaaattgccagctggcaaaatgaataaccgtgatctcaaaccccagcctgatatagtcttgcttccgttgcccactgcctatgagctagacagcaccaaactgaagagcccactaattacttcccccatgttccgtaatgtgcccacagcaaaccccacggagccgggaatcagacgggttccgggggcctcagaggtgatccgggagtcgagcagcacaacagggatggtcgtcggcattgtggctgctgccgccctctgcatcttgatcctcctgtacgccatgtacaagtacaggaacagggacgaggggtcctatcaagtggacgagacgcggaactacatcagcaactccgcccagagcaacggcacgctcatgaaggagaagcagcagagctcgaagagcggccacaagaaacagaaaaacaaggacagggagtattacgtgtaaacatgcgaacactgctcacacgcgagttttcacagttatttctatccacgcctatgaatctttggacgg

SEQ ID NO: 14264 - DNA, 6446 bp, Homo sapiens
  source 1..6446: mol_type = unassigned DNA
gtcttttctctggagtcctgggaggcaagttatgggcagcactgcttctggccgcaccatgaagcctgagtctgcttgcgctctgcccagggccctgctctgtctgagcattgggcttctagctgcccccctccccacagcctgccgctgctaggaggtagaactttaggagtggtccttggcctgtttctacctgtcacctggctcacctcaccactcactcctcctccatcacagcaccccggccctccctgtccctggcctccctggctggggcatttgggggtccgctgggaggagtgcatcgctgaaggcttcttcctactctcctgcaccttctcctccttgagtcaaggcctccggatccacatggatagctgagatcttttcttggagaaagacgctttcctctttactccagtccctcacttccccacctgattttcctcctcttctgctggtcctgtctttttctactgcctctttattcaatttcttgcttgtgtgcccctctgggactctcttgtacactttcctccatctccactatctcaggatctgtgtgtgtgctgccttcctcctgtgtgctttctgtccccccatctctgtcttgtctttcccacttctattgccaaagggagagatcctctccgggctgttccctggcctgtctgctcctccgggctctgtcccagcagcgacaatgagctccacactccactcggttttcttcaccctgaaggtcagcatcctgctggggtccctgctggggctctgcctgggccttgagttcatgggcctccccaaccagtgggcccgctacctccgctgggatgccagcacacgcagtgacctgagtttccagttcaagaccaacgtctctacggggctgctcctctacctggatgatggcggcgtctgcgacttcctatgcctctccctggtggatggccgcgttcagctccgcttcagcatggactgtgccgagactgccgtgctgtccaacaagcaggtgaatgacagcagctggcacttcctcatggtgagccgtgaccgcctgcgcacggtgctgatgcttgatggcgagggccagtctggggagctgcagccccagcggccctacatggatgtggtcagtgacttgttccttggtggagtccctactgacatacgaccttctgccctgacccttgatggagttcaggccatgcccggcttcaaggggttaattctggatctcaagtatggaaactcggagcctcggcttctggggagccggggtgtccagatggatgccgagggaccctgtggtgagcgtccctgtgaaaatggtgggatctgctttctcctggacggccaccccacctgtgactgttctaccactggctatggtggcaagctctgctcagaaggcctctcccacctcatgatgagtgaacaaggtagaagtaaagctcgagaggagaatgtggccactttccgaggctcagagtatctgtgctacgacctgtctcagaacccgatccagagcagcagtgatgaaatcaccctctcctttaagacctggcagcgtaacggcctcatcctgcacacgggcaagtcggctgactatgtcaacctggctctgaaggatggtgcggtctccttggtcattaacctggggtccggggcctttgaggccattgtggagccagtgaatggaaaattcaacgacaacgcctggcatgatgtcaaagtgacacgcaacctccggcaggtgacaatctctgtggatggcattcttaccacgacgggctacactcaagaggactataccatgctgggctcggacgacttcttctatgtaggaggaagcccaagtaccgctgacttgcctggctcccctgtcagcaacaacttcatgggctgccttaaagaggttgtttataagaataatgacatccgtctggagctgtctcgcctggcccggattgcggacaccaagatgaaaatctatggcgaagttgtgtttaagtgtgagaatgtggccacactggaccccatcaactttgagaccccagaggcttacatcagcttgcccaagtggaacactaaacgtatgggctccatctcctttgacttccgcaccacagagcccaatggcctgatcctcttcactcatggaaagccccaagagaggaaggatgctcggagccagaagaatacaaaagtagacttctttgccgtggaactcctcgatggcaacctgtacttgctgcttgacatgggctctggcaccatcaaagtgaaagccactcagaagaaagccaatgatggggaatggtaccatgtggacattcagcgagatggcagatcaggtactatatcagtgaacagcaggcgcacgccattcaccgccagtggggagagcgagatcctggacctggaaggagacatgtacctgggagggctgccggagaaccgtgctggccttattctccccaccgagctgtggactgccatgctcaactatggctacgtgggctgcatccgcgacctattcattgatgggcgcagcaagaacattcgacagctggcagagatgcagaatgctgcgggtgtcaagtcctcctgttcacggatgagtgccaagcagtgtgacagctacccctgcaagaataatgctgtgtgcaaggacggctggaaccgcttcatctgcgactgcaccggcaccggatactggggaagaacctgcgaaagggaggcatccatcctgagctatgatggtagcatgtacatgaagatcatcatgcccatggtcatgcatactgaggcagaggatgtgtccttccgcttcatgtcccagcgagcttatgggctgctggtggctacgacctccagggactctgccgacaccctgcgtctggagctggatggggggcgtgtcaagctcatggttaacttaggcaaaggaccagagaccttgtatgcagggcagaagctcaatgacaacgagtggcacaccgttcgggtggtgcggagaggaaaaagccttaagttaaccgtggatgatgatgtggctgagggtacaatggtgggagaccatacccgtttggagttccacaacattgaaacgggaatcatgactgagaaacgctacatctccgttgtcccctccagctttattggccatctgcagagcctcatgtttaatggccttctctacattgacttgtgcaaaaatggtgacattgattattgtgagctgaaggctcgttttggactgaggaacatcatcgctgaccctgtcacctttaagaccaagagcagctacctgagccttgccactcttcaggcttacacctccatgcacctcttcttccagttcaagaccacctcaccagatggcttcattctcttcaatagtggtgatggcaatgacttcattgcagtcgagcttgtcaaggggtatatacactacgtttttgacctcggaaacggtcccaatgtgatcaaaggcaacagtgaccgccccctgaatgacaaccagtggcacaatgtcgtcatcactcgggacaatagtaacactcatagcctgaaagtggacaccaaagtggtcactcaggttatcaatggtgccaaaaatctggatttgaaaggtgatctctatatggctggtctggcccaaggcatgtacagcaacctcccaaagctcgtggcctctcgagatggctttcagggctgtctagcatcagtggacttgaatggacgcctgccagacctcatcaatgatgctcttcatcggagcggacagatcgagcgtggctgtgaaggacccagtaccacctgccaggaagattcatgtgccaaccagggggtctgcatgcaacaatgggagggcttcacctgtgattgttctatgacctcttattctggaaaccagtgcaatgatcctggcgctacgtacatctttgggaaaagtggtgggcttatcctctacacctggccagccaatgacaggcccagcacgcggtctgaccgccttgccgtgggcttcagcaccactgtgaaggatggcatcttggtccgcatcgacagtgctccaggacttggtgacttcctccagcttcacatagaacaggggaaaattggagttgtcttcaacattggcacagttgacatctccatcaaagaggagagaacccctgtaaatgacggcaaataccatgtggtacgcttcaccaggaacggcggcaacgccaccctgcaggtggacaactggccagtgaatgaacattatcctacaggcaacactgataatgaacgcttccaaatggtaaaacagaaaatccccttcaaatataatcggcctgtagaggagtggctgcaggaaaaaggccggcagttaaccatcttcaacactcaggcgcaaatagccattggtggaaaggacaaaggacgcctcttccaaggccaactctctgggctctattatgatggtttgaaagtactgaacatggcggctgagaacaaccccaatattaaaatcaatggaagtgttcggctggttggagaagtcccatcaattttgggaacaacacagacgacctccatgccaccagaaatgtctactactgtcatggaaaccactactacaatggcgactaccacaacccgtaagaatcgctctacagccagcattcagccaacatcagatgatcttgtttcatctgctgaatgttcaagtgatgatgaagactttgttgaatgtgagccgagtacaggtaggtcagccagaagctctaatgcagctagatcactccgtgccgcccttacatggacatggcgactcacttacacatttactcctatcatcttcatctcctgtgtagttcactcatagatatgaccctccccttcctgcatctttccttcccattctccccctttctttagcattgttaaaatttatgtgctgtcatccatctccctaaattaaagaaagcctaaaatttgtcaaaaagacaaaaaaatatatatatctgaaaacttataaatgcagaaattcattcaaaacccgttagagtcatagaattttttgaaaggcaaattataaaagtaaacaggtttttttgtttggtttttcaatcatagcaatcggaattattttaaattcaaaaattgatgccctcccaaaccccccaaagtaaaaatttgttaaagtgcagattttttttttctttttatgttatgtggtgtggatgtatgtgttgttgcctccctgtatcatcctctgttgtaaattattatatttgaaaaattagacattttgctcaaaagtttttaagaaatgacaacaaaaaaagcaagttacaagaatgtggcaattctatttgtccaagagcattcttacacaactttcttttgtaaatttttctttcatgccaaaaaacatgcgggcaatttgttgatgaggtgaattagttatccctcttcttgtagaagaccctttagctacccctcctattgctactcgtgcaccttccattacactcccccctacctttcgccccctcctcaccattattgagaccaccaaagattccctgtccatgacctctgaggcggggttaccttgcttgtcggaccaaggcagcgatggttgtgatgatgatggcttggtgatatctgggtatggctcaggggaaacctttgactctaacctgccccctactgatgatgaagatttttacaccaccttctccttggtaacagataagagtctttccacttcaatcttcgaaggtggctacaaagcacatgcgcccaagtgggaatccaaggactttagacctaacaaagtctccgaaactagtaggactactaccacatctttatcccctgagctgatccgcttcacagcttcctcctcgtctgggatggtgcccaaattgccagctggcaaaatgaataaccgtgatctcaaaccccagcctgatatagtcttgcttccgttgcccactgcctatgagctagacagcaccaaactgaagagcccactaattacttcccccatgttccgtaatgtgcccacagcaaaccccacggagccgggaatcagacgggttccgggggcctcagaggtgatccgggagtcgagcagcacaacagggatggtcgtcggcattgtggctgctgccgccctctgcatcttgatcctcctgtacgccatgtacaagtacaggaacagggacgaggggtcctatcaagtggacgagacgcggaactacatcagcaactccgcccagagcaacggcacgctcatgaaggagaagcagcagagctcgaagagcggccacaagaaacagaaaaacaaggacagggagtattacgtgtaaacatgcgaacactgctcacacgcgagttttcacagttatttctatccacgcctatgaatctttggacgg

SEQ ID NO: 14265 - DNA, 5254 bp, Homo sapiens
  source 1..5254: mol_type = unassigned DNA
ctctccgggctgttccctggcctgtctgctcctccgggctctgtcccagcagcgacaatgagctccacactccactcggttttcttcaccctgaaggtcagcatcctgctggggtccctgctggggctctgcctgggccttgagttcatgggcctccccaaccagtgggcccgctacctccgctgggatgccagcacacgcagtgacctgagtttccagttcaagaccaacgtctctacggggctgctcctctacctggatgatggcggcgtctgcgacttcctatgcctctccctggtggatggccgcgttcagctccgcttcagcatggactgtgccgagactgccgtgctgtccaacaagcaggtgaatgacagcagctggcacttcctcatggtgagccgtgaccgcctgcgcacggtgctgatgcttgatggcgagggccagtctggggagctgcagccccagcggccctacatggatgtggtcagtgacttgttccttggtggagtccctactgacatacgaccttctgccctgacccttgatggagttcaggccatgcccggcttcaaggggttaattctggatctcaagtatggaaactcggagcctcggcttctggggagccggggtgtccagatggatgccgagggaccctgtggtgagcgtccctgtgaaaatggtgggatctgctttctcctggacggccaccccacctgtgactgttctaccactggctatggtggcaagctctgctcagaagatgtcagtcaagatccaggcctctcccacctcatgatgagtgaacaagctcgagaggagaatgtggccactttccgaggctcagagtatctgtgctacgacctgtctcagaacccgatccagagcagcagtgatgaaatcaccctctcctttaagacctggcagcgtaacggcctcatcctgcacacgggcaagtcggctgactatgtcaacctggctctgaaggatggtgcggtctccttggtcattaacctggggtccggggcctttgaggccattgtggagccagtgaatggaaaattcaacgacaacgcctggcatgatgtcaaagtgacacgcaacctccggcaggtgacaatctctgtggatggcattcttaccacgacgggctacactcaagaggactataccatgctgggctcggacgacttcttctatgtaggaggaagcccaagtaccgctgacttgcctggctcccctgtcagcaacaacttcatgggctgccttaaagaggttgtttataagaataatgacatccgtctggagctgtctcgcctggcccggattgcggacaccaagatgaaaatctatggcgaagttgtgtttaagtgtgagaatgtggccacactggaccccatcaactttgagaccccagaggcttacatcagcttgcccaagtggaacactaaacgtatgggctccatctcctttgacttccgcaccacagagcccaatggcctgatcctcttcactcatggaaagccccaagagaggaaggatgctcggagccagaagaatacaaaagtagacttctttgccgtggaactcctcgatggcaacctgtacttgctgcttgacatgggctctggcaccatcaaagtgaaagccactcagaagaaagccaatgatggggaatggtaccatgtggacattcagcgagatggcagatcaggtactatatcagtgaacagcaggcgcacgccattcaccgccagtggggagagcgagatcctggacctggaaggagacatgtacctgggagggctgccggagaaccgtgctggccttattctccccaccgagctgtggactgccatgctcaactatggctacgtgggctgcatccgcgacctattcattgatgggcgcagcaagaacattcgacagctggcagagatgcagaatgctgcgggtgtcaagtcctcctgttcacggatgagtgccaagcagtgtgacagctacccctgcaagaataatgctgtgtgcaaggacggctggaaccgcttcatctgcgactgcaccggcaccggatactggggaagaacctgcgaaagggaggcatccatcctgagctatgatggtagcatgtacatgaagatcatcatgcccatggtcatgcatactgaggcagaggatgtgtccttccgcttcatgtcccagcgagcttatgggctgctggtggctacgacctccagggactctgccgacaccctgcgtctggagctggatggggggcgtgtcaagctcatggttaacttagactgtatcaggataaactgtaactccagcaaaggaccagagaccttgtatgcagggcagaagctcaatgacaacgagtggcacaccgttcgggtggtgcggagaggaaaaagccttaagttaaccgtggatgatgatgtggctgagggtacaatggtgggagaccatacccgtttggagttccacaacattgaaacgggaatcatgactgagaaacgctacatctccgttgtcccctccagctttattggccatctgcagagcctcatgtttaatggccttctctacattgacttgtgcaaaaatggtgacattgattattgtgagctgaaggctcgttttggactgaggaacatcatcgctgaccctgtcacctttaagaccaagagcagctacctgagccttgccactcttcaggcttacacctccatgcacctcttcttccagttcaagaccacctcaccagatggcttcattctcttcaatagtggtgatggcaatgacttcattgcagtcgagcttgtcaaggggtatatacactacgtttttgacctcggaaacggtcccaatgtgatcaaaggcaacagtgaccgccccctgaatgacaaccagtggcacaatgtcgtcatcactcgggacaatagtaacactcatagcctgaaagtggacaccaaagtggtcactcaggttatcaatggtgccaaaaatctggatttgaaaggtgatctctatatggctggtctggcccaaggcatgtacagcaacctcccaaagctcgtggcctctcgagatggctttcagggctgtctagcatcagtggacttgaatggacgcctgccagacctcatcaatgatgctcttcatcggagcggacagatcgagcgtggctgtgaaggacccagtaccacctgccaggaagattcatgtgccaaccagggggtctgcatgcaacaatgggagggcttcacctgtgattgttctatgacctcttattctggaaaccagtgcaatgatcctggcgctacgtacatctttgggaaaagtggtgggcttatcctctacacctggccagccaatgacaggcccagcacgcggtctgaccgccttgccgtgggcttcagcaccactgtgaaggatggcatcttggtccgcatcgacagtgctccaggacttggtgacttcctccagcttcacatagaacaggggaaaattggagttgtcttcaacattggcacagttgacatctccatcaaagaggagagaacccctgtaaatgacggcaaataccatgtggtacgcttcaccaggaacggcggcaacgccaccctgcaggtggacaactggccagtgaatgaacattatcctacaggcaacactgataatgaacgcttccaaatggtaaaacagaaaatccccttcaaatataatcggcctgtagaggagtggctgcaggaaaaaggccggcagttaaccatcttcaacactcaggcgcaaatagccattggtggaaaggacaaaggacgcctcttccaaggccaactctctgggctctattatgatggtttgaaagtactgaacatggcggctgagaacaaccccaatattaaaatcaatggaagtgttcggctggttggagaagtcccatcaattttgggaacaacacagacgacctccatgccaccagaaatgtctactactgtcatggaaaccactactacaatggcgactaccacaacccgtaagaatcgctctacagccagcattcagccaacatcagatgatcttgtttcatctgctgaatgttcaagtgatgatgaagactttgttgaatgtgagccgagtacagataagagtctttccacttcaatcttcgaaggtggctacaaagcacatgcgcccaagtgggaatccaaggactttagacctaacaaagtctccgaaactagtaggactactaccacatctttatcccctgagctgatccgcttcacagcttcctcctcgtctgggatggtgcccaaattgccagctggcaaaatgaataaccgtgatctcaaaccccagcctgatatagtcttgcttccgttgcccactgcctatgagctagacagcaccaaactgaagagcccactaattacttcccccatgttccgtaatgtgcccacagcaaaccccacggagccgggaatcagacgggttccgggggcctcagaggtgatccgggagtcgagcagcacaacagggatggtcgtcggcattgtggctgctgccgccctctgcatcttgatcctcctgtacgccatgtacaagtacaggaacagggacgaggggtcctatcaagtggacgagacgcggaactacatcagcaactccgcccagagcaacggcacgctcatgaaggagaagcagcagagctcgaagagcggccacaagaaacagaaaaacaaggacagggagtattacgtgtaaacatgcgaacactgctcacacgcgagttttcacagttatttctatccacgcctatgaatctttggacggtgagatctcacagatgtcagaactgctggaactatgaaatggggtatataaccacgactctggtggggaaaaccgttttttaaaggacacacacacacacagcgatgcatctctctctaaagctcagccacggctgcggcaaggtcccagcggtcgctgggagacagaaggttttgtgccctgctgtatcataaagcacacacttagcgctctggagccggacggtggctccaccacttccgcaggcctggaaacttccttctccggaggaccttttactaaaaggtagaagacttcatggcttacttgttccataactccaagtgagtctgtaatgtttgtgaagcttgactgtaaccatgttttttctgtttaattatgtaaaaaacaaaactacaacaacaaaaaaaga

SEQ ID NO: 14266 - DNA, 557 bp, Homo sapiens
  source 1..557: mol_type = unassigned DNA
ccggcttcaaggggttaattctggatctcaagtatggaaactcggagcctcggcttctggggagccggggtgtccagatggatgccgagggaccctgtggtgagcgtccctgtgaaaatggtgggatctgctttctcctggacggccaccccacctgtgactgttctaccactggctatggtggcaagctctgctcagaagatgtcagtcaagatccaggcctctcccacctcatgatgagtgaacaagctcgagaggagaatgtggccactttccgaggctcagagtatctgtgctacgacctgtctcagaacccgatccagagcagcagtgatgaaatcaccctctcctttaagacctggcagcgtaacggcctcatcctgcacacgggcaagtcggctgactatgtcaacctggctctgaaggatggtgcggtctccttggtcattaacctggggtccggggcctttgaggccattgtggagccagtgaatggaaaattcaacgacaacgcctggcatgatgtcaaagtgacacgcaacctccggcaggtaatg

SEQ ID NO: 14267 - DNA, 523 bp, Homo sapiens
  source 1..523: mol_type = unassigned DNA
agatgtcagtcaagatccaggcctctcccacctcatgatgagtgaacaagctcgagaggagaatgtggccactttccgaggctcagagtatctgtgctacgacctgtctcagaacccgatccagagcagcagtgatgaaatcaccctctcctttaagacctggcagcgtaacggcctcatcctgcacacgggcaagtcggctgactatgtcaacctggctctgaaggatggtgcggtctccttggtcattaacctggggtccggggcctttgaggccattgtggagccagtgaatggaaaattcaacgacaacgcctggcatgatgtcaaagtgacacgcaacctccggcagcactcaggcatcggacacgctatggtgacaatctctgtggatggcattcttaccacgacgggctacactcaagaggactataccatgctgggctcggacgacttcttctatgtaggaggaagcccaagtaccgctgacttgcctggctcccctgtcagcaacaacttcatg

SEQ ID NO: 14268 - DNA, 509 bp, Homo sapiens
  source 1..509: mol_type = unassigned DNA
aattgctccgggagagacacaggactggagggcttgaggaatgtggtggtccctctcttcgttgtttctgccccctgaggttgtgctttctcagggatatgcactctgcacttccattcctgcagtgaaattaactcgagcttggcagggcacctgacgtccttccttattactgatggcagcagagactgaacccctgggagaggaaagtgaactgagttgtttataagaataatgacatccgtctggagctgtctcgcctggcccggattgcggacaccaagatgaaaatctatggcgaagttgtgtttaagtgtgagaatgtggccacactggaccccatcaactttgagaccccagaggcttacatcagcttgcccaagtggaacactaaacgtatgggctccatctcctttgacttccgcaccacagagcccaatggcctgatcctcttcactcatggaaagccccaagagaggaaggatgctcggagccagaagaatacaaaa

SEQ ID NO: 14269 - DNA, 4156 bp, Homo sapiens
  source 1..4156: mol_type = unassigned DNA
caggactggagggcttgaggaatgtggtggtccctctcttcgttgtttctgccccctgaggttgtgctttctcagggatatgcactctgcacttccattcctgcagtgaaattaactcgagcttggcagctcgagaggagaatgtggccactttccgaggctcagagtatctgtgctacgacctgtctcagaacccgatccagagcagcagtgatgaaatcaccctctcctttaagacctggcagcgtaacggcctcatcctgcacacgggcaagtcggctgactatgtcaacctggctctgaaggatggtgcggtctccttggtcattaacctggggtccggggcctttgaggccattgtggagccagtgaatggaaaattcaacgacaacgcctggcatgatgtcaaagtgacacgcaacctccggcaggtgacaatctctgtggatggcattcttaccacgacgggctacactcaagaggactataccatgctgggctcggacgacttcttctatgtaggaggaagcccaagtaccgctgacttgcctggctcccctgtcagcaacaacttcatgggctgccttaaagaggttgtttataagaataatgacatccgtctggagctgtctcgcctggcccggattgcggacaccaagatgaaaatctatggcgaagttgtgtttaagtgtgagaatgtggccacactggaccccatcaactttgagaccccagaggcttacatcagcttgcccaagtggaacactaaacgtatgggctccatctcctttgacttccgcaccacagagcccaatggcctgatcctcttcactcatggaaagccccaagagaggaaggatgctcggagccagaagaatacaaaagtagacttctttgccgtggaactcctcgatggcaacctgtacttgctgcttgacatgggctctggcaccatcaaagtgaaagccactcagaagaaagccaatgatggggaatggtaccatgtggacattcagcgagatggcagatcaggtactatatcagtgaacagcaggcgcacgccattcaccgccagtggggagagcgagatcctggacctggaaggagacatgtacctgggagggctgccggagaaccgtgctggccttattctccccaccgagctgtggactgccatgctcaactatggctacgtgggctgcatccgcgacctattcattgatgggcgcagcaagaacattcgacagctggcagagatgcagaatgctgcgggtgtcaagtcctcctgttcacggatgagtgccaagcagtgtgacagctacccctgcaagaataatgctgtgtgcaaggacggctggaaccgcttcatctgcgactgcaccggcaccggatactggggaagaacctgcgaaagggaggcatccatcctgagctatgatggtagcatgtacatgaagatcatcatgcccatggtcatgcatactgaggcagaggatgtgtccttccgcttcatgtcccagcgagcttatgggctgctggtggctacgacctccagggactctgccgacaccctgcgtctggagctggatggggggcgtgtcaagctcatggttaacttagactgtatcaggataaactgtaactccagcaaaggaccagagaccttgtatgcagggcagaagctcaatgacaacgagtggcacaccgttcgggtggtgcggagaggaaaaagccttaagttaaccgtggatgatgatgtggctgagggtacaatggtgggagaccatacccgtttggagttccacaacattgaaacgggaatcatgactgagaaacgctacatctccgttgtcccctccagctttattggccatctgcagagcctcatgtttaatggccttctctacattgacttgtgcaaaaatggtgacattgattattgtgagctgaaggctcgttttggactgaggaacatcatcgctgaccctgtcacctttaagaccaagagcagctacctgagccttgccactcttcaggcttacacctccatgcacctcttcttccagttcaagaccacctcaccagatggcttcattctcttcaatagtggtgatggcaatgacttcattgcagtcgagcttgtcaaggggtatatacactacgtttttgacctcggaaacggtcccaatgtgatcaaaggcaacagtgaccgccccctgaatgacaaccagtggcacaatgtcgtcatcactcgggacaatagtaacactcatagcctgaaagtggacaccaaagtggtcactcaggttatcaatggtgccaaaaatctggatttgaaaggtgatctctatatggctggtctggcccaaggcatgtacagcaacctcccaaagctcgtggcctctcgagatggctttcagggctgtctagcatcagtggacttgaatggacgcctgccagacctcatcaatgatgctcttcatcggagcggacagatcgagcgtggctgtgaaggacccagtaccacctgccaggaagattcatgtgccaaccagggggtctgcatgcaacaatgggagggcttcacctgtgattgttctatgacctcttattctggaaaccagtgcaatgatcctggcgctacgtacatctttgggaaaagtggtgggcttatcctctacacctggccagccaatgacaggcccagcacgcggtctgaccgccttgccgtgggcttcagcaccactgtgaaggatggcatcttggtccgcatcgacagtgctccaggacttggtgacttcctccagcttcacatagaacaggggaaaattggagttgtcttcaacattggcacagttgacatctccatcaaagaggagagaacccctgtaaatgacggcaaataccatgtggtacgcttcaccaggaacggcggcaacgccaccctgcaggtggacaactggccagtgaatgaacattatcctacaggccggcagttaaccatcttcaacactcaggcgcaaatagccattggtggaaaggacaaaggacgcctcttccaaggccaactctctgggctctattatgatggtttgaaagtactgaacatggcggctgagaacaaccccaatattaaaatcaatggaagtgttcggctggttggagaagtcccatcaattttgggaacaacacagacgacctccatgccaccagaaatgtctactactgtcatggaaaccactactacaatggcgactaccacaacccgtaagaatcgctctacagccagcattcagccaacatcagatgatcttgtttcatctgctgaatgttcaagtgatgatgaagactttgttgaatgtgagccgagtacagcaaaccccacggagccgggaatcagacgggttccgggggcctcagaggtgatccgggagtcgagcagcacaacagggatggtcgtcggcattgtggctgctgccgccctctgcatcttgatcctcctgtacgccatgtacaagtacaggaacagggacgaggggtcctatcaagtggacgagacgcggaactacatcagcaactccgcccagagcaacggcacgctcatgaaggagaagcagcagagctcgaagagcggccacaagaaacagaaaaacaaggacagggagtattacgtgtaaacatgcgaacactgctcacacgcgagttttcacagttatttctatccacgcctatgaatctttggacggtgagatctcacagatgtcagaactgctggaactatgaaatggggtatataaccacgactctggtggggaaaaccgttttttaaaggacacacacacacacagcgatgcatctctctctaaagctcagccacggctgcggcaaggtcccagcggtcgctgggagacagaaggttttgtgccctgctgtatcataaagcacacacttagcgctctggagccggacggtggctccaccacttccgcaggcctggaaacttccttctccggaggaccttttactaaaaggtagaagacttcatggcttacttgttccataactccaagtgagtctgtaatgtttgtgaagcttgactgtaaccatgttttttctgtttaattatgtaaaaaacaaaactacaacaacaaaaaaa

SEQ ID NO: 14270 - DNA, 2737 bp, Homo sapiens
  source 1..2737: mol_type = unassigned DNA
ttcttcagtgcccagttttctgccgtgggatggtgttaggcccgggaagaacagagcctaaatgcacccctctacccacttccaccgggatcttgacgaagctcgagaggagaatgtggccactttccgaggctcagagtatctgtgctacgacctgtctcagaacccgatccagagcagcagtgatgaaatcaccctctcctttaagacctggcagcgtaacggcctcatcctgcacacgggcaagtcggctgactatgtcaacctggctctgaaggatggtgcggtctccttggtcattaacctggggtccggggcctttgaggccattgtggagccagtgaatggaaaattcaacgacaacgcctggcatgatgtcaaagtgacacgcaacctccggcaggtgacaatctctgtggatggcattcttaccacgacgggctacactcaagaggactataccatgctgggctcggacgacttcttctatgtaggaggaagcccaagtaccgctgacttgcctggctcccctgtcagcaacaacttcatgggctgccttaaagaggttgtttataagaataatgacatccgtctggagctgtctcgcctggcccggattgcggacaccaagatgaaaatctatggcgaagttgtgtttaagtgtgagaatgtggccacactggaccccatcaactttgagaccccagaggcttacatcagcttgcccaagtggaacactaaacgtatgggctccatctcctttgacttccgcaccacagagcccaatggcctgatcctcttcactcatggaaagccccaagagaggaaggatgctcggagccagaagaatacaaaagtagacttctttgccgtggaactcctcgatggcaacctgtacttgctgcttgacatgggctctggcaccatcaaagtgaaagccactcagaagaaagccaatgatggggaatggtaccatgtggacattcagcgagatggcagatcaggtactatatcagtgaacagcaggcgcacgccattcaccgccagtggggagagcgagatcctggacctggaaggagacatgtacctgggagggctgccggagaaccgtgctggccttattctccccaccgagctgtggactgccatgctcaactatggctacgtgggctgcatccgcgacctattcattgatgggcgcagcaagaacattcgacagctggcagagatgcagaatgctgcgggtgtcaagtcctcctgttcacggatgagtgccaagcagtgtgacagctacccctgcaagaataatgctgtgtgcaaggacggctggaaccgcttcatctgcgactgcaccggcaccggatactggggaagaacctgcgaaagggaggcatccatcctgagctatgatggtagcatgtacatgaagatcatcatgcccatggtcatgcatactgaggcagaggatgtgtccttccgcttcatgtcccagcgagcttatgggctgctggtggctacgacctccagggactctgccgacaccctgcgtctggagctggatggggggcgtgtcaagctcatggttaacttaggcaaaggaccagagaccttgtatgcagggcagaagctcaatgacaacgagtggcacaccgttcgggtggtgcggagaggaaaaagccttaagttaaccgtggatgatgatgtggctgagggtacaatggtgggagaccatacccgtttggagttccacaacattgaaacgggaatcatgactgagaaacgctacatctccgttgtcccctccagctttattggccatctgcagagcctcatgtttaatggccttctctacattgacttgtgcaaaaatggtgacattgattattgtgagctgaaggctcgttttggactgaggaacatcatcgctgaccctgtcacctttaagaccaagagcagctacctgagccttgccactcttcaggcttacacctccatgcacctcttcttccagttcaagaccacctcaccagatggcttcattctcttcaatagtggtgatggcaatgacttcattgcagtcgagcttgtcaaggggtatatacactacgtttttgacctcggaaacggtcccaatgtgatcaaaggcaacagtgaccgccccctgaatgacaaccagtggcacaatgtcgtcatcactcgggacaatagtaacactcatagcctgaaagtggacaccaaagtggtcactcaggttatcaatggtgccaaaaatctggatttgaaaggtgatctctatatggctggtctggcccaaggcatgtacagcaacctcccaaagctcgtggcctctcgagatggctttcagggctgtctagcatcagtggacttgaatggacgcctgccagacctcatcaatgatgctcttcatcggagcggacagatcgagcgtggctgtgaaggacccagtaccacctgccaggaagattcatgtgccaaccagggggtctgcatgcaacaatgggagggcttcacctgtgattgttctatgacctcttattctggaaaccagtgcaatgatcgtaagtacaacaacctttcatactggaactttgtgaagatgtttggagatttggagaatcttaaaggacaatatgtaaaaggatggctcttctgaaagattcataagtaattctctcctccagaaacttgggaaataaatgactagtgctcttatgag

SEQ ID NO: 14271 - DNA, 2532 bp, Homo sapiens
  source 1..2532: mol_type = unassigned DNA
ctcgagaggagaatgtggccactttccgaggctcagagtatctgtgctacgacctgtctcagaacccgatccagagcagcagtgatgaaatcaccctctcctttaagacctggcagcgtaacggcctcatcctgcacacgggcaagtcggctgactatgtcaacctggctctgaaggatggtgcggtctccttggtcattaacctggggtccggggcctttgaggccattgtggagccagtgaatggaaaattcaacgacaacgcctggcatgatgtcaaagtgacacgcaacctccggcaggtgacaatctctgtggatggcattcttaccacgacgggctacactcaagaggactataccatgctgggctcggacgacttcttctatgtaggaggaagcccaagtaccgctgacttgcctggctcccctgtcagcaacaacttcatgggctgccttaaagaggttgtttataagaataatgacatccgtctggagctgtctcgcctggcccggattgcggacaccaagatgaaaatctatggcgaagttgtgtttaagtgtgagaatgtggccacactggaccccatcaactttgagaccccagaggcttacatcagcttgcccaagtggaacactaaacgtatgggctccatctcctttgacttccgcaccacagagcccaatggcctgatcctcttcactcatggaaagccccaagagaggaaggatgctcggagccagaagaatacaaaagtagacttctttgccgtggaactcctcgatggcaacctgtacttgctgcttgacatgggctctggcaccatcaaagtgaaagccactcagaagaaagccaatgatggggaatggtaccatgtggacattcagcgagatggcagatcaggtactatatcagtgaacagcaggcgcacgccattcaccgccagtggggagagcgagatcctggacctggaaggagacatgtacctgggagggctgccggagaaccgtgctggccttattctccccaccgagctgtggactgccatgctcaactatggctacgtgggctgcatccgcgacctattcattgatgggcgcagcaagaacattcgacagctggcagagatgcagaatgctgcgggtgtcaagtcctcctgttcacggatgagtgccaagcagtgtgacagctacccctgcaagaataatgctgtgtgcaaggacggctggaaccgcttcatctgcgactgcaccggcaccggatactggggaagaacctgcgaaagggaggcatccatcctgagctatgatggtagcatgtacatgaagatcatcatgcccatggtcatgcatactgaggcagaggatgtgtccttccgcttcatgtcccagcgagcttatgggctgctggtggctacgacctccagggactctgccgacaccctgcgtctggagctggatggggggcgtgtcaagctcatggttaacttagactgtatcaggataaactgtaactccagcaaaggaccagagaccttgtatgcagggcagaagctcaatgacaacgagtggcacaccgttcgggtggtgcggagaggaaaaagccttaagttaaccgtggatgatgatgtggctgagggtacaatggtgggagaccatacccgtttggagttccacaacattgaaacgggaatcatgactgagaaacgctacatctccgttgtcccctccagctttattggccatctgcagagcctcatgtttaatggccttctctacattgacttgtgcaaaaatggtgacattgattattgtgagctgaaggctcgttttggactgaggaacatcatcgctgaccctgtcacctttaagaccaagagcagctacctgagccttgccactcttcaggcttacacctccatgcacctcttcttccagttcaagaccacctcaccagatggcttcattctcttcaatagtggtgatggcaatgacttcattgcagtcgagcttgtcaaggggtatatacactacgtttttgacctcggaaacggtcccaatgtgatcaaaggcaacagtgaccgccccctgaatgacaaccagtggcacaatgtcgtcatcactcgggacaatagtaacactcatagcctgaaagtggacaccaaagtggtcactcaggttatcaatggtgccaaaaatctggatttgaaaggtgatctctatatggctggtctggcccaaggcatgtacagcaacctcccaaagctcgtggcctctcgagatggctttcagggctgtctagcatcagtggacttgaatggacgcctgccagacctcatcaatgatgctcttcatcggagcggacagatcgagcgtggctgtgaagttgcgttgaccaaagctgacctgcaaggacccagtaccacctgccaggaagattcatgtgccaaccagggggtctgcatgcaacaatgggagggcttcacctgtgattgttctatgacctcttattctggaaaccagtgcaatgatc

SEQ ID NO: 14272 - DNA, 551 bp, Homo sapiens
  source 1..551: mol_type = unassigned DNA
attgcttacaatacctgcttgcctcatgtgctactattgtttccaaccaactatgctagacttcttaaagtaatatatccacatggttgaaaaaaagtctaacactgtaagagggcacagtgaaaagttgtttataagaataatgacatccgtctggagctgtctcgcctggcccggattgcggacaccaagatgaaaatctatggcgaagttgtgtttaagtgtgagaatgtggccacactggaccccatcaactttgagaccccagaggcttacatcagcttgcccaagtggaacactaaacgtatgggctccatctcctttgacttccgcaccacagagcccaatggcctgatcctcttcactcatggaaagccccaagagaggaaggatgctcggagccagaagaatacaaaagtagacttctttgccgtggaactcctcgatggcaacctgtacttgctgcttgacatgggctctggcaccatcaaagtgaaagccactcagaagaaagccaatgatggggaatggtaccatgtggacattcagcg

SEQ ID NO: 14273 - DNA, 3381 bp, Homo sapiens
  source 1..3381: mol_type = unassigned DNA
atatgacttgcccatttgtgaatttggctccccaactcctcgcttcacttcacctgtgcctccctggtccgcgcacttcgcaggcgcccgcccgcctctcggccacctctgcagcctgccaggcacctcctcttgcgctctcgctgatttcgcccacccacctccctccaccccgtgccacgttggtttgggtggctgctccgcaccgggttcctcctcctctcctctttccctccagtccttcttattctcttcctctggctgcggtggctgctgctgctgctggttttcatccagttgggaaacccaggaagccggcggctgctccgtggcgctagtccagcacgcccagggttaaaagcctcgcgcccttccgcggagactcccaggaacacccgaagaactcttccacctgcagcccccttttgcctggcagttctgcattgcatctcatggaagtggaaacaggaaaataaaaatgttcaaactccttggatgttgggataaactcacctgaacccacttgggttcgggctgcctccttctcttccttcattgccacctttcctctgtgtggctcccgggagtgtgcggttaagtcatcagactcgaagtgcctagagatccggaggaagccgcgccggtcttcccctgacatgcgtggcatgccggggctccgtaggaggtttgctatacctgggaggaccctggcattctaaatttcagctccgggaaagagaaggggctttttgccttttatcttttttttttctttctttaagtagtaattttttaactgattcattgtttggaaagcgcatattgcttccctcttccccgaattctggcaactcttcctcctgctatgatgggcccttgggcatcatgaacttcattactcctcactggctggaattcaaactgcccatctgtagtggtcccgtgcgttgaccatgcacctgagaatccacgcgagacggagccctcctcgccggccggcctggacgcttgggatctggttcctgttctggggatgtatcgtcagctctgtatggagttcttctaatgtagcttcctcctcctccacctcttcctcgccggggtctcactctcagcacgagcaccatttccatggcagcaagcatcactcagtgcctatttctatctatcgttcccctgtttcccttcgaggaggacacgctggcgctacgtacatctttgggaaaagtggtgggcttatcctctacacctggccagccaatgacaggcccagcacgcggtctgaccgccttgccgtgggcttcagcaccactgtgaaggatggcatcttggtccgcatcgacagtgctccaggacttggtgacttcctccagcttcacatagaacaggggaaaattggagttgtcttcaacattggcacagttgacatctccatcaaagaggagagaacccctgtaaatgacggcaaataccatgtggtacgcttcaccaggaacggcggcaacgccaccctgcaggtggacaactggccagtgaatgaacattatcctacaggccggcagttaaccatcttcaacactcaggcgcaaatagccattggtggaaaggacaaaggacgcctcttccaaggccaactctctgggctctattatgatggtttgaaagtactgaacatggcggctgagaacaaccccaatattaaaatcaatggaagtgttcggctggttggagaagtcccatcaattttgggaacaacacagacgacctccatgccaccagaaatgtctactactgtcatggaaaccactactacaatggcgactaccacaacccgtaagaatcgctctacagccagcattcagccaacatcagatgatcttgtttcatctgctgaatgttcaagtgatgatgaagactttgttgaatgtgagccgagtacaggaggtgaattagttatccctcttcttgtagaagaccctttagctacccctcctattgctactcgtgcaccttccattacactcccccctacctttcgccccctcctcaccattattgagaccaccaaagattccctgtccatgacctctgaggcggggttaccttgcttgtcggaccaaggcagcgatggttgtgatgatgatggcttggtgatatctgggtatggctcaggggaaacctttgactctaacctgccccctactgatgatgaagatttttacaccaccttctccttggtaacagataagagtctttccacttcaatcttcgaaggtggctacaaagcacatgcgcccaagtgggaatccaaggactttagacctaacaaagtctccgaaactagtaggactactaccacatctttatcccctgagctgatccgcttcacagcttcctcctcgtctgggatggtgcccaaattgccagctggcaaaatgaataaccgtgatctcaaaccccagcctgatatagtcttgcttccgttgcccactgcctatgagctagacagcaccaaactgaagagcccactaattacttcccccatgttccgtaatgtgcccacagcaaaccccacggagccgggaatcagacgggttccgggggcctcagaggtgatccgggagtcgagcagcacaacagggatggtcgtcggcattgtggctgctgccgccctctgcatcttgatcctcctgtacgccatgtacaagtacaggaacagggacgaggggtcctatcaagtggacgagacgcggaactacatcagcaactccgcccagagcaacggcacgctcatgaaggagaagcagcagagctcgaagagcggccacaagaaacagaaaaacaaggacagggagtattacgtgtaaacatgcgaacactgctcacacgcgagttttcacagttatttctatccacgcctatgaatctttggacggtgagatctcacagatgtcagaactgctggaactatgaaatggggtatataaccacgactctggtggggaaaaccgttttttaaaggacacacacacacacagcgatgcatctctctctaaagctcagccacggctgcggcaaggtcccagcggtcgctgggagacagaaggttttgtgccctgctgtatcataaagcacacacttagcgctctggagccggacggtggctccaccacttccgcaggcctggaaacttccttctccggaggaccttttactaaaaggtagaagacttcatggcttacttgttccataactccaagtgagtctgtaatgtttgtgaagcttgactgtaaccatgttttttctgtttaattatgtaaaaaacaaaactacaacaacaaaaaaagaaaaaagttaaaaaagaaaaaaacaccaaaaaac

SEQ ID NO: 14274 - DNA, 8504 bp, Homo sapiens
  source 1..8504: mol_type = unassigned DNA
acttcgcaggcgcccgcccgcctctcggccacctctgcagcctgccaggcacctcctcttgcgctctcgctgatttcgcccacccacctccctccaccccgtgccacgttggtttgggtggctgctccgcaccgggttcctcctcctctcctctttccctccagtccttcttattctcttcctctggctgcggtggctgctgctgctgctggttttcatccagttgggaaacccaggaagccggcggctgctccgtggcgctagtccagcacgcccagggttaaaagcctcgcgcccttccgcggagactcccaggaacacccgaagaactcttccacctgcagcccccttttgcctggcagttctgcattgcatctcatggaagtggaaacaggaaaataaaaatgttcaaactccttggatgttgggataaactcacctgaacccacttgggttcgggctgcctccttctcttccttcattgccacctttcctctgtgtggctcccgggagtgtgcggttaagtcatcagactcgaagtgcctagagatccggaggaagccgcgccggtcttcccctgacatgcgtggcatgccggggctccgtaggaggtttgctatacctgggaggaccctggcattctaaatttcagctccgggaaagagaaggggctttttgccttttatcttttttttttctttctttaagtagtaattttttaactgattcattgtttggaaagcgcatattgcttccctcttccccgaattctggcaactcttcctcctgctatgatgggcccttgggcatcatgaacttcattactcctcactggctggaattcaaactgcccatctgtagtggtcccgtgcgttgaccatgcacctgagaatccacgcgagacggagccctcctcgccggccggcctggacgcttgggatctggttcctgttctggggatgtatcgtcagctctgtatggagttcttctaatgtagcttcctcctcctccacctcttcctcgccggggtctcactctcagcacgagcaccatttccatggcagcaagcatcactcagtgcctatttctatctatcgttcccctgtttcccttcgaggaggacacgctggcgctacgtacatctttgggaaaagtggtgggcttatcctctacacctggccagccaatgacaggcccagcacgcggtctgaccgccttgccgtgggcttcagcaccactgtgaaggatggcatcttggtccgcatcgacagtgctccaggacttggtgacttcctccagcttcacatagaacaggggaaaattggagttgtcttcaacattggcacagttgacatctccatcaaagaggagagaacccctgtaaatgacggcaaataccatgtggtacgcttcaccaggaacggcggcaacgccaccctgcaggtggacaactggccagtgaatgaacattatcctacaggccggcagttaaccatcttcaacactcaggcgcaaatagccattggtggaaaggacaaaggacgcctcttccaaggccaactctctgggctctattatgatggtttgaaagtactgaacatggcggctgagaacaaccccaatattaaaatcaatggaagtgttcggctggttggagaagtcccatcaattttgggaacaacacagacgacctccatgccaccagaaatgtctactactgtcatggaaaccactactacaatggcgactaccacaacccgtaagaatcgctctacagccagcattcagccaacatcagatgatcttgtttcatctgctgaatgttcaagtgatgatgaagactttgttgaatgtgagccgagtacaggtaggtcagcaaaccccacggagccgggaatcagacgggttccgggggcctcagaggtgatccgggagtcgagcagcacaacagggatggtcgtcggcattgtggctgctgccgccctctgcatcttgatcctcctgtacgccatgtacaagtacaggaacagggacgaggggtcctatcaagtggacgagacgcggaactacatcagcaactccgcccagagcaacggcacgctcatgaaggagaagcagcagagctcgaagagcggccacaagaaacagaaaaacaaggacagggagtattacgtgtaaacatgcgaacactgctcacacgcgagttttcacagttatttctatccacgcctatgaatctttggacggtgagatctcacagatgtcagaactgctggaactatgaaatggggtatataaccacgactctggtggggaaaaccgttttttaaaggacacacacacacacagcgatgcatctctctctaaagctcagccacggctgcggcaaggtcccagcggtcgctgggagacagaaggttttgtgccctgctgtatcataaagcacacacttagcgctctggagccggacggtggctccaccacttccgcaggcctggaaacttccttctccggaggaccttttactaaaaggtagaagacttcatggcttacttgttccataactccaagtgagtctgtaatgtttgtgaagcttgactgtaaccatgttttttctgtttaattatgtaaaaaacaaaactacaacaacaaaaaaagaaaaaagttaaaaaagaaaaaaacaccaaaaaacaaaaacaaacaaaaaaaaaaacccacaacccttatctggttctgaccagtgtgcgtgtaactttatgatctgaggggaaaaatggcttttgggtttttgtttatttttttgataatgactggacatcagaagaggaaaaaaactcaaaacaaaagcgagagagactattgccatatgaactcaaaagctatcatggtgttcactctacatatcaggttatggtgtctctagaatctgttgtttgtttcctataagatgctttgctgaacacatagcaaaattcatgtgacggatgataaattgattcgaaaagctggtcccccaggatctaatttcagaatttaccacccaaacccggaacagatgggtttagggctggtgttatcagagctattggctttacgtaacaatattgttcctgtccattcacccagccaaattgtgttaaagaggaaagccccacaaactaaaacagcctttcctagggaagaggaaggggaggtgggctggatctgtgactgattgaaatgcatgcaaataaaaaagacaatattaaagtctgttatcaaaccagacagtaggggagttcaactcgtgatggaaccacaaaaggtcacacaagccaaccatgtcatgccagagtacaaaacacatagttctttccccgccccgaatgtgacaatggttttcatagtggtttaattttgtagcctgacatttatggataactctgtccttccatttgctcacttctctcttcacccatcttttttaaaaacaaataaatgaataaagctgctgtgacacacacacaaaaggaatttaatagtataatatatatataaataaatatatatacagatatatttatcatggtatgtttgatgggatgactgacacaggaaatctgttaaagtcttaaaatggaatgagaatgttgttttaaaagaaaatagcaaaacaacaaaaaagcaaaccttaaaatgtgaagaaagtgtgaattttagttttgtcacagttaactgtgtcaaagagaattaaaaaaaaaaacttcagattttgtttacatattttactacatttttgctggtataattccttagccacctatgtacatactgctttaagaaatgtttttttcctgtttatttctgtttggtttatattctggttgtctttttctttttgtaaagaggaaacaatgtacagaaaaacaataaactggttgtatggccatagctatccgaaaagcaagagacaaagcaagacaaatattcacacaaaaatgaagtgtgtcctctggagggtcagatatacaatttcttttgtacagatgaaaatcaatcagctgcttagatttagaaatctactcttgctggtctttgtaagttgcatgaatatttgactttgaaaaaatatcttaacgacatggggcaaaaagtgcaatctaaatggtagcctttactaatgtgtgtggaaagaggtgttcctcattatctaatatttcaatgtgttaagagtttaatttttttgttatcattaaaaaagacaggattataaagagatatcaaagcacgattttagataacctaaacggcccagcctatacgaagttgattatatctcgatgtctgtaaaagattgctgttcttggagtcttgaggtcttgtgaattgatttcctgctttctttcatttttttcaatttaagtaataatacatttgttatattcctttcagtgtaagtttctatttggacaattttatgggaacatgtgcattctctatgtgagcttctatcatattcctgttttattagcagaacctaaaggaatttatttaatgatgttgtgacattactgctttttcttttttcttttcttagttcatatttgcattttcgttcaaggatatgcttagcaataaaatgttcttcccaaaaccttgtatgctgatgcacttttattttcttaacatttgagaaaatctcgcactgaagctaattatgtcatatcttattaaaagccgagtaagagctagaccactttcatgtgatagaagatattctaagcagttactaattattacattatcaaaatgccatatttatgagataattatctgttacttgaggcattattttttagattgctatgatagaataaccaggagggagtgcatttttctggaaagatgatagaaacattgtattctagaaaagattattggatactatggttttgtttgtttgtttttgttttttgtttttcgttttttgtttgttttttttttgagacagagtctcgctctgtcgcccgggctggagtgcagtggcacgatctcggctcactgcaagctccgcctcccgggttcacaccattctcctgcctcagccccccgagtaggtgggactacaggtgcccgccaccacgcccggctaattttttgtatttttcgtagagacggggtttcaccgtgttagccgggatggtctcgatctcctgacctcgtaatccacccgcctcggcctcccaaagtgctgggattacaggcgtgagccaccgcgcccggcttggatactatgttttttaaaggcatttcgtaccttttacgtattttctataagtcaacaagctttaaacagtatttaaaactatgttcacatagtgccataagcactagaaagtcttagatgtcttctttccaagcctcccaccatattaaaatttaaaattaaaaaacagaatccaaaaccaaaatttaaatgagttcttcaattttaacagcttcttacaagaatttctgattacaacttgtttcatacacccattgtagcagtaatgtctcatatttctcgttctctcagcacacacttacttggccaattggataatccatctaccctttgttcttcactgtaatctagaaatatagatttaactgaacagctgtcctttatccatatgttggttaccagttttcaaagagttagaattttaaaaatatatatttagttaagcctgtgccttcaagataacattagtggagtggttatactatcgactatgttaggaatgggggggagaaagtcaggttcagtgatgtcaaattatgtaaagttttttttttgttcctgtcttcaaagttctgtattagatgttctcccatcattttttgagatggagtcttgcagcctacagtgcagtggcatgatattggctcactgcaacctctgcctctcaacctcaaacgattctcctgcctcagcctcctgagtagctgcgactacaggcatgggccaccacacccagctcattttttaatttattttttatttttttagtaaggaagggtttcaccatgttggcaaggctggtctcgaactccttacttcaagtgatccacccaccttggccttgcaaaatgctgggattataggtgtgagccactcctcctgaaatctttctaaatctcactaatatataattctaggactactttaagcattcactttttctttaattcaagaaacatttattgaacacttatgtacaagctagtctactattggctattgttactttgtttcaatgaaggcagaaaatggctagaaggattttaagcctttttgtctcttgtataaatctatacaggtccagtctctctttgctcatattcaaattgaagtttgatctttctccaaaaaatatccaagccctgtgtttgtcccagttgaactaatatcttgattatatagtttaagatcagtttgataatgtctattgaatatttactaaatgattatgggatattaaattgagagccttgggagcttatcatctagtaaagatgaacaaaaaatggtactatagtgaatgcaaataagctatcaaaaagtacaaactaagttgggagcttagaagaaattatgtaagggaaggcttcatagaaggggtgacattttggtaaaccttggaaaactgataggcagaaataagggctgtatatcattctaagcaaacccttaaagtgggagcaagcaggatcaaaaccataatttggattgatgacagactgcaaaaagtacattggaggaagatatgagtaggaaggtttttgaaatcatgtcaatgaatgggaagagagaaatgggagaatagcttgagaagttcaaggtcaagggctgctttgtcgagtacaaaggactcgagcatatttgaaatgaaaggtaataactgatctactcttatggagcaaccgagtttcctgatagagatgtttatctgggggaaaaaggcataagtcaatcttcttggagagaatgggatcagaaactgacatattgctacagaggttacaaaagctgtagtcagagggcttcagtgttctggatatattaaaggacaaggtcagatacccaagtgggaccgtgagtgattaatggcagcagtccactgacagcaccagtaggaaggcgctaatgaaaagatctctaaatatcagtaaggggttagctgccattaataatacaactttatagctttactattttttcttttattgttgaaatagtgagggcacgtatttttctaattgtgtttattacaaagaaaacagacccgaagaacttaaatgacttctccaaggtcacacagctaatacatgacaatgtcatgacttaaaatccagtcttgtggttccaaatttagagctctttcataaacctgtctctagagaagcaagtcattttctactttttccagaagcatttgaagtggaagctaaggcaggaaatgagaggatattgtgttagtctactgggattaccctggcaaaataccacaggctgggtagacaactgaaatgtatttctcagttccagaaacaaagttgcagatcaaagtttgttagggctcagtttctgggaagggctctcttcctggcttgtagataataagctaccttctcactatgtactcacagggcctttcttctgttcatgcactgagagatttctttttcttgctcttcttataagaccaccagtgctattggttaaagccctgccattatgactttgtttgaccttaattacttcctaaagacactacctcccaatacagtcatgtttggggttgggacttcaacatatgaatgttggaggggatatggttctgtttctagcaaatgtatagtagtgggaattgcaaaggttgaagttccaaagtatcaagggaatcagaattgggaagcaattctaacctttttgaagtggttacatggcccaagtagaagagcaaataattccaagagacaccaagccacagagcaggtaggatcacgtgagtagggcccaggatagaagagcagtgttagggttgcatgagagtgagggcatataagacaacaacagctaaaagcaatgcatgctcagatcttgggagatgtattaaatgagtagagtgaatttcaagatatctgagttttttttttttaatgattacatgggttctagagtcaaaatgccatggctcatctggtactgtaacttaagataaactgcttagctaaggctcagctttcatacctataattttgttatacttatcttgcaggtttcttgagaaatattggatgaaataattcatgtgaaatgcttaacatatgtgtgacaaataattatccttaaataaatgttggtcgttattacaattggctttgttacttgattcaggcaggatcaaaattagctgctatatgcatgactaaccaggaccaaaaagttaataaaaatacgaaagtttggcactctt

SEQ ID NO: 14275 - DNA, 4219 bp, Homo sapiens
  source 1..4219: mol_type = unassigned DNA
ctctgtgtggctcccgggagtgtgcggttaagtcatcagactcgaagtgcctagagatccggaggaagccgcgccggtcttcccctgacatgcgtggcatgccggggctccgtaggaggtttgctatacctgggaggaccctggcattctaaatttcagctccgggaaagagaaggggctttttgccttttatcttttttttttctttctttaagtagtaattttttaactgattcattgtttggaaagcgcatattgcttccctcttccccgaattctggcaactcttcctcctgctatgatgggcccttgggcatcatgaacttcattactcctcactggctggaattcaaactgcccatctgtagtggtcccgtgcgttgaccatgcacctgagaatccacgcgagacggagccctcctcgccggccggcctggacgcttgggatctggttcctgttctggggatgtatcgtcagctctgtatggagttcttctaatgtagcttcctcctcctccacctcttcctcgccggggtctcactctcagcacgagcaccatttccatggcagcaagcatcactcagtgcctatttctatctatcgttcccctgtttcccttcgaggaggacacgctggcgctacgtacatctttgggaaaagtggtgggcttatcctctacacctggccagccaatgacaggcccagcacgcggtctgaccgccttgccgtgggcttcagcaccactgtgaaggatggcatcttggtccgcatcgacagtgctccaggacttggtgacttcctccagcttcacatagaacaggggaaaattggagttgtcttcaacattggcacagttgacatctccatcaaagaggagagaacccctgtaaatgacggcaaataccatgtggtacgcttcaccaggaacggcggcaacgccaccctgcaggtggacaactggccagtgaatgaacattatcctacaggcaacactgataatgaacgcttccaaatggtaaaacagaaaatccccttcaaatataatcggcctgtagaggagtggctgcaggaaaaaggccggcagttaaccatcttcaacactcaggcgcaaatagccattggtggaaaggacaaaggacgcctcttccaaggccaactctctgggctctattatgatggtttgaaagtactgaacatggcggctgagaacaaccccaatattaaaatcaatggaagtgttcggctggttggagaagtcccatcaattttgggaacaacacagacgacctccatgccaccagaaatgtctactactgtcatggaaaccactactacaatggcgactaccacaacccgtaagaatcgctctacagccagcattcagccaacatcagatgatcttgtttcatctgctgaatgttcaagtgatgatgaagactttgttgaatgtgagccgagtacagcaaaccccacggagccgggaatcagacgggttccgggggcctcagaggtgatccgggagtcgagcagcacaacagggatggtcgtcggcattgtggctgctgccgccctctgcatcttgatcctcctgtacgccatgtacaagtacaggaacagggacgaggggtcctatcaagtggacgagacgcggaactacatcagcaactccgcccagagcaacggcacgctcatgaaggagaagcagcagagctcgaagagcggccacaagaaacagaaaaacaaggacagggagtattacgtgtaaacatgcgaacactgctcacacgcgagttttcacagttatttctatccacgcctatgaatctttggacggtgagatctcacagatgtcagaactgctggaactatgaaatggggtatataaccacgactctggtggggaaaaccgttttttaaaggacacacacacacacagcgatgcatctctctctaaagctcagccacggctgcggcaaggtcccagcggtcgctgggagacagaaggttttgtgccctgctgtatcataaagcacacacttagcgctctggagccggacggtggctccaccacttccgcaggcctggaaacttccttctccggaggaccttttactaaaaggtagaagacttcatggcttacttgttccataactccaagtgagtctgtaatgtttgtgaagcttgactgtaaccatgttttttctgtttaattatgtaaaaaacaaaactacaacaacaaaaaaagaaaaaagttaaaaaagaaaaaaacaccaaaaaacaaaaacaaacaaaaaaaaaaacccacaacccttatctggttctgaccagtgtgcgtgtaactttatgatctgaggggaaaaatggcttttgggtttttgtttatttttttgataatgactggacatcagaagaggaaaaaaactcaaaacaaaagcgagagagactattgccatatgaactcaaaagctatcatggtgttcactctacatatcaggttatggtgtctctagaatctgttgtttgtttcctataagatgctttgctgaacacatagcaaaattcatgtgacggatgataaattgattcgaaaagctggtcccccaggatctaatttcagaatttaccacccaaacccggaacagatgggtttagggctggtgttatcagagctattggctttacgtaacaatattgttcctgtccattcacccagccaaattgtgttaaagaggaaagccccacaaactaaaacagcctttcctagggaagaggaaggggaggtgggctggatctgtgactgattgaaatgcatgcaaataaaaaagacaatattaaagtctgttatcaaaccagacagtaggggagttcaactcgtgatggaaccacaaaaggtcacacaagccaaccatgtcatgccagagtacaaaacacatagttctttccccgccccgaatgtgacaatggttttcatagtggtttaattttgtagcctgacatttatggataactctgtccttccatttgctcacttctctcttcacccatcttttttaaaaacaaataaatgaataaagctgctgtgacacacacacaaaaggaatttaatagtataatatatatataaataaatatatatacagatatatttatcatggtatgtttgatgggatgactgacacaggaaatctgttaaagtcttaaaatggaatgagaatgttgttttaaaagaaaatagcaaaacaacaaaaaagcaaaccttaaaatgtgaagaaagtgtgaattttagttttgtcacagttaactgtgtcaaagagaattaaaaaaaaaaacttcagattttgtttacatattttactacatttttgctggtataattccttagccacctatgtacatactgctttaagaaatgtttttttcctgtttatttctgtttggtttatattctggttgtctttttctttttgtaaagaggaaacaatgtacagaaaaacaataaactggttgtatggccatagctatccgaaaagcaagagacaaagcaagacaaatattcacacaaaaatgaagtgtgtcctctggagggtcagatatacaatttcttttgtacagatgaaaatcaatcagctgcttagatttagaaatctactcttgctggtctttgtaagttgcatgaatatttgactttgaaaaaatatcttaacgacatggggcaaaaagtgcaatctaaatggtagcctttactaatgtgtgtggaaagaggtgttcctcattatctaatatttcaatgtgttaagagtttaatttttttgttatcattaaaaaagacaggattataaagagatatcaaagcacgattttagataacctaaacggcccagcctatacgaagttgattatatctcgatgtctgtaaaagattgctgttcttggagtcttgaggtcttgtgaattgatttcctgctttctttcatttttttcaatttaagtaataatacatttgttatattcctttcagtgtaagtttctatttggacaattttatgggaacatgtgcattctctatgtgagcttctatcatattcctgttttattagcagaacctaaaggaatttatttaatgatgttgtgacattactgctttttcttttttcttttcttagttcatatttgcattttcgttcaaggatatgcttagcaataaaatgttcttcccaa

SEQ ID NO: 14276 - DNA, 3211 bp, Homo sapiens
  source 1..3211: mol_type = unassigned DNA
cccatctgtagtggtcccgtgcgttgaccatgcacctgagaatccacgcgagacggagccctcctcgccggccggcctggacgcttgggatctggttcctgttctggggatgtatcgtcagctctgtatggagttcttctaatgtagcttcctcctcctccacctcttcctcgccggggtctcactctcagcacgagcaccatttccatggcagcaagcatcactcagtgcctatttctatctatcgttcccctgtttcccttcgaggaggacacgctggcgctacgtacatctttgggaaaagtggtgggcttatcctctacacctggccagccaatgacaggcccagcacgcggtctgaccgccttgccgtgggcttcagcaccactgtgaaggatggcatcttggtccgcatcgacagtgctccaggacttggtgacttcctccagcttcacatagaacaggggaaaattggagttgtcttcaacattggcacagttgacatctccatcaaagaggagagaacccctgtaaatgacggcaaataccatgtggtacgcttcaccaggaacggcggcaacgccaccctgcaggtggacaactggccagtgaatgaacattatcctacaggcaacactgataatgaacgcttccaaatggtaaaacagaaaatccccttcaaatataatcggcctgtagaggagtggctgcaggaaaaaggccggcagttaaccatcttcaacactcaggcgcaaatagccattggtggaaaggacaaaggacgcctcttccaaggccaactctctgggctctattatgatggtttgaaagtactgaacatggcggctgagaacaaccccaatattaaaatcaatggaagtgttcggctggttggagaagtcccatcaattttgggaacaacacagacgacctccatgccaccagaaatgtctactactgtcatggaaaccactactacaatggcgactaccacaacccgtaagaatcgctctacagccagcattcagccaacatcagatgatcttgtttcatctgctgaatgttcaagtgatgatgaagactttgttgaatgtgagccgagtacaggtaggtcagccagaagctctaatgcagctagatcactccgtgccgcccttacatggacatggcgactcacttacacatttactcctatcatcttcatctcctgtgtagttcactcatagatatgaccctccccttcctgcatctttccttcccattctccccctttctttagcattgttaaaatttatgtgctgtcatccatctccctaaattaaagaaagcctaaaatttgtcaaaaagacaaaaaaatatatatatctgaaaacttataaatgcagaaattcattcaaaacccgttagagtcatagaattttttgaaaggcaaattataaaagtaaacaggtttttttgtttggtttttcaatcatagcaatcggaattattttaaattcaaaaattgatgccctcccaaaccccccaaagtaaaaatttgttaaagtgcagattttttttttctttttatgttatgtggtgtggatgtatgtgttgttgcctccctgtatcatcctctgttgtaaattattatatttgaaaaattagacattttgctcaaaagtttttaagaaatgacaacaaaaaaagcaagttacaagaatgtggcaattctatttgtccaagagcattcttacacaactttcttttgtaaatttttctttcatgccaaaaaacatgcgggcaatttgttgatgaggtgaattagttatccctcttcttgtagaagaccctttagctacccctcctattgctactcgtgcaccttccattacactcccccctacctttcgccccctcctcaccattattgagaccaccaaagattccctgtccatgacctctgaggcggggttaccttgcttgtcggaccaaggcagcgatggttgtgatgatgatggcttggtgatatctgggtatggctcaggggaaacctttgactctaacctgccccctactgatgatgaagatttttacaccaccttctccttggtaacagataagagtctttccacttcaatcttcgaaggtggctacaaagcacatgcgcccaagtgggaatccaaggactttagacctaacaaagtctccgaaactagtaggactactaccacatctttatcccctgagctgatccgcttcacagcttcctcctcgtctgggatggtgcccaaattgccagctggcaaaatgaataaccgtgatctcaaaccccagcctgatatagtcttgcttccgttgcccactgcctatgagctagacagcaccaaactgaagagcccactaattacttcccccatgttccgtaatgtgcccacagcaaaccccacggagccgggaatcagacgggttccgggggcctcagaggtgatccgggagtcgagcagcacaacagggatggtcgtcggcattgtggctgctgccgccctctgcatcttgatcctcctgtacgccatgtacaagtacaggaacagggacgaggggtcctatcaagtggacgagacgcggaactacatcagcaactccgcccagagcaacggcacgctcatgaaggagaagcagcagagctcgaagagcggccacaagaaacagaaaaacaaggacagggagtattacgtgtaaacatgcgaacactgctcacacgcgagttttcacagttatttctatccacgcctatgaatctttggacggtgagatctcacagatgtcagaactgctggaactatgaaatggggtatataaccacgactctggtggggaaaaccgttttttaaaggacacacacacacacagcgatgcatctctctctaaagctcagccacggctgcggcaaggtcccagcggtcgctgggagacagaaggttttgtgccctgctgtatcataaagcacacacttagcgctctggagccggacggtggctccaccacttccgcaggcctggaaacttccttctccggaggaccttttactaaaaggtagaagacttcatggcttacttgttccataactccaagtgagtctgtaatgtttgtgaagcttgactgtaaccatgttttttctgtttaattatgtaaaaaacaaaactacaacaacaaaaaaagaaaaaagtta

SEQ ID NO: 14277 - DNA, 510 bp, Homo sapiens
  source 1..510: mol_type = unassigned DNA
atctatcgttcccctgtttcccttcgaggaggacacggcaacttatcagctttatgtttgcaggaacagccctccagggaacatgagcgtgaaccatactagggggttcctgcccttgtattttgaagactgataacatccagaccctatttggaaagttgattcttcctgctgcctcctagccctgagctttggctttatgctgtctgtagtctggcgctacgtacatctttgggaaaagtggtgggcttatcctctacacctggccagccaatgacaggcccagcacgcggtctgaccgccttgccgtgggcttcagcaccactgtgaaggatggcatcttggtccgcatcgacagtgctccaggacttggtgacttcctccagcttcacatagaacaggggaaaattggagttgtcttcaacattggcacagttgacatctccatcaaagaggagagaacccctgtaaatgacggcaaataccatgtggtacgcttcaccaggaacg

SEQ ID NO: 14278 - DNA, 530 bp, Homo sapiens
  source 1..530: mol_type = unassigned DNA
aaatggcagggggatttccttgaggaggtgctacactaaagaagagttcttagttctgagtaggtgaccatcagaggaagaagtgaggatgctgcttaaataggatgagcaaagctggcgctacgtacatctttgggaaaagtggtgggcttatcctctacacctggccagccaatgacaggcccagcacgcggtctgaccgccttgccgtgggcttcagcaccactgtgaaggatggcatcttggtccgcatcgacagtgctccaggacttggtgacttcctccagcttcacatagtcagaaaatatgtgcggaacagaccctgagatgctgactgtgcaaggctgttcagacccagtcagggatgacattaatgaggtatcgcctttgcaacttcaagaatgaatagaagttaatcagacaagaaaagaaccatttcacaaggaacaatatgtacacataattcaagacagccagaatgtgaagtaagaggagactcaagttttgtcagcatattatataagtaaggg

SEQ ID NO: 14279 - DNA, 750 bp, Homo sapiens
  source 1..750: mol_type = unassigned DNA
ccccatctttgccaagatggccgaataggaacagctccggtctacagctcccagcgtgagcgacgcagaagacgggtgatttctgcatttccatctgagctggcgctacgtacatctttgggaaaagtggtgggcttatcctctacacctggccagccaatgacaggcccagcacgcggtctgaccgccttgccgtgggcttcagcaccactgtgaaggatggcatcttggtccgcatcgacagtgctccaggacttggtgacttcctccagcttcacatagaacaggggaaaattggagttgtcttcaacattggcacagttgacatctccatcaaagaggagagaacccctgtaaatgacggcaaataccatgtggtacgcttcaccaggaacggcggcaacgccaccctgcaggtggacaactggccagtgaatgaacattatcctacagcaaaccccacggagccgggaatcagacgggttccgggggcctcagaggtgatccgggagtcgagcagcacaacagggatggtcgtcggcattgtggctgctgccgccctctgcatcttgatcctcctgtacgccatgtacaagtacaggaacagggacgaggggtcctatcaagtggacgagacgcggaactacatcagcaactccgcccagagcaacggcacgctcatgaaggagaagcagcagagctcgaagagcggccacaagaaacagaaaaacaaggacagggagtattacg

SEQ ID NO: 14280 - DNA, 2764 bp, Homo sapiens
  source 1..2764: mol_type = unassigned DNA
ttcttcagtgcccagttttctgccgtgggatggtgttaggcccgggaagaacagagcctaaatgcacccctctacccacttccaccgggatcttgacgaagctcgagaggagaatgtggccactttccgaggctcagagtatctgtgctacgacctgtctcagaacccgatccagagcagcagtgatgaaatcaccctctcctttaagacctggcagcgtaacggcctcatcctgcacacgggcaagtcggctgactatgtcaacctggctctgaaggatggtgcggtctccttggtcattaacctggggtccggggcctttgaggccattgtggagccagtgaatggaaaattcaacgacaacgcctggcatgatgtcaaagtgacacgcaacctccggcaggtgacaatctctgtggatggcattcttaccacgacgggctacactcaagaggactataccatgctgggctcggacgacttcttctatgtaggaggaagcccaagtaccgctgacttgcctggctcccctgtcagcaacaacttcatgggctgccttaaagaggttgtttataagaataatgacatccgtctggagctgtctcgcctggcccggattgcggacaccaagatgaaaatctatggcgaagttgtgtttaagtgtgagaatgtggccacactggaccccatcaactttgagaccccagaggcttacatcagcttgcccaagtggaacactaaacgtatgggctccatctcctttgacttccgcaccacagagcccaatggcctgatcctcttcactcatggaaagccccaagagaggaaggatgctcggagccagaagaatacaaaagtagacttctttgccgtggaactcctcgatggcaacctgtacttgctgcttgacatgggctctggcaccatcaaagtgaaagccactcagaagaaagccaatgatggggaatggtaccatgtggacattcagcgagatggcagatcaggtactatatcagtgaacagcaggcgcacgccattcaccgccagtggggagagcgagatcctggacctggaaggagacatgtacctgggagggctgccggagaaccgtgctggccttattctccccaccgagctgtggactgccatgctcaactatggctacgtgggctgcatccgcgacctattcattgatgggcgcagcaagaacattcgacagctggcagagatgcagaatgctgcgggtgtcaagtcctcctgttcacggatgagtgccaagcagtgtgacagctacccctgcaagaataatgctgtgtgcaaggacggctggaaccgcttcatctgcgactgcaccggcaccggatactggggaagaacctgcgaaagggaggcatccatcctgagctatgatggtagcatgtacatgaagatcatcatgcccatggtcatgcatactgaggcagaggatgtgtccttccgcttcatgtcccagcgagcttatgggctgctggtggctacgacctccagggactctgccgacaccctgcgtctggagctggatggggggcgtgtcaagctcatggttaacttagactgtatcaggataaactgtaactccagcaaaggaccagagaccttgtatgcagggcagaagctcaatgacaacgagtggcacaccgttcgggtggtgcggagaggaaaaagccttaagttaaccgtggatgatgatgtggctgagggtacaatggtgggagaccatacccgtttggagttccacaacattgaaacgggaatcatgactgagaaacgctacatctccgttgtcccctccagctttattggccatctgcagagcctcatgtttaatggccttctctacattgacttgtgcaaaaatggtgacattgattattgtgagctgaaggctcgttttggactgaggaacatcatcgctgaccctgtcacctttaagaccaagagcagctacctgagccttgccactcttcaggcttacacctccatgcacctcttcttccagttcaagaccacctcaccagatggcttcattctcttcaatagtggtgatggcaatgacttcattgcagtcgagcttgtcaaggggtatatacactacgtttttgacctcggaaacggtcccaatgtgatcaaaggcaacagtgaccgccccctgaatgacaaccagtggcacaatgtcgtcatcactcgggacaatagtaacactcatagcctgaaagtggacaccaaagtggtcactcaggttatcaatggtgccaaaaatctggatttgaaaggtgatctctatatggctggtctggcccaaggcatgtacagcaacctcccaaagctcgtggcctctcgagatggctttcagggctgtctagcatcagtggacttgaatggacgcctgccagacctcatcaatgatgctcttcatcggagcggacagatcgagcgtggctgtgaaggacccagtaccacctgccaggaagattcatgtgccaaccagggggtctgcatgcaacaatgggagggcttcacctgtgattgttctatgacctcttattctggaaaccagtgcaatgatcgtaagtacaacaacctttcatactggaactttgtgaagatgtttggagatttggagaatcttaaaggacaatatgtaaaaggatggctcttctgaaagattcataagtaattctctcctccagaaacttgggaaataaatgactagtgctcttatgag

SEQ ID NO: 14281 - DNA, 670 bp, Homo sapiens
  source 1..670: mol_type = unassigned DNA
tggcgccagctcttcgatgtggtcattgtccaggcagacaagcccagcttcttcactgaccggcgcaagcctttcagaaaactcgatgagaagggctcacttcagtgggaccggatcacccgcttggaaaagggcaagatctatcggcagggaaacctgtttgacttcttacgcttgacggaatggcgtggcccccgcgtgctctacttcggggaccacctctatagtgatctggcggatctcatgctgcggcacggctggcgcacaggcgccatcatccccgagctggagcgtgagatccgcatcatcaacacggagcagtacatgcactcgctgacgtggcagcaggcgctcacggggctgctggagcgcatgcagacctatcaggacgcggagtcgaggcaggtgctggctgcctggatgaaagagcggcaggagctgagctgcctgctcaactaccgcgtggacttcaccttctacccacgccgtacgccgctgcagcacgaggcacccctctggatggaccagctctgcaccggctgcatgaagacccccttccttggtgacatggcccacatccgctgagggcacctttattgtctgggacaggccctcagcccctcctgccccatccacccagacaagcaataaaagtggtctcctccctgtg

SEQ ID NO: 14282 - DNA, 1714 bp, Homo sapiens
  source 1..1714: mol_type = unassigned DNA
ctatgagcaggcagtgattaaggtttagccctggctggaatgcggaaatcctggctgagctgggcttcttcaggctaggggttctaaaggccttggggctggaggagggggaagccagcagctggccaggggagcaatgtggaggtggccaatgcccagcctggcctgcaggaaacacccccaccctctcagccctgcccacttctctgcctcccacccttccgcacccaaactctccacagccctcgggcccaggtgcgtcccttcagctctgagggcgctgctctcccctgccttggcatccagcctcagctaaagagggtcatacacctttgtgagaaacacatgactttcttccctggcagctttcaggcagttctttatgcccagtattctgaagctgctttccactgtgtgttggatcctgcctgtcagtcactaggagtctgtcagtctcctgccctttgagactctttctcttggtctggggcctgcctgggcctctgcccctccacttgaacttagttcagcaattggcttctcccacaccacctgtttcccccagcgcttccacttctgaggcttggaatgcacagactgcttcaagaactgtgcttgctgggtgtcaattattctcgcttttggggtgtggactcctaccctggtggctgctgcctgagcactagtctggtgattcctgctctgggccgctcagtttctgccaccctgtgagcttccccagttacatgtgggcctggctgagtgtctccatctttctctggctccaagatgctggtggccccggtgaggtctgccattggtctgccaggtccctctgcactgaggcaggggaggccagcaaggacttcagggctgcagagccttccctgcagtttctaccttacaaacagggatctaatccctaacctggggtacgtgtgagaccacagggagaaggccctcgaggcatgggcaccatgccaggcctgtagggcaccttcctgcagcaggcagaatccccttcccaagtaggaggggaaagtgacaagaaccagggcccagggagggagcagcaaggccatgggaaagggcagccagcatccggctggatttgggctgcctctggggattcgggagggaggactggtggaggacaaggcacacttggctcagcagcattcccctcctctccctagggaaacctgtttgacttcttacgcttgacggaatggcgtggcccccgcgtgctctacttcggggaccacctctatagtgatctggcggatctcatgctgcggcacggctggcgcacaggcgccatcatccccgagctggagcgtgagatccgcatcatcaacacggagcagtacatgcactcgctgacgtggcagcaggcgctcacggggctgctggagcgcatgcagacctatcaggacgcggagtcgaggcaggtgctggctgcctggatgaaagagcggcaggagctgagctgcctgctcaactaccgcgtggacttcaccttctacccacgccgtacgccgctgcagcacgaggcacccctctggatggaccagctctgcaccggctgcatgaagacccccttccttggtgacatggcccacatccgctgagggcacctttattgtctgggacaggccctcagcccctcctgccccatccacccagacaagcaataaaagtggtctcctccctg

SEQ ID NO: 14283 - DNA, 2047 bp, Homo sapiens
  source 1..2047: mol_type = unassigned DNA
acacaggcttgatgctcgctcccgtttctacaggaggttttgacggctggatgctgcagggcatcccctcgcctggaggaggttcacttgtggccaggttcccagcacacccacttgctcactggggccctggggacaccgccacactcgagcccatcctacggcctcaatccttaccagtccccaggccatggactgccacactgtaggtcttcaatcaaggttcagtggagtttcgaatgtacacacaccctgaaagacagcgcggccacctcagaaaacaacgcgcgcccagctggctcccctccgacagggcccacggctactgggtcggcctcctccggaccctgagcacagcctggtatgcgtgcgggctcggaatacggatctgagcagaagaaatgcgagtggagagcggttctgcgcaggaaagaggaattttgttggaaagcctgtcgacgttgctagaaaagaccacagcatctcacgaggggcgtgcgccgggaaaccgggagttgacggacctcctgccccccgaggtctgcagtctcctgaacccagcagccatctacgccaacaacgagatcagcctgcgtgacgttgaggtctacggctttgactacgactacaccctggcccagtatgcagacgcactgcaccccgagatcttcagtaccgcccgtgacatcctgatcgagcactacaagtacccagaagggattcggaagtatgactacaaccccagctttgccatccgtggcctccactatgacattcagaagagccttctgatgaagattgacgccttccactacgtgcagctggggacagcctacaggggcctccagcctgtgccagacgaggaggtgattgagctgtatgggggtacccagcacatcccactataccagatgagtggcttctatggcaagggtccctccattaagcagttcatggacatcttctcgctaccggagatggctctgctgtcctgtgtggtggactactttctgggccacagcctggagtttgaccaagcacatctctacaaggacgtgacggacgccatccgagacgtgcatgtgaagggcctcatgtaccagtggatcgagcaggacatggagaagtacatcctgagaggggatgagacgtttgctgtcctgagccgcctggtggcccatgggaaacagctgttcctcatcaccaacagtcctttcagcttcgtagacaaggggatgcggcacatggtgggtcccgattggcgccagctcttcgatgtggtcattgtccaggcagacaagcccagcttcttcactgaccggcgcaagcctttcagaaaactcgatgagaagggctcacttcagtgggaccggatcacccgcttggaaaagggcaagatctatcggcagggaaacctgtttgacttcttacgcttgacggaatggcgtggcccccgcgtgctctacttcggggaccacctctatagtgatctggcggatctcatgctgcggcacggctggcgcacaggcgccatcatccccgagctggagcgtgagatccgcatcatcaacacggagcagtacatgcactcgctgacgtggcagcaggcgctcacggggctgctggagcgcatgcagacctatcaggacgcggagtcgaggcaggtgctggctgcctggatgaaagagcggcaggagctgaggtgcatcaccaaggccctgttcaatgcgcagttcggcagcatcttccgcaccttccacaaccccacctacttctcaaggcgcctcgtgcgcttctctgacctctacatggcctccctcagctgcctgctcaactaccgcgtggacttcaccttctacccacgccgtacgccgctgcagcacgaggcacccctctggatggaccagctctgcaccggctgcatgaagacccccttccttggtgacatggcccacatccgctgagggcacctttattgtctgggacaggccctcagcccctcctgccccatccacccagacaagcaataaaagtggtctcctccctg

SEQ ID NO: 14284 - DNA, 1795 bp, Homo sapiens
  source 1..1795: mol_type = unassigned DNA
ggccgagggcagcgcgggcggcgggcggcgcgcggtgggcatggcgggtgcggggctgcgggcggccgctcggcgctggctgctgtgcggaggccacggcgggccgcgagccgcctcgtcctcgccctcctgccctgggtgcggccccccgggtcccggcgcccactgccccggcgtcccgcgctccgcgcccgcccaggcacccaccagcggcgccgacctcagcgcgcacctatgggctcgctaccaggacatgcggagactggtgcacgacctcctgccccccgaggtctgcagtctcctgaacccagcagccatctacgccaacaacgagatcagcctgcgtgacgttgaggtctacggctttgactacgactacaccctggcccagtatgcagacgcactgcaccccgagatcttcagtaccgcccgtgacatcctgatcgagcactacaagtacccagaagggattcggaagtatgactacaaccccagctttgccatccgtggcctccactatgacattcagaagagccttctgatgaagattgacgccttccactacgtgcagctggggacagcctacaggggcctccagcctgtgccagacgaggaggtgattgagctgtatgggggtacccagcacatcccactataccagatgagtggcttctatggcaagggtccctccattaagcagttcatggacatcttctcgctaccggagatggctctgctgtcctgtgtggtggactactttctgggccacagcctggagtttgaccaagcacatctctacaaggacgtgacggacgccatccgagacgtgcatgtgaagggcctcatgtaccagtggatcgagcaggacatggagaagtacatcctgagaggggatgagacgtttgctgtcctgagccgcctggtggcccatgggaaacagctgttcctcatcaccaacagtcctttcagcttcgtagacaaggggatgcggcacatggtgggtcccgattggcgccagctcttcgatgtggtcattgtccaggcagacaagcccagcttcttcactgaccggcgcaagcctttcagaaaactcgatgagaagggctcacttcagtgggaccggatcacccgcttggaaaagggcaagatctatcggcagggaaacctgtttgacttcttacgcttgacggaatggcgtggcccccgcgtgctctacttcggggaccacctctatagtgatctggcggatctcatgctgcggcacggctggcgcacaggcgccatcatccccgagctggagcgtgagatccgcatcatcaacacggagcagtacatgcactcgctgacgtggcagcaggcgctcacggggctgctggagcgcatgcagacctatcaggacgcggagtcgaggcaggtgctggctgcctggatgaaagagcggcaggagctgaggtgcatcaccaaggccctgttcaatgcgcagttcggcagcatcttccgcaccttccacaaccccacctacttctcaaggcgcctcgtgcgcttctctgacctctacatggcctccctcagctgcctgctcaactaccgcgtggacttcaccttctacccacgccgtacgccgctgcagcacgaggcacccctctggatggaccagctctgcaccggctgcatgaagacccccttccttggtgacatggcccacatccgctgagggcacctttattgtctgggacaggccctcagcccctcctgccccatccacccagacaagcaataaaagtggtctcctccc

SEQ ID NO: 14285 - DNA, 1619 bp, Homo sapiens
  source 1..1619: mol_type = unassigned DNA
cttctctgcctcccacccttccgcacccaaactctccacagccctcgggcccaggtgcgtcccttcagctctgagggcgctgctctcccctgccttggcatccagcctcagctaaagagggtcatacacctttgtgagaaacacatgactttcttccctggcagctttcaggcagttctttatgcccagtattctgaagctgctttccactgtgtgttggatcctgcctgtcagtcactaggagtctgtcagtctcctgccctttgagactctttctcttggtctggggcctgcctgggcctctgcccctccacttgaacttagttcagcaattggcttctcccacaccacctgtttcccccagcgcttccacttctgaggcttggaatgcacagactgcttcaagaactgtgcttgctgggtgtcaattattctcgcttttggggtgtggactcctaccctggtggctgctgcctgagcactagtctggtgattcctgctctgggccgctcagtttctgccaccctgtgagcttccccagttacatgtgggcctggctgagtgtctccatctttctctggctccaagatgctggtggccccggtgaggtctgccattggtctgccaggtccctctgcactgaggcaggggaggccagcaaggacttcagggctgcagagccttccctgcagtttctaccttacaaacagggatctaatccctaacctggggtacgtgtgagaccacagggagaaggccctcgaggcatgggcaccatgccaggcctgtagggcaccttcctgcagcaggcagaatccccttcccaagtaggaggggaaagtgacaagaaccagggcccagggagggagcagcaaggccatgggaaagggcagccagcatccggctggatttgggctgcctctggggattcgggagggaggactggtggaggacaaggcacacttggctcagcagcattcccctcctctccctagggaaacctgtttgacttcttacgcttgacggaatggcgtggcccccgcgtgctctacttcggggaccacctctatagtgatctggcggatctcatgctgcggcacggctggcgcacaggcgccatcatccccgagctggagcgtgagatccgcatcatcaacacggagcagtacatgcactcgctgacgtggcagcaggcgctcacggggctgctggagcgcatgcagacctatcaggacgcggagtcgaggcaggtgctggctgcctggatgaaagagcggcaggagctgaggtgcatcaccaaggccctgttcaatgcgcagttcggcagcatcttccgcaccttccacaaccccacctacttctcaaggcgcctcgtgcgcttctctgacctctacatggcctccctcagctgcctgctcaactaccgcgtggacttcaccttctacccacgccgtacgccgctgcagcacgaggcacccctctggatggaccagctctgcaccggctgcatgaagacccccttccttggtgacatggcccacatccgctgagggcacctttattgtctgggacaggccctcagcccctcctgccccatccacccagacaagcaataaaag

SEQ ID NO: 14286 - DNA, 1639 bp, Homo sapiens
  source 1..1639: mol_type = unassigned DNA
ggccgagggcagcgcgggcggcgggcggcgcgcggtgggcatggcgggtgcggggctgcgggcggccgctcggcgctggctgctgtgcggaggccacggcgggccgcgagccgcctcgtcctcgccctcctgccctgggtgcggccccccgggtcccggcgcccactgccccggcgtcccgcgctccgcgcccgcccaggcacccaccagcggcgccgacctcagcgcgcacctatgggctcgctaccaggacatgcggagactggtgcacgacctcctgccccccgaggtctgcagtctcctgaacccagcagccatctacgccaacaacgagatcagcctgcgtgacgttgaggtctacggctttgactacgactacaccctggcccagtatgcagacgcactgcaccccgagatcttcagtaccgcccgtgacatcctgatcgagcactacaagagccttctgatgaagattgacgccttccactacgtgcagctggggacagcctacaggggcctccagcctgtgccagacgaggaggtgattgagctgtatgggggtacccagcacatcccactataccagatgagtggcttctatggcaagggtccctccattaagcagttcatggacatcttctcgctaccggagatggctctgctgtcctgtgtggtggactactttctgggccacagcctggagtttgaccaagcacatctctacaaggacgtgacggacgccatccgagacgtgcatgtgaagggcctcatgtaccagtggatcgagcaggacatggagaagtacatcctgagaggggatgagacgtttgctgtcctgagccgcctggtggcccatgggaaacagctgttcctcatcaccaacagtcctttcagcttcgtagacaaggggatgcggcacatggtgggtcccgattggcgccagctcttcgatgtggtcattgtccaggcagacaagcccagcttcttcactgaccggcgcaagcctttcagaaaactcgatgagaagggctcacttcagtgggaccggatcacccgcttggaaaagggcaagatctatcggcagggaaacctgtttgacttcttacgcttgacggaatggcgtggcccccgcgtgctctacttcggggaccacctctatagtgatctggcggatctcatgctgcggcacggctggcgcacaggcgccatcatccccgagctggagcgtgagatccgcatcatcaacacggagcagtacatgcactcgctgacgtggcagcaggcgctcacggggctgctggagcgcatgcagacctatcaggacgcggagtcgaggcaggtgctggctgcctggatgaaagagcggcaggagctgaggtgcatcaccaaggccctgttcaatgcgcagttcggcagcatcttccgcaccttccacaaccccacctacttctcaaggcgcctcgtgcgcttctctgacctctacatggcctccctcagctgcctgctcaactaccgcgtggacttcaccttctacccacgccgtacgccgctgcagcacgaggcacccctctggatggaccagctctgcaccggctgcatgaagacccccttccttggtgacatggcccacatccgctga

SEQ ID NO: 14287 - DNA, 2004 bp, Homo sapiens
  source 1..2004: mol_type = unassigned DNA
ggatgctgcagggcatcccctcgcctggaggaggttcacttgtggccaggttcccagcacacccacttgctcactggggccctggggacaccgccacactcgagcccatcctacggcctcaatccttaccagtccccaggccatggactgccacactgtaggtcttcaatcaaggttcagtggagtttcgaatgtacacacaccctgaaagacagcgcggccacctcagaaaacaacgcgcgcccagctggctcccctccgacagggcccacggctactgggtcggcctcctccggaccctgagcacagcctggtatgcgtgcgggctcggaatacggatctgagcagaagaaatgcgagtggagagcggttctgcgcaggaaagaggaattttgttggaaagcctgtcgacgttgctagaaaagaccacagcatctcacgaggggcgtgcgccgggaaaccgggagttgacgggtcagtgcggccagttgccgaggtccgaaccaagcgggcgcagtgaccgtggcccacaaccctgcagcgcacggcccagtcacctggttagcggacgtcggctgccctgcaggcccctcggcctcccccagcgtgggcctggcaccgggaagcgcgggaagggctctttatttgttagaccaacctcctgccccccgaggtctgcagtctcctgaacccagcagccatctacgccaacaacgagatcagcctgcgtgacgttgaggtctacggctttgactacgactacaccctggcccagtatgcagacgcactgcaccccgagatcttcagtaccgcccgtgacatcctgatcgagcactacaagtacccagaagggattcggaagtatgactacaaccccagctttgccatccgtggcctccactatgacattcagaagagccttctgatgaagattgacgccttccactacgtgcagctggggacagcctacagggtccctccattaagcagttcatggacatcttctcgctaccggagatggctctgctgtcctgtgtggtggactactttctgggccacagcctggagtttgaccaagcacatctctacaaggacgtgacggacgccatccgagacgtgcatgtgaagggcctcatgtaccagtggatcgagcaggacatggagaagtacatcctgagaggggatgagacgtttgctgtcctgagccgcctggtggcccatgggaaacagctgttcctcatcaccaacagtcctttcagcttcgtagacaaggggatgcggcacatggtgggtcccgattggcgccagctcttcgatgtggtcattgtccaggcagacaagcccagcttcttcactgaccggcgcaagcctttcagaaaactcgatgagaagggctcacttcagtgggaccggatcacccgcttggaaaagggcaagatctatcggcagggaaacctgtttgacttcttacgcttgacggaatggcgtggcccccgcgtgctctacttcggggaccacctctatagtgatctggcggatctcatgctgcggcacggctggcgcacaggcgccatcatccccgagctggagcgtgagatccgcatcatcaacacggagcagtacatgcactcgctgacgtggcagcaggcgctcacggggctgctggagcgcatgcagacctatcaggacgcggagtcgaggcaggtgctggctgcctggatgaaagagcggcaggagctgaggtgcatcaccaaggccctgttcaatgcgcagttcggcagcatcttccgcaccttccacaaccccacctacttctcaaggcgcctcgtgcgcttctctgacctctacatggcctccctcagctgcctgctcaactaccgcgtggacttcaccttctacccacgccgtacgccgctgcagcacgaggcacccctctggatggaccagctctgcaccggctgcatgaagacccccttccttggtgacatggcccacatccgctga

SEQ ID NO: 14288 - DNA, 453 bp, Homo sapiens
  source 1..453: mol_type = unassigned DNA
ccgagctggagcgtgagatccgcatcatcaacacggagcagtacatgcactcgctgacgtggcagcaggcgctcacggggctgctggagcgcatgcaggtgtgggccggggtggctgtgggagggccagggcggtagcctcctgggtgcacacacccaatgcacactttgtgtccccagacctatcaggacgcggagtcgaggcaggtgctggctgcctggatgaaagagcggcaggagctgaggtgcatcaccaaggccctgttcaatgcgcagttcggcagcatcttccgcaccttccacaaccccacctacttctcaaggcgcctcgtgcgcttctctgacctctacatggcctccctcagctgcctgctcaactaccgcgtggacttcaccttctacccacgccgtacgccgctgcagcacgaggcacccctctggatggaccagctct

SEQ ID NO: 14289 - DNA, 887 bp, Homo sapiens
  source 1..887: mol_type = unassigned DNA
ggcacggagccgccctcagactacttgccacctgaaactcctccacacagagacaaggggatgcggcacatggtgggtcccgattggcgccagctcttcgatgtggtcattgtccaggcagacaagcccagcttcttcactgaccggcgcaagtatgggcatggtgggggttgcagggccagggaaggggaatagaggccccaccccaatgaggggactgaagcaggaggccaacctggcccttgcccactgcccaatgtgcttggggtgagaacacccccttgctggcatgggtccacttgagcaggtgggcctttacggaggagggatgggggttgcccggcccgtggcccagccacagactggaagtcatgccctttacctgcaccccaggcctttcagaaaactcgatgagaagggctcacttcagtgggaccggatcacccgcttggaaaagggcaagatctatcggcagggaaacctgtttgacttcttacgcttgacggaatggcgtggcccccgcgtgctctacttcggggaccacctctatagtgatctggcggatctcatgctgcggcacggctggcgcacaggcgccatcatccccgagctggagcgtgagatccgcatcatcaacacggagcagtacatgcactcgctgacgtggcagcaggcgctcacggggctgctggagcgcatgcagacctatcaggacgcggagtcgaggcaggtgctggctgcctggatgaaagagcggcaggagctgaggtgcatcaccaaggccctgttcaatgcgcagttcggcagcatcttccgcaccttccacaaccccacctacttctcaaggcgcctcgtgcgcttctctgacctctacatggcctccctca

SEQ ID NO: 14290 - DNA, 590 bp, Homo sapiens
  source 1..590: mol_type = unassigned DNA
ggacgccatccgagacgtgcatgtgaagggcctcatgtaccagtggatcgagcaggacatggagaagtacatcctgagaggggatgagacgtttgctgtcctgagccgcctggtggcccatgggaaacagctgttcctcatcaccaacagtcctttcagcttcgtgtgagtccagcccctgtggatggagggacagcagggccagggctctgggtggggagggcaggcacggagccgccctcagactacttgccacctgaaactcctccacacagagacaaggggatgcggcacatggtgggtcccgattggcgccagctcttcgatgtggtcattgtccaggcagacaagcccagcttcttcactgaccggcgcaagcctttcagaaaactcgatgagaagggctcacttcagtgggaccggatcacccgcttggaaaagggcaagatctatcggcagggaaacctgtttgacttcttacgcttgacggaatggcgtggcccccgcgtgctctacttcggggaccacctctatagtgatctggcggatctcatgctgcggcacggctggcgcacaggcgccatcatccc

SEQ ID NO: 14291 - DNA, 772 bp, Homo sapiens
  source 1..772: mol_type = unassigned DNA
ccaggacatgcggagactggtgcacgacctcctgccccccgaggtctgcagtctcctgaacccagcagccatctacgccaacaacgagatcagcctgcgtgacgttgaggtctacggctttgactacgactacaccctggcccagtatgcagacgcactgcaccccgagatcttcagtaccgcccgtgacatcctgatcgagcactacaagagccttctgatgaagattgacgccttccactacgtgcagctggggacagcctacaggggcctccagcctgtgccagacgaggagggtccctccattaagcagttcatggacatcttctcgctaccggagatggctctgctgtcctgtgtggtggactactttctgggccacagcctggagtttgaccaagcacatctctacaaggacgtgacggacgccatccgagacgtgcatgtgaagggcctcatgtaccagtggatcgagcaggacatggagaagtacatcctgagaggggatgagacgtttgctgtcctgagccgcctggtggcccatgggaaacagctgttcctcatcaccaacagtcctttcagcttcgtagacaaggggatgcggcacatggtgggtcccgattggcgccagctcttcgatgtggtcattgtccaggcagacaagcccagcttcttcactgaccggcgcaagcctttcagaaaactcgatgagaagggctcacttcagtgggaccggatcacccgcttggaaaagggcaagatctatcggcag

SEQ ID NO: 14292 - DNA, 419 bp, Homo sapiens
  source 1..419: mol_type = unassigned DNA
ctgaaagaggctggcttggggccacggtgaaactgcctcctcaccatccgtcctgcctccctggcgcccccagagccttctgatgaagattgacgccttccactacgtgcagctggggacagcctacaggggcctccagcctgtgccagacgaggaggtgattgagctgtatgggggtacccagcacatcccactataccagatgagtggcttctatggcaagggtccctccattaagcagttcatggacatcttctcgctaccggagatggctctgctgtcctgtgtggtggactactttctgggccacagcctggagtttgaccaagcacatctctacaaggacgtgacggacgccatccgagacgtgcatgtgaagggcctcatgtaccagtggatcgagcaggacatgggtaagt

SEQ ID NO: 14293 - DNA, 582 bp, Homo sapiens
  source 1..582: mol_type = unassigned DNA
ctagtctggccatacagagccagcccctctgggttggagtcctcagtgcccacatgacctcctgccccccgaggtctgcagtctcctgaacccagcagccatctacgccaacaacgagatcagcctgcgtgacgttgaggtctacggctttgactacgactacaccctggcccagtatgcagacgcactgcaccccgagatcttcagtaccgcccgtgacatcctgatcgagcactacaagtacccagaagggattcggaagtatgactacaaccccagctttgccatccgtggcctccactatgacattcagaagagccttctgatgaagattgacgccttccactacgtgcagctggggacagcctacaggggcctccagcctgtgccagacgaggagggtccctccattaagcagttcatggacatcttctcgctaccggagatggctctgctgtcctgtgtggtggactactttctgggccacagcctggagtttgaccaagcacatctctacaaggacgtgacggacgccatccgagacgtgcatgtgaagggcctcatgtaccagtggatcgagca

SEQ ID NO: 14294 - DNA, 536 bp, Homo sapiens
  source 1..536: mol_type = unassigned DNA
ccgagcccagagaccggggaccaggaccccgggaaaggagagcaccaggactagggggaggagcggaggatctggggtcagaagcatccagaggcgcaggacctcctgccccccgaggtctgcagtctcctgaacccagcagccatctacgccaacaacgagatcagcctgcgtgacgttgaggtctacggctttgactacgactacaccctggcccagtatgcagacgcactgcaccccgagatcttcagtaccgcccgtgacatcctgatcgagcactacaagtacccagaagggattcggaagtatgactacaaccccagctttgccatccgtggcctccactatgacattcagaagagccttctgatgaagattgacgccttccactacgtgcagctggggacagcctacagggtccctccattaagcagttcatggacatcttctcgctaccggagatggctctgctgtcctgtgtggtggactactttctgggccacagcctggagtttgaccaagcacatctctacaag

SEQ ID NO: 14295 - DNA, 560 bp, Homo sapiens
  source 1..560: mol_type = unassigned DNA
actccggctttgtggggtggcggagaatcacttcttgaccagtaaaggcaggatggtaaaggcccctgaggaatggtcattttgaagccttgggcatctgtccaccctcgaggtcccaggttgagtttgtgtctgtggaggggcggcccagcgttatttaagaagtctttgctctgggcccggagaagaccctcagagtatcctgagaagcctgccttggaggtttcagggaggactacggggatctactggacattgtcctcctgggcctgcctgcatctttggagcctcacagccctctaagctcctcttgtcatacaaggagcaaagtcattcccaccaagatcccatgacctcctgccccccgaggtctgcagtctcctgaacccagcagccatctacgccaacaacgagatcagcctgcgtgacgttgaggtctacggctttgactacgactacaccctggcccagtatgcagacgcactgcaccccgagatcttcagtaccgcccgtgacatcctgatcgagcactacaagtacccagaagggattcggaagta

SEQ ID NO: 14296 - DNA, 974 bp, Homo sapiens
  source 1..974: mol_type = unassigned DNA
gcactcgcccggctcgcccgctttcgcacccagttcacgcgccacagctatgtgtccccgagccgcgcgggcgcccgcgacgctactcctcgccctgggcgcggtgctgtggcctgcggctggcgcctgggagcttacgattttgcacaccaacgacgtgcacagccggctggagcagaccagcgaggactccagcaagtgcgtcaacgccagccgctgcatgggtggcgtggctcggctcttcaccaaggttcagcagatccgccgcgccgaacccaacgtgctgctgctggacgccggcgaccagtaccagggcactatctggttcaccgtgtacaagggcgccgaggtggcgcacttcatgaacgccctgcgctacgatgccatggcactgggaaatcatgaatttgataatggtgtggaaggactgatcgagccactcctcaaagaggccaaatttccaattctgagtgcaaacattaaagcaaaggggccactagcatctcaaatatcaggactttatttgccatataaagttcttcctgttggtgatgaagttgtgggaatcgttggatacacttccaaagaaaccccttttctctcaaatccagggacaaatttagtgtttgaagatgaaatcactgcattacaacctgaagtagataagttaaaaactctaaatgtgaacaaaattattgcactgggacattcgggttttgaaatggataaactcatcgctcagaaagtgaggggtgtggacgtcgtggtgggaggacactccaacacatttctttacacaggtaattgtttcaaaaggattgcatgggccaggatgtccagataagcactgtgtctcttttgcctttgtaactgttattactctttttactgctatttaatatgtaatgtatattatatgatctataatatatatgtaatatacattaaatgggaacatgtgcaaatcttacaaa

SEQ ID NO: 14297 - DNA, 3548 bp, Homo sapiens
  source 1..3548: mol_type = unassigned DNA
gcactcgcccggctcgcccgctttcgcacccagttcacgcgccacagctatgtgtccccgagccgcgcgggcgcccgcgacgctactcctcgccctgggcgcggtgctgtggcctgcggctggcgcctgggagcttacgattttgcacaccaacgacgtgcacagccggctggagcagaccagcgaggactccagcaagtgcgtcaacgccagccgctgcatgggtggcgtggctcggctcttcaccaaggttcagcagatccgccgcgccgaacccaacgtgctgctgctggacgccggcgaccagtaccagggcactatctggttcaccgtgtacaagggcgccgaggtggcgcacttcatgaacgccctgcgctacgatgccatggcactgggaaatcatgaatttgataatggtgtggaaggactgatcgagccactcctcaaagaggccaaatttccaattctgagtgcaaacattaaagcaaaggggccactagcatctcaaatatcaggactttatttgccatataaagttcttcctgttggtgatgaagttgtgggaatcgttggatacacttccaaagaaaccccttttctctcaaatccagggacaaatttagtgtttgaagatgaaatcactgcattacaacctgaagtagataagttaaaaactctaaatgtgaacaaaattattgcactgggacattcgggttttgaaatggataaactcatcgctcagaaagtgaggggtgtggacgtcgtggtgggaggacactccaacacatttctttacacaggcaatccaccttccaaagaggtgcctgctgggaagtacccattcatagtcacttctgatgatgggcggaaggttcctgtagtccaggcctatgcttttggcaaatacctaggctatctgaagatcgagtttgatgaaagaggaaacgtcatctcttcccatggaaatcccattcttctaaacagcagcattcctgaagatccaagcataaaagcagacattaacaaatggaggataaaattggataattattctacccaggaattagggaaaacaattgtctatctggatggctcctctcaatcatgccgctttagagaatgcaacatgggcaacctgatttgtgatgcaatgattaacaacaacctgagacacacggatgaaatgttctggaaccacgtatccatgtgcattttaaatggaggtggtatccggtcgcccattgatgaacgcaacaatggcacaattacctgggagaacctggctgctgtattgccctttggaggcacatttgacctagtccagttaaaaggttccaccctgaagaaggcctttgagcatagcgtgcaccgctacggccagtccactggagagttcctgcaggtgggcggaatccatgtggtgtatgatctttcccgaaaacctggagacagagtagtcaaattagatgttctttgcaccaagtgtcgagtgcccagttatgaccctctcaaaatggacgaggtatataaggtgatcctcccaaacttcctggccaatggtggagatgggttccagatgataaaagatgaattattaagacatgactctggtgaccaagatatcaacgtggtttctacatatatctccaaaatgaaagtaatttatccagcagttgaaggtcggatcaagttttccacaggaagtcactgccatggaagcttttctttaatatttctttcactttgggcagtgatctttgttttataccaatagccaaaaattctccttgcctttaatgtgtgaaactgcattttttcaagtgagattcaaatctgccttttaggacctggctttgtgacagcaaaaaccatctttacaggctcctagaagctgaaggttagagcattataaaatgaagagacagacatgattactcagggtcagcaacctagtgagttagaaaaaaaattaacatagggccctataaggagaaagccaactatgttaagtttacgtgtccaaattttaatgaaattttactaacaattttaaaccatatttttcttcttcatatccatttctaatccatcaaacagcttatgtttacataaaattttatcattcacaaggaagttttaagcacactgtctcatttgatatccacaacttatttttggtaggaaagagagatgtttttcccacctgtcagatgaaaaaactgaagctcaaaaagggttgacttgaccatacagctaatgctgacagatccaagacctagacctaggtcttttgaactcaagtccagcattctcaactatatcaagttactgttcagaatacttaatatctcctctcttcataattatcaatagccccaagctcatggatgacaaatctctgctttatttcttgtctctattttttcactttatagctcctgttataatagcaagtttaatggtataaacacaggataccatcctctcttgcaacacccatgtgcctttgatgagtcaggtagcaagctgtagtagataatgagaaaggccagaggctgcaaaagacagtcaaaggacacgagagaaaggaaggggaagaacaggactccaggactgttttatattatagaaaagcaagagctaaagagcatttacacatgttaaacagatacttgttaagcatagtgcctgacacacggcattagctgttattttatgagattccatcagctctgcctctgtcctctttcttctaacatgaaggtatcatgagaagagaaccttctaacataagctgtaattctaaacctgcacttgtccctctccagcaagaggctagcactgaattcattctactcatactacacacccagttatggaatgtccagagttctcgaagaaaataaatgactttaggaagaggtatacattttttaagtcgctctgcctccaaatctgaacagtcactgtaaatcattcttaagcccagatatgagaacttctgctggaaagtgggaccctctgagtgggtggtcagaaaatacccatgctgatgaaatgacctatgcccaaagaacaaatacttaacgtgggagtggaaccacatgagcctgctcagctctgcataagtaattcaagaaatgggaggcttcaccttaaaaacagtgtgcaaatggcagctagaggttttgataggaagtatgtttgtttcttagtgtttacaaatattaagtactcttgatacaaaatatacttttaaacttcataacctttttataaaagttgttgcagcaaaataatagcctcggttctatgcatatatggattagctataaaaaatgtcaataagattgtacaaggaaaattagagaaagtcacatttagggtttattttttacacttggccagtaaaatagggtaaatcctattagaattttttaaagaactttttttaagtttcctaaatctgtgtgtgtattgtgaagtggtataagaaatgactttgaaccactttgcaattgtagattcccaacaataaaattgaagat

SEQ ID NO: 14298 - DNA, 689 bp, Homo sapiens
  source 1..689: mol_type = unassigned DNA
tggacgtcgtggtgggaggacactccaacacatttctttacacaggcaatccaccttccaaagaggtgcctgctgggaagtacccattcatagtcacttctgatgatgggcggaaggttcctgtagtccaggcctatgcttttggcaaatacctaggctatctgaagatcgagtttgatgaaagaggaaacgtcatctcttcccatggaaatcccattcttctaaacagcagcattcctgaagatccaagcataaaagcagacattaacaaatggaggataaaattggataattattctacccaggaattagggaaaacaattgtctatctggatggctcctctcaatcatgccgctttagagaatgcaacatgggcaacctgatttgtgatgcaatgattaacaacaacctgagacacacggatgaaatgttctggaaccacgtatccatgtgcattttaaatggaggtggtatccggtcgcccattgatgaacgcaacaatggaatccatgtggtgtatgatctttcccgaaaacctggagacagagtagtcaaattagatgttctttgcaccaagtgtcgagtgcccagttatgaccctctcaaaatggacgaggtatataaggtgatcctcccaaacttcctggccaatggtggagatgggttccagatgataaaagatgaatta

SEQ ID NO: 14299 - DNA, 738 bp, Homo sapiens
  source 1..738: mol_type = unassigned DNA
gaaatcccattcttctaaacagcagcattcctgaagatccaagcataaaagcagacattaacaaatggaggataaaattggataattattctacccaggaattagggaaaacaattgtctatctggatggctcctctcaatcatgccgctttagagaatgcaacatgggcaacctgatttgtgatgcaatgattaacaacaacctgagacacacggatgaaatgttctggaaccacgtatccatgtgcattttaaatggaggtggtatccggtcgcccattgatgaacgcaacaatggcacaattacctgggagaacctggctgctgtattgccctttggaggcacatttgacctagtccagttaaaaggttccaccctgaagaaggcctttgagcatagcgtgcaccgctacggccagtccactggagagttcctgcaggtgggcgatttaaaggaatgctgtccaatctgtattaaccaggatgattcctggaaggagcagcctactgcacagacatacctgaacacctggttctagtcccactgtgacctggggcaagttctcaacccctctgggcacagggagaaaacctttcctgtttatctcatggactgcagtgaaagttgaatggaaataaatgcttcctaaattgccaagggcttctgaaacacttttgttaataattccacagtccagtgaattaatcctttaaaagcaatcttattttacctggaaa

SEQ ID NO: 14300 - DNA, 3918 bp, Homo sapiens
  source 1..3918: mol_type = unassigned DNA
actcctcctctctgcccctcagctcgctcatctttcttcccgccccctctcttttccttctttggttctttgaagtgatgagctagcgcaaccacaaaccatacattccttttgtagaaaaacccgtgcctcgaatgaggcgagactcagagaggacccaggcgcggggcggacccctccaattccttcctcgcgcccccgaaagagcggcgcaccagcagccgaactgccggcgcccaggctccctggtccggccgggatgcggccggtacccgctccccgccgggaacaacctctccactcttcctgcagggagctggtgccagccgacagccgcgccagggccgctccgggtaccagggtcggatcgggtgacgtcgcgaacttgcgcctggccgccaagccggcctccaggctgaagaaggacccgccccggccttgacccgggccccgcccctccagccggggcaccgagccccggccctagctgctcgcccctactcgccggcactcgcccggctcgcccgctttcgcacccagttcacgcgccacagctatgtgtccccgagccgcgcgggcgcccgcgacgctactcctcgccctgggcgcggtgctgtggcctgcggctggcgcctgggagcttacgattttgcacaccaacgacgtgcacagccggctggagcagaccagcgaggactccagcaagtgcgtcaacgccagccgctgcatgggtggcgtggctcggctcttcaccaaggttcagcagatccgccgcgccgaacccaacgtgctgctgctggacgccggcgaccagtaccagggcactatctggttcaccgtgtacaagggcgccgaggtggcgcacttcatgaacgccctgcgctacgatgccatggcactgggaaatcatgaatttgataatggtgtggaaggactgatcgagccactcctcaaagaggccaaatttccaattctgagtgcaaacattaaagcaaaggggccactagcatctcaaatatcaggactttatttgccatataaagttcttcctgttggtgatgaagttgtgggaatcgttggatacacttccaaagaaaccccttttctctcaaatccagggacaaatttagtgtttgaagatgaaatcactgcattacaacctgaagtagataagttaaaaactctaaatgtgaacaaaattattgcactgggacattcgggttttgaaatggataaactcatcgctcagaaagtgaggggtgtggacgtcgtggtgggaggacactccaacacatttctttacacaggcaatccaccttccaaagaggtgcctgctgggaagtacccattcatagtcacttctgatgatgggcggaaggttcctgtagtccaggcctatgcttttggcaaatacctaggctatctgaagatcgagtttgatgaaagaggaaacgtcatctcttcccatggaaatcccattcttctaaacagcagcattcctgaagatccaagcataaaagcagacattaacaaatggaggataaaattggataattattctacccaggaattagggaaaacaattgtctatctggatggctcctctcaatcatgccgctttagagaatgcaacatgggcaacctgatttgtgatgcaatgattaacaacaacctgagacacacggatgaaatgttctggaaccacgtatccatgtgcattttaaatggaggtggtatccggtcgcccattgatgaacgcaacaatggaatccatgtggtgtatgatctttcccgaaaacctggagacagagtagtcaaattagatgttctttgcaccaagtgtcgagtgcccagttatgaccctctcaaaatggacgaggtatataaggtgatcctcccaaacttcctggccaatggtggagatgggttccagatgataaaagatgaattattaagacatgactctggtgaccaagatatcaacgtggtttctacatatatctccaaaatgaaagtaatttatccagcagttgaaggtcggatcaagttttccacaggaagtcactgccatggaagcttttctttaatatttctttcactttgggcagtgatctttgttttataccaatagccaaaaattctccttgcctttaatgtgtgaaactgcattttttcaagtgagattcaaatctgccttttaggacctggctttgtgacagcaaaaaccatctttacaggctcctagaagctgaaggttagagcattataaaatgaagagacagacatgattactcagggtcagcaacctagtgagttagaaaaaaaattaacatagggccctataaggagaaagccaactatgttaagtttacgtgtccaaattttaatgaaattttactaacaattttaaaccatatttttcttcttcatatccatttctaatccatcaaacagcttatgtttacataaaattttatcattcacaaggaagttttaagcacactgtctcatttgatatccacaacttatttttggtaggaaagagagatgtttttcccacctgtcagatgaaaaaactgaagctcaaaaagggttgacttgaccatacagctaatgctgacagatccaagacctagacctaggtcttttgaactcaagtccagcattctcaactatatcaagttactgttcagaatacttaatatctcctctcttcataattatcaatagccccaagctcatggatgacaaatctctgctttatttcttgtctctattttttcactttatagctcctgttataatagcaagtttaatggtataaacacaggataccatcctctcttgcaacacccatgtgcctttgatgagtcaggtagcaagctgtagtagataatgagaaaggccagaggctgcaaaagacagtcaaaggacacgagagaaaggaaggggaagaacaggactccaggactgttttatattatagaaaagcaagagctaaagagcatttacacatgttaaacagatacttgttaagcatagtgcctgacacacggcattagctgttattttatgagattccatcagctctgcctctgtcctctttcttctaacatgaaggtatcatgagaagagaaccttctaacataagctgtaattctaaacctgcacttgtccctctccagcaagaggctagcactgaattcattctactcatactacacacccagttatggaatgtccagagttctcgaagaaaataaatgactttaggaagaggtatacattttttaagtcgctctgcctccaaatctgaacagtcactgtaaatcattcttaagcccagatatgagaacttctgctggaaagtgggaccctctgagtgggtggtcagaaaatacccatgctgatgaaatgacctatgcccaaagaacaaatacttaacgtgggagtggaaccacatgagcctgctcagctctgcataagtaattcaagaaatgggaggcttcaccttaaaaacagtgtgcaaatggcagctagaggttttgataggaagtatgtttgtttcttagtgtttacaaatattaagtactcttgatacaaaatatacttttaaacttcataacctttttataaaagttgttgcagcaaaataatagcctcggttctatgcatatatggattagctataaaaaatgtcaataagattgtacaaggaaaattagagaaagtcacatttagggtttattttttacacttggccagtaaaatagggtaaatcctattagaattttttaaagaactttttttaagtttcctaaatctgtgtgtgtattgtgaagtggtataagaaatgactttgaaccactttgcaattgtagattcccaacaataaaattgaagataagctctttggtc

SEQ ID NO: 14301 - DNA, 875 bp, Homo sapiens
  source 1..875: mol_type = unassigned DNA
agagttgaagctcctctcccttccgaacagctccgcgcaccgccccgcgacgcagcccggcgcaactactttcttctctctcctttctttcttcctctcctttttcccctgctgggtagtggctgcggcggggtgggggagactttgaatgaccgagctcgcgtccacctttctcttcatgtcgacgtccctggaaacggccacacggatgccatggttacttttgccacggtctgcctgaagccaagggagaagatgtggcagctccagtgcagacctcaggatcctctgtgacatctctggagaatggacatgctgaaagtcagatggaagggagagacctggacaggcatgctgctgcgttgaaaggcaggtttggagaagaactgttaaaaccgtataataaccacgtgaataccttgctaggatgccctgcagtctttggaaggacaggggcaagtgaagaaacctgaagctgaagctccattagctttgtggcgagtcaaccctggtcaaggttggaggtggggctcagaagaactaaaccaacagatacttccagctgtacacactcatcccagccagcgacacccactcttcaggtccatggtcccaggccgcagcaaagttctgagactaaggactgtgttctggacaaggacctcctgaggcacccatgctgcagttcccagaggcttaaggacggctgcgggacgtgtgggcgtctgggttgcactctgaaggactgcgttccccattgcatgagggaagaaactgagggtggagaggctccaggacagagcaggatggtgctggtgttgaactctgagacgacgtgactacaatgcctgtgccctttgctgggaggctaatca

SEQ ID NO: 14302 - DNA, 1336 bp, Homo sapiens
  source 1..1336: mol_type = unassigned DNA
gagttgaagctcctctcccttccgaacagctccgcgcaccgccccgcgacgcagcccggcgcaactactttcttctctctcctttctttcttcctctcctttttcccctgctgggtagtggctgcggcggggtgggggagactttgaatgaccgagctcgcgtccacctttctcttcatgtcgacgtccctggaaacggccacacggatgccatggttacttttgccacgatcttacaggtgaacaaggtgatgtccatcttgttttatgtgatatttctcgcttatctccgtggcatccaaggtaacaacatggatcaaaggagtttgccagaagactcgctcaattccctcattattaagctgatccaggcagatattttgaaaaacaagctctccaagcagatggtggacgttaaggaaaattaccagagcaccctgcccaaagctgaggctccccgagagccggagcggggagggcccgccaagtcagcattccagccggtgattgcaatggacaccgaactgctgcgacaacagagacgctacaactcaccgcgggtcctgctgagcgacagcacccccttggagcccccgcccttgtatctcatggaggattacgtgggcagccccgtggtggcgaacagaacatcacggcggaaacggtacgcggagcataagagtcaccgaggggagtactcggtatgtgacagtgagagtctgtgggtgaccgacaagtcatcggccatcgacattcggggacaccaggtcacggtgctgggggagatcaaaacgggcaactctcccgtcaaacaatatttttatgaaacgcgatgtaaggaagccaggccggtcaaaaacggttgcaggggtattgatgataaacactggaactctcagtgcaaaacatcccaaacctacgtccgagcactgacttcagagaacaataaactcgtgggctggcggtggatacggatagacacgtcctgtgtgtgtgccttgtcgagaaaaatcggaagaacatgaattggcatctctccccatatataaattattactttaaattatatgatatgcatgtagcatataaatgtttatattgtttttatatattataagttgacctttatttattaaacttcagcaaccctacagtatataagcttttttctcaataaaatcagtgtgcttgccttccctcaggcctctcccatctgttaaaacttgttttgtgatccggctctcaggagtcactctgtaaaatctgtgtacaccagtattttgcattcagtattgtcaaggccatgactgttgttttagtaaacttgttaaaatca

SEQ ID NO: 14303 - DNA, 516 bp, Homo sapiens
  source 1..516: mol_type = unassigned DNA
cccacccggtggccaccccaccctgggcctttgcgcagatgttggagctccgtacgcagcccgcacatctgggacccctccggggagcggcgggcacccgggcccggccatcccaggggatctccttgcggtatcgtccagcctgttctcggactttgagcggtggcgtgggaggccgggagacctgggcacccgcgcagccagccagatcttacaggtgaacaaggtgatgtccatcttgttttatgtgatatttctcgcttatctccgtggcatccaaggtaacaacatggatcaaaggagtttgccagaagactcgctcaattccctcattattaagctgatccaggcagatattttgaaaaacaagctctccaagcagatggtggacgttaaggaaaattaccagagcaccctgcccaaagctgaggctccccgagagccggagcggggagggcccgccaagtcagcattccagccggtgattgcaatggacaccgaactgctgcgacaaca

SEQ ID NO: 14304 - DNA, 1028 bp, Homo sapiens
  source 1..1028: mol_type = unassigned DNA
tgccagaataacacagactcagctgccagagcctgctcttaacacctgtgtttccttttcagatcttacaggtgaacaaggtgatgtccatcttgttttatgtgatatttctcgcttatctccgtggcatccaaggtaacaacatggatcaaaggagtttgccagaagactcgctcaattccctcattattaagctgatccaggcagatattttgaaaaacaagctctccaagcagatggtggacgttaaggaaaattaccagagcaccctgcccaaagctgaggctccccgagagccggagcggggagggcccgccaagtcagcattccagccggtgattgcaatggacaccgaactgctgcgacaacagagacgctacaactcaccgcgggtcctgctgagcgacagcacccccttggagcccccgcccttgtatctcatggaggattacgtgggcagccccgtggtggcgaacagaacatcacggcggaaacggtacgcggagcataagagtcaccgaggggagtactcggtatgtgacagtgagagtctgtgggtgaccgacaagtcatcggccatcgacattcggggacaccaggtcacggtgctgggggagatcaaaacgggcaactctcccgtcaaacaatatttttatgaaacgcgatgtaaggaagccaggccggtcaaaaacggttgcaggggtattgatgataaacactggaactctcagtgcaaaacatcccaaacctacgtccgagcactgacttcagagaacaataaactcgtgggctggcggtggatacggatagacacgtcctgtgtgtgtgccttgtcgagaaaaatcggaagaacatgaattggcatctctccccatatataaattattactttaaattatatgatatgcatgtagcatataaatgtttatattgtttttatatattataagttgacctttatttattaaacttcagcaaccctacagtatataagcttttttctcaataaaatcagtgtgcttgccttc

SEQ ID NO: 14305 - DNA, 480 bp, Homo sapiens
  source 1..480: mol_type = unassigned DNA
cagtaaggacaaaattaaatgaaatgtgcaaaataactgcacaaactctgtgctgggtgcctggtgacgcggaaccgtcggctggcacgctgcgcccccacgtggaagcttgcaaggactgtgttctggacaaggacctcctgaggcacccatgctgcagttcccagaggcttaaggacggctgcgggacgtgtgggcgtctgggttgggtcacctctccaaggatgccttctctgaccacccagcgtagttccccaggcactccgtcactgtcctgctgtaaccccttcctggcgatcctcttcgcctgatatttttgtgctcactgatggatgagctctgctcatgaaaatgcaaagtcccttaagagcagagtccgtgtctgttcttttggctgcactgttacctgcacagagaagagtgcccaaccgagattgtgcattcaatacgtatattttattagttgaaataaatgaatga

SEQ ID NO: 14306 - DNA, 440 bp, Homo sapiens
  source 1..440: mol_type = unassigned DNA
tgtgctgggtgcctggtgacgcggaaccgtcggctggcacgctgcgcccccacgtggaagcttgcaaggactgtgttctggacaaggacctcctgaggcacccatgctgcagttcccagaggcttaaggacggctgcgggacgtgtgggcgtctgggttgagatggagaaaacatagcatgctggagcagaagggagattgaggagaagaatctggaccagcaaagaaaaagaattccaattttccttccctcaaggacaacctgcccatagataagcgccttgagaccaaagcccattatggttgctgccaggcagcttggagacacaggaatggcctcccaacatccctgacctcggtttttgatacctttgtaaatgatatccctaatctgtctgctcctgaaatccctacctcgtttttaaaatgttttcctaaaa

SEQ ID NO: 14307 - DNA, 436 bp, Homo sapiens
  source 1..436: mol_type = unassigned DNA
ggagataattacggagaagtcatactctctcacaccctcggctttcttgttgtgtccttcagcaaaacagtggatttaaatctccttgcacaagcttgagagcaacacaatctatcaggaaagaaagaaagaaaaaaaccgaacctgacaaaaaagaagaaaaagaagaagaaaaaaaatcatgaaaaccatccagccaaaaatgcacaattctatctcttgggcaatcttcacggggctggctgctctgtgtctcttccaaggtaagtgacatttcattctgctcatccccaaggcaaagttggatgtttttaaagtggaaaaaaaaatgaacggaaaaagaaacggggaaggtgggaagaggtggaaatggaagggcacaggagtgcccgtgcgcagcggagatgccaccttccccaaagctatggacaacgtg

SEQ ID NO: 14308 - DNA, 563 bp, Homo sapiens
  source 1..563: mol_type = unassigned DNA
gataattacggagaagtcatactctctcacaccctcggctttcttgttgtgtccttcagcaaaacagtggatttaaatctccttgcacaagcttgagagcaacacaatctatcaggaaagaaagaaagaaaaaaaccgaacctgacaaaaaagaagaaaaagaagaagaaaaaaaatcatgaaaaccatccagccaaaaatgcacaattctatctcttgggcaatcttcacggggctggctgctctgtgtctcttccaaggtaagtgacatttcattctgctcatccccaaggcaaagttggatgtttttaaagtggaaaaaaaaatgaacggaaaaagaaacggggaaggtgggaagaggtggaaatggaagggcacaggtaggtgcatactcaattcttcatcttttgcacagactggtgggggggtcttccccctagattcggtggagattcctttcctcaggacggaaggtccaggtggtgactgtggcttttgagatgatgatggctttgttctttgaaaggggtttgtcctgtgacacaatggccagcacttttgct

SEQ ID NO: 14309 - DNA, 644 bp, Homo sapiens
  source 1..644: mol_type = unassigned DNA
agtaagtaagtgacatttcattctgctcatccccaaggcaaagttggatgtttttaaagtggaaaaaaaaatgaacggaaaaagaaacggggaaggtgggaagaggtggaaatggaagggcacaggagtgcccgtgcgcagcggagatgccaccttccccaaagctatggacaacgtgacggtccggcagggggagagcgccaccctcaggtgcactattgacaaccgggtcacccgggtggcctggctaaaccgcagcaccatcctctatgctgggaatgacaagtggtgcctggatcctcgcgtggtccttctgagcaacacccaaacgcagtacagcatcgagatccagaacgtggatgtgtatgacgagggcccttacacctgctcggtgcagacagacaaccacccaaagacctctagggtccacctcattgtgcaagtatctcccaaaattgtagagatttcttcagatatctccattaatgaagggaacaatattagcctcacctgcatagcaactggtagaccagagcctacggttacttggagacacatctctcccaaagcggttggctttgtgagtgaagacgaatacttggaaattcagggcatcaccagggagcagtcaggggactacgagt

SEQ ID NO: 14310 - DNA, 488 bp, Homo sapiens
  source 1..488: mol_type = unassigned DNA
atcctgatgatctcaaaatccccttctagaggggctctcagccttcactctgcagatcaagaagcccaccagtcctcacccacccgactcccaccttccctgcccctgggagccagctttacccagacgagttctgctcccagcctctaaaatgcagaacgggctgctgctttcaaagctatacttcgatggagtttcctatactagtgaaatctgttttaaatgaacatcaagaatagccttgaaagggaaaatatggactcgaatctacgccgactggcaccaagcggcatgtgagaaacgtgaggaaaaaaagtccagctcttcctgctcgtcagctgggccctcccccttccagaaagctaactgtaagtgacatttcattctgctcatccccaaggcaaagttggatgtttttaaagtggaaaaaaaaatgaacggaaaaagaaacggggaaggtgggaagaggtggaaatggaagggcacag

SEQ ID NO: 14311 - DNA, 556 bp, Homo sapiens
  source 1..556: mol_type = unassigned DNA
attccctcagagccgaagttaagggagaaataataatacaggcacaggaggaccagcagcagccagagaggagaagtgacagggaccgaggcaaatccagtctctccccgggtttcaagaatttgagaaacacacctcttaaagatgaaatcagctgtgcgagagtgtgaggcccaggaaacctgggagtctgctgtataaatacagcaagtggctcacactcatccacccaagtgagcacttttgcaggcccagcatcttttaatggcgacaaaacaagaataaagaatgagtgcccgtgcgcagcggagatgccaccttccccaaagctatggacaacgtgacggtccggcagggggagagcgccaccctcagttgaaactcggctgttccctggattatttccactcctggagtcctcaaaagtggctgtttttctcccacaccttgcttaccctgaggcctgaaagttggataaacgtcctccttgctactcattatggctgctggacatttctttttcacctttctcgacatatccagttagggtgcagca

SEQ ID NO: 14312 - DNA, 573 bp, Homo sapiens
  source 1..573: mol_type = unassigned DNA
acactaagaggcttctgtgattttggatttgttttatatatggcagatctctagaatggagtgcccgtgcgcagcggagatgccaccttccccaaagctatggacaacgtgacggtccggcagggggagagcgccaccctcagtatctcccaaaattgtagagatttcttcagatatctccattaatgaagggaacaatattagcctcacctgcatagcaactggtagaccagagcctacggttacttggagacacatctctcccaaagcggttggctttgtgagtgaagacgaatacttggaaattcagggcatcaccagggagcagtcaggggactacgagtgcagtgcctccaatgacgtggccgcgcccgtggtacggagagtaaaggtcaccgtgaactatccaccatacatttcagaagccaagggtacaggtgtccccgtgggacaaaaggggacactgcagtgtgaagcctcagcagtcccctcagcagaattccagtggtacaaggatgacaaaagactgattgaaggaaagaaaggggtgaaagtggaaaacagacctttcct

SEQ ID NO: 14313 - DNA, 360 bp, Homo sapiens
  source 1..360: mol_type = unassigned DNA
cggccgcagcgcgcatttgggctccgaggaagttgaccgaggcggctgccgcaggatcccgggcccggatcgcacgaagcccgcgcggccgtctcctccgcgcgccacccctgcgcctcccgcgagctccacttcccatctgctattgtttccgattgttttccggtggcgagcccggctccgaaacttacaaagtgttggatgtcccccgttcgaactgagggactgcagaccgcctctgggtagctggatgaagcccaccccgtccccttctggagtgcccgtgcgcagcggagatgccaccttccccaaagctatggacaacgtgacggtccggcagggggagagcgccaccctcag

SEQ ID NO: 14314 - DNA, 3190 bp, Homo sapiens
  source 1..3190: mol_type = unassigned DNA
aacttacaaagtgttggatgtcccccgttcgaactgagggactgcagaccgcctctgggtagctggatgaagcccaccccgtccccttctggtaccaaagtgcttactcctctccaaagtgccgtgtctgaactgccgctgggaagaagcggctcctgagacgcgcccacacctttcacctgccgcgcgcttccccctcctcggccaccttcccggcggaagcagcgaggagggagccccctttggccgtcctccgtggaaccggttttccgaggctggcaaaagccgaggctggatttgggggaggaatattagactcggaggagtctgcgcgcttttctcctccccgcgcctcccggtcgccgcgggttcaccgctcagtccccgcgctcgctccgcaccccacccacttcctgtgctcgcccggggggcgtgtgccgtgcggctgccggagttcggggaagttgtggctgtcgagaatgggggtctgtgggtacctgttcctgccctggaagtgcctcgtggtcgtgtctctcaggctgctgttccttgtacccacaggagtgcccgtgcgcagcggagatgccaccttccccaaagctatggacaacgtgacggtccggcagggggagagcgccaccctcaggtgcactattgacaaccgggtcacccgggtggcctggctaaaccgcagcaccatcctctatgctgggaatgacaagtggtgcctggatcctcgcgtggtccttctgagcaacacccaaacgcagtacagcatcgagatccagaacgtggatgtgtatgacgagggcccttacacctgctcggtgcagacagacaaccacccaaagacctctagggtccacctcattgtgcaagtatctcccaaaattgtagagatttcttcagatatctccattaatgaagggaacaatattagcctcacctgcatagcaactggtagaccagagcctacggttacttggagacacatctctcccaaagcggttggctttgtgagtgaagacgaatacttggaaattcagggcatcaccagggagcagtcaggggactacgagtgcagtgcctccaatgacgtggccgcgcccgtggtacggagagtaaaggtcaccgtgaactatccaccatacatttcagaagccaagggtacaggtgtccccgtgggacaaaaggggacactgcagtgtgaagcctcagcagtcccctcagcagaattccagtggtacaaggatgacaaaagactgattgaaggaaagaaaggggtgaaagtggaaaacagacctttcctctcaaaactcatcttcttcaatgtctctgaacatgactatgggaactacacttgcgtggcctccaacaagctgggccacaccaatgccagcatcatgctatttggtccaggcgccgtcagcgaggtgagcaacggcacgtcgaggagggcaggctgcgtctggctgctgcctcttctggtcttgcacctgcttctcaaattttgatgtgagtgccacttccccacccgggaaaggctgccgccaccaccaccaccaacacaacagcaatggcaacaccgacagcaaccaatcagatatatacaaatgaaattagaagaaacacagcctcatgggacagaaatttgagggaggggaacaaagaatactttggggggaaaaaagttttaaaaaagaaattgaaaattgccttgcagatatttaggtacaatggagttttcttttcccaaacgggaagaacacagcacacccggcttggacccactgcaagctgcatcgtgcaacctctttggtgccagtgtgggcaagggctcagcctctctgcccacagagtgcccccacgtggaacattctggagctggccatcccaaattcaatcagtccatagagacgaacagaatgagaccttccggcccaagcgtggcgctgcgggcactttggtagactgtgccaccacggcgtgtgttgtgaaacgtgaaataaaaagagcaagaaagaaaaaggaaacaaaataagaccgtctgacagcaacaacggtcccacaaacaagtcacaaaagataccgttaaacttttttttttttttatcattttactacatgaacatcatggataacaagggattctgattcattattaatttcattaattatattttctgatatgagtctagaacttactgcaaaaacaagacaaaactaaaaaaatacaactgagaagggtgaagagaagtatgtttgttaaacagtaaaaatgaatagtatacttcttaactaggtttacaactggtggaccacacaccaggcactaatcacctggtgaggatttggcatatccaccaaaaaatgcatccgatttaaccaacatctccaccagcgctacggactcctcccaattctgacatctcttgcagacaatactatgctctctacacactgtttagaaatggaaaggtgatctgcactgtatcttgggtttgttggctatgcttcctttgatgacatatattatacagtatatatatacatatattttttttgttagagttctagccattttatttctccgcagggtcctttctcagacattactgcatgctgtatatggcgttagctgtgtgttgatcttctaaaagatgatagagtttactggtaattgtgtaatcagctcctgcctttttattttcttgggttatttacatgtcagagacatttataaaaagtgaaaggataaaaaaaaaaaaaaacaactaataccgggcgcagcatctttccaggtgtggctctgcgctaggccaccccaggtggccccgctttctccattctgccctgtggcgttaacagacagcaagcagctgaacaagcagtaccgtcagtacccacttgctttagcccattatgggaatctctgatgcctttgtgaccactggagagtttaatcctcttggtttattttatttcccacctttgtgtgagtgtgtatgaaagagaagaaaatgcaatttttaggtaatcttttttttttttcccctcccctgaaagtctgggaacctgagagtcctcggggaggggtcctggatgtgatgagggaaagggggattgggggatccgggagggtggggttgtctctgacttgacattaaaaagtgttccatgtccctcttca

SEQ ID NO: 14315 - DNA, 851 bp, Homo sapiens
  source 1..851: mol_type = unassigned DNA
cgtgcggctgccggagttcggggaagttgtggctgtcgagaatgggggtctgtgggtacctgttcctgccctggaagtgcctcgtggtcgtgtctctcaggctgctgttccttgtacccacaggagtgcccgtgcgcagcggagatgccaccttccccaaagctatggacaacgtgacggtccggcagggggagagcgccaccctcaggtgcactattgacaaccgggtcacccgggtggcctggctaaaccgcagcaccatcctctatgctgggaatgacaagtggtgcctggatcctcgcgtggtccttctgagcaacacccaaacgcagtacagcatcgagatccagaacgtggatgtgtatgacgagggcccttacacctgctcggtgcagacagacaaccacccaaagacctctagggtccacctcattgtgcaaggtaggtgggcggggcttggcggggagatctggctggccagcctggaaagccttcaggtaaaggtttgttctctgatcctcaacagagatgagttatccttattctacgcatctggggtccagggcacatttctggttgtcattttgcagttagaagctaaattttccagtcattttcattgagtggaactaggaattgtttttttcatttttgttccaataatatattttctcaggaaattatcttgtaattattgctcttcttggcttttttctcccctaagttttagttatttttgtttgtttgttttttgttttgttttgttttgttttttagatttcatccaattccaagactgtgttatgtttaaaaccagacttttaatgcacttttggaagtacaggtatgcc

SEQ ID NO: 14316 - DNA, 1607 bp, Homo sapiens
  source 1..1607: mol_type = unassigned DNA
ggaagttgtggctgtcgagaatgggggtctgtgggtacctgttcctgccctggaagtgcctcgtggtcgtgtctctcaggctgctgttccttgtacccacaggagtgcccgtgcgcagcggagatgccaccttccccaaagctatggacaacgtgacggtccggcagggggagagcgccaccctcaggtgcactattgacaaccgggtcacccgggtggcctggctaaaccgcagcaccatcctctatgctgggaatgacaagtggtgcctggatcctcgcgtggtccttctgagcaacacccaaacgcagtacagcatcgagatccagaacgtggatgtgtatgacgagggcccttacacctgctcggtgcagacagacaaccacccaaagacctctagggtccacctcattgtgcaagtatctcccaaaattgtagagatttcttcagatatctccattaatgaagggaacaatattagcctcacctgcatagcaactggtagaccagagcctacggttacttggagacacatctctcccaaagcggttggctttgtgagtgaagacgaatacttggaaattcagggcatcaccagggagcagtcaggggactacgagtgcagtgcctccaatgacgtggccgcgcccgtggtacggagagtaaaggtcaccgtgaactatccaccatacatttcagaagccaagggtacaggtgtccccgtgggacaaaaggggacactgcagtgtgaagcctcagcagtcccctcagcagaattccagtggtacaaggatgacaaaagactgattgaaggaaagaaaggggtgaaagtggaaaacagacctttcctctcaaaactcatcttcttcaatgtctctgaacatgactatgggaactacacttgcgtggcctccaacaagctgggccacaccaatgccagcatcatgctatttgaagtgaaaactacagccctgaccccttggaaaggtccaggcgccgtcagcgaggtgagcaacggcacgtcgaggagggcaggctgcgtctggctgctgcctcttctggtcttgcacctgcttctcaaattttgatgtgagtgccacttccccacccgggaaaggctgccgccaccaccaccaccaacacaacagcaatggcaacaccgacagcaaccaatcagatatatacaaatgaaattagaagaaacacagcctcatgggacagaaatttgagggaggggaacaaagaatactttggggggaaaaaagttttaaaaaagaaattgaaaattgccttgcagatatttaggtacaatggagttttcttttcccaaacgggaagaacacagcacacccggcttggacccactgcaagctgcatcgtgcaacctctttggtgccagtgtgggcaagggctcagcctctctgcccacagagtgcccccacgtggaacattctggagctggccatcccaaattcaatcagtccatagagacgaacagaatgagaccttccggcccaagcgtggcgctgcgggcactttggtagactgtgccaccacggcgtgtgttgtgaaacgtgaaataaaaagagcaagaaagaaaaaggaaa

SEQ ID NO: 14317 - DNA, 1315 bp, Homo sapiens
  source 1..1315: mol_type = unassigned DNA
tgtggctgtcgagaatgggggtctgtgggtacctgttcctgccctggaagtgcctcgtggtcgtgtctctcaggctgctgttccttgtacccacaggagtgcccgtgcgcagcggagatgccaccttccccaaagctatggacaacgtgacggtccggcagggggagagcgccaccctcaggtgcactattgacaaccgggtcacccgggtggcctggctaaaccgcagcaccatcctctatgctgggaatgacaagtggtgcctggatcctcgcgtggtccttctgagcaacacccaaacgcagtacagcatcgagatccagaacgtggatgtgtatgacgagggcccttacacctgctcggtgcagacagacaaccacccaaagacctctagggtccacctcattgtgcaagtatctcccaaaattgtagagatttcttcagatatctccattaatgaagggaacaatattagcctcacctgcatagcaactggtagaccagagcctacggttacttggagacacatctctcccaaagcggttggctttgtgagtgaagacgaatacttggaaattcagggcatcaccagggagcagtcaggggactacgagtgcagtgcctccaatgacgtggccgcgcccgtggtacggagagtaaaggtcaccgtgaactatccaccatacatttcagaagccaagggtacaggtgtccccgtgggacaaaaggggacactgcagtgtgaagcctcagcagtcccctcagcagaattccagtggtacaaggatgacaaaagactgattgaaggaaagaaaggggtgaaagtggaaaacagacctttcctctcaaaactcatcttcttcaatgtctctgaacatgactatgggaactacacttgcgtggcctccaacaagctgggccacaccaatgccagcatcatgctatttggtgagactgtgctctgagctgggcaagaagaggggagagggtgcagaacgggagagctgggtgggagggcccctcaaggccagggtcagaggttagcagggtatcagtggacatggagagggaggaaaaaaaagagagagacacagaaagaaatggagagagagggacagagagacagggaggaggcagacagaaagagaaagaacaagagatacagtttacatgtatacaaagtagtatatgtatagtacatgtataaaagtagatctcagaagtgggaaaaggaaaatgaaaaagaatgttcatgtttcattctataatggaaaagatcccgagataggagaaaaatactttggaatgccaaaaa

SEQ ID NO: 14318 - DNA, 827 bp, Homo sapiens
  source 1..827: mol_type = unassigned DNA
gaaggaacggttggaccgcacactgtctgcatccattattgccctcagatcttcaggcaggtgcactattgacaaccgggtcacccgggtggcctggctaaaccgcagcaccatcctctatgctgggaatgacaagtggtgcctggatcctcgcgtggtccttctgagcaacacccaaacgcagtacagcatcgagatccagaacgtggatgtgtatgacgagggcccttacacctgctcggtgcagacagacaaccacccaaagacctctagggtccacctcattgtgcaagtatctcccaaaattgtagagatttcttcagatatctccattaatgaagggaacaatattagcctcacctgcatagcaactggtagaccagagcctacggttacttggagacacatctctcccaaagcggttggctttgtgagtgaagacgaatacttggaaattcagggcatcaccagggagcagtcaggggactacgagtgcagtgcctccaatgacgtggccgcgcccgtggtacggagagtaaaggtcaccgtgaactatccaccatacatttcagaagccaagggtacaggtgtccccgtgggacaaaaggggacactgcagtgtgaagcctcagcagtcccctcagcagaattccagtggtacaaggatgacaaaagactgattgaaggaaagaaaggggtgaaagtggaaaacagacctttcctctcaaaactcatcttcttcaatgtctctgaacatgactatgggaactacacttgcgtggcctccaacaagctgggccacaccaatgccagcatcatgctatttg

SEQ ID NO: 14319 - DNA, 660 bp, Homo sapiens
  source 1..660: mol_type = unassigned DNA
ggatacaggaagagggtggaggctaggagaacagctattccagtgttgcagtagaatttattcccattcggactccctgactttgtgtttaaataggaggaaatcaaagctaaattaaagtatctcccaaaattgtagagatttcttcagatatctccattaatgaagggaacaatattagcctcacctgcatagcaactggtagaccagagcctacggttacttggagacacatctctcccaaagcggttggctttgtgagtgaagacgaatacttggaaattcagggcatcaccagggagcagtcaggggactacgagtgcagtgcctccaatgacgtggccgcgcccgtggtacggagagtaaaggtcaccgtgaactatccaccatacatttcagaagccaagggtacaggtgtccccgtgggacaaaaggggacactgcagtgtgaagcctcagcagtcccctcagcagaattccagtggtacaaggatgacaaaagactgattgaaggaaagaaaggggtgaaagtggaaaacagacctttcctctcaaaactcatcttcttcaatgtctctgaacatgactatgggaactacacttgcgtggcctccaacaagctgggccacaccaatgccagcatcatgctatttggtccag

SEQ ID NO: 14320 - DNA, 2512 bp, Homo sapiens
  source 1..2512: mol_type = unassigned DNA
ggaggctaggagaacagctattccagtgttgcagtagaatttattcccattcggactccctgactttgtgtttaaataggaggaaatcaaagctaaattaaagtatctcccaaaattgtagagatttcttcagatatctccattaatgaagggaacaatattagcctcacctgcatagcaactggtagaccagagcctacggttacttggagacacatctctcccaaagcggttggctttgtgagtgaagacgaatacttggaaattcagggcatcaccagggagcagtcaggggactacgagtgcagtgcctccaatgacgtggccgcgcccgtggtacggagagtaaaggtcaccgtgaactatccaccatacatttcagaagccaagggtacaggtgtccccgtgggacaaaaggggacactgcagtgtgaagcctcagcagtcccctcagcagaattccagtggtacaaggatgacaaaagagctgaaatctcattcacagtttggttatgatgggaaagcttcctccccatggtggacgaatggtgtcaaaacggccagtgggatcaatcagcctgacttgctcgcagaatcctcccgactgattgaaggaaagaaaggggtgaaagtggaaaacagacctttcctctcaaaactcatcttcttcaatgtctctgaacatgactatgggaactacacttgcgtggcctccaacaagctgggccacaccaatgccagcatcatgctatttggtccaggcgccgtcagcgaggtgagcaacggcacgtcgaggagggcaggctgcgtctggctgctgcctcttctggtcttgcacctgcttctcaaattttgatgtgagtgccacttccccacccgggaaaggctgccgccaccaccaccaccaacacaacagcaatggcaacaccgacagcaaccaatcagatatatacaaatgaaattagaagaaacacagcctcatgggacagaaatttgagggaggggaacaaagaatactttggggggaaaaaagttttaaaaaagaaattgaaaattgccttgcagatatttaggtacaatggagttttcttttcccaaacgggaagaacacagcacacccggcttggacccactgcaagctgcatcgtgcaacctctttggtgccagtgtgggcaagggctcagcctctctgcccacagagtgcccccacgtggaacattctggagctggccatcccaaattcaatcagtccatagagacgaacagaatgagaccttccggcccaagcgtggcgctgcgggcactttggtagactgtgccaccacggcgtgtgttgtgaaacgtgaaataaaaagagcaagaaagaaaaaggaaacaaaataagaccgtctgacagcaacaacggtcccacaaacaagtcacaaaagataccgttaaacttttttttttttttatcattttactacatgaacatcatggataacaagggattctgattcattattaatttcattaattatattttctgatatgagtctagaacttactgcaaaaacaagacaaaactaaaaaaatacaactgagaagggtgaagagaagtatgtttgttaaacagtaaaaatgaatagtatacttcttaactaggtttacaactggtggaccacacaccaggcactaatcacctggtgaggatttggcatatccaccaaaaaatgcatccgatttaaccaacatctccaccagcgctacggactcctcccaattctgacatctcttgcagacaatactatgctctctacacactgtttagaaatggaaaggtgatctgcactgtatcttgggtttgttggctatgcttcctttgatgacatatattatacagtatatatatacatatattttttttgttagagttctagccattttatttctccgcagggtcctttctcagacattactgcatgctgtatatggcgttagctgtgtgttgatcttctaaaagatgatagagtttactggtaattgtgtaatcagctcctgcctttttattttcttgggttatttacatgtcagagacatttataaaaagtgaaaggataaaaaaaaaaaaaaacaactaataccgggcgcagcatctttccaggtgtggctctgcgctaggccaccccaggtggccccgctttctccattctgccctgtggcgttaacagacagcaagcagctgaacaagcagtaccgtcagtacccacttgctttagcccattatgggaatctctgatgcctttgtgaccactggagagtttaatcctcttggtttattttatttcccacctttgtgtgagtgtgtatgaaagagaagaaaatgcaatttttaggtaatcttttttttttttcccctcccctgaaagtctgggaacctgagagtcctcggggaggggtcctggatgtgatgagggaaagggggattgggggatccgggagggtggggttgtctctgacttgacattaaaaa

SEQ ID NO: 14321 - DNA, 435 bp, Homo sapiens
  source 1..435: mol_type = unassigned DNA
attcccattcggactccctgactttgtgtttaaataggaggaaatcaaagctaaattaaagtatctcccaaaattgtagagatttcttcagatatctccattaatgaagggaacaatattagcctcacctgcatagcaactggtagaccagagcctacggttacttggagacacatctctcccaaagctactgttttcgtgctctgggccagcagaaacacgtggcattatggaagggttttctcacctggagagaaatgtccctttgttccctttcttgggccactcatgttaatacagtgctgcaccccctgaagctgtgcctccaaccagattataggagtaataactaaatcaacagcggttggctttgtgagtgaagacgaatacttggaaattcagggcatcaccagggagcagtcaggggactacgag

SEQ ID NO: 14322 - DNA, 564 bp, Homo sapiens
  source 1..564: mol_type = unassigned DNA
attcccattcggactccctgactttgtgtttaaataggaggaaatcaaagctaaattaaagtatctcccaaaattgtagagatttcttcagatatctccattaatgaagggaacaatattagcctcacctgcatagcaactggtagaccagagcctacggttacttggagacacatctctcccaaagcggttggctttgtgagtgaagacgaatacttggaaattcagggcatcaccagggagcagtcaggggactacgagtgcagtgcctccaatgacgtggccgcgcccgtggtacggagagtaaaggtcaccgtgaactatccaccatacatttcagaagccaagggtacaggtgtccccgtgggacaaaaggggacactgcagtgtgaagcctcagcagtcccctcagcagaattccagtggtacaaggatgacaaaaggaagaggaatggaatgctatacctacggaaggccacccatccaacaggggcattgaccaatgaaaagtccacagctttggtaagaaactgaggcctggaagcagtgcgggatggaggggat

SEQ ID NO: 14323 - DNA, 664 bp, Homo sapiens
  source 1..664: mol_type = unassigned DNA
cctcagcagaattccagtggtacaaggatgacaaaagactgattgaaggaaagaaaggggtgaaagtggaaaacagacctttcctctcaaaactcatcttcttcaatgtctctgaacatgactatgggaactacacttgcgtggcctccaacaagctgggccacaccaatgccagcatcatgctatttgaactaaatgagcctacgagctcaactttgttgcaagaagtgaaaactacagccctgaccccttggaaaggtccaggcgccgtcagcgaggtgagcaacggcacgtcgaggagggcaggctgcgtctggctgctgcctcttctggtcttgcacctgcttctcaaattttgatgtgagtgccacttccccacccgggaaaggctgccgccaccaccaccaccaacacaacagcaatggcaacaccgacagcaaccaatcagatatatacaaatgaaattagaagaaacacagcctcatgggacagaaatttgagggaggggaacaaagaatactttggggggaaaaaagttttaaaaaagaaattgaaaattgccttgcagatatttaggtacaatggagttttcttttcccaaacgggaagaacacagcacacccggcttggacccactgcaagctgcatcgtgcaacctctttgg

SEQ ID NO: 14324 - DNA, 684 bp, Homo sapiens
  source 1..684: mol_type = unassigned DNA
ccttctgtccaacttggtccaggtctggtgtcctggatgtgctgctgaagagacaggttccgggggtggtgagcgcatgtacctgtggggtgggctgcgcagactggatatggtcacatagtgccagccactcaccagcctgagatggagatgatgatgatggagagcttcagaggggctgctcaggcttttcccagatatactacaagcaagagaatggctggcaggcacttggtggcctttttctgtcttccataggaagaattttctaacacaacaaacaggtccaggcgccgtcagcgaggtgagcaacggcacgtcgaggagggcaggctgcgtctggctgctgcctcttctggtcttgcacctgcttctcaaattttgatatatttaggtacaatggagttttcttttcccaaacgggaagaacacagcacacccggcttggacccactgcaagctgcatcgtgcaacctctttggtgccagtgtgggcaagggctcagcctctctgcccacagagtgcccccacgtggaacattctggagctggccatcccaaattcaatcagtccatagagacgaacagaatgagaccttccggcccaagcgtggcgctgcgggcactttggtagactgtgccaccacggcgtgtgttgtgaaacgtgaaataaaaagagcaagaa

SEQ ID NO: 14325 - DNA, 515 bp, Homo sapiens
  source 1..515: mol_type = unassigned DNA
tgtcttccataggaagaattttctaacacaacaaacaggtgaggacacgactcgtctttacaagctctctgtggtgcttcccagcatggagcagatccacaaaagaactctgaggggcgtagcaaggagaccaaacacaggcacccagggagagcgcctggcatagccacagggccattgagatctgccacagggggtgtttgcccgctctcagtcgtctcccgagctgcagagtccccagcctggaaacaaggtttcagcattcccttacatggtccaggcgccgtcagcgaggtgagcaacggcacgtcgaggagggcaggctgcgtctggctgctgcctcttctggtcttgcacctgcttctcaaattttgatgtgagtgccacttccccacccgggaaaggctgccgccaccaccaccaccaacacaacagcaatggcaacaccgacagcaaccaatcagatatatacaaatgaaattagaagaaacacagcctcatgggacagaaatttg

SEQ ID NO: 14326 - DNA, 2550 bp, Homo sapiens
  source 1..2550: mol_type = unassigned DNA
ccttcaggtgcactattgacaaccgggtcacccgggtggcctggctaaaccgcagcaccatcctctatgctgggaatgacaagtggtgcctggatcctcgcgtggtccttctgagcaacacccaaacgcagtacagcatcgagatccagaacgtggatgtgtatgacgagggcccttacacctgctcggtgcagacagacaaccacccaaagacctctagggtccacctcattgtgcaagtatctcccaaaattgtagagatttcttcagatatctccattaatgaagggaacaatattagcctcacctgcatagcaactggtagaccagagcctacggttacttggagacacatctctcccaaagcggttggctttgtgagtgaagacgaatacttggaaattcagggcatcaccagggagcagtcaggggactacgagtgcagtgcctccaatgacgtggccgcgcccgtggtacggagagtaaaggtcaccgtgaactatccaccatacatttcagaagccaagggtacaggtgtccccgtgggacaaaaggggacactgcagtgtgaagcctcagcagtcccctcagcagaattccagtggtacaaggatgacaaaagactgattgaaggaaagaaaggggtgaaagtggaaaacagacctttcctctcaaaactcatcttcttcaatgtctctgaacatgactatgggaactacacttgcgtggcctccaacaagctgggccacaccaatgccagcatcatgctatttggtccaggcgccgtcagcgaggtgagcaacggcacgtcgaggagggcaggctgcgtctggctgctgcctcttctggtcttgcacctgcttctcaaattttgatgtgagtgccacttccccacccgggaaaggctgccgccaccaccaccaccaacacaacagcaatggcaacaccgacagcaaccaatcagatatatacaaatgaaattagaagaaacacagcctcatgggacagaaatttgagggaggggaacaaagaatactttggggggaaaaaagttttaaaaaagaaattgaaaattgccttgcagatatttaggtacaatggagttttcttttcccaaacgggaagaacacagcacacccggcttggacccactgcaagctgcatcgtgcaacctctttggtgccagtgtgggcaagggctcagcctctctgcccacagagtgcccccacgtggaacattctggagctggccatcccaaattcaatcagtccatagagacgaacagaatgagaccttccggcccaagcgtggcgctgcgggcactttggtagactgtgccaccacggcgtgtgttgtgaaacgtgaaataaaaagagcaagaaagaaaaaggaaacaaaataagaccgtctgacagcaacaacggtcccacaaacaagtcacaaaagataccgttaaacttttttttttttttatcattttactacatgaacatcatggataacaagggattctgattcattattaatttcattaattatattttctgatatgagtctagaacttactgcaaaaacaagacaaaactaaaaaaatacaactgagaagggtgaagagaagtatgtttgttaaacagtaaaaatgaatagtatacttcttaactaggtttacaactggtggaccacacaccaggcactaatcacctggtgaggatttggcatatccaccaaaaaatgcatccgatttaaccaacatctccaccagcgctacggactcctcccaattctgacatctcttgcagacaatactatgctctctacacactgtttagaaatggaaaggtgatctgcactgtatcttgggtttgttggctatgcttcctttgatgacatatattatacagtatatatatacatatattttttttgttagagttctagccattttatttctccgcagggtcctttctcagacattactgcatgctgtatatggcgttagctgtgtgttgatcttctaaaagatgatagagtttactggtaattgtgtaatcagctcctgcctttttattttcttgggttatttacatgtcagagacatttataaaaagtgaaaggataaaaaaaaaaaaaaacaactaataccgggcgcagcatctttccaggtgtggctctgcgctaggccaccccaggtggccccgctttctccattctgccctgtggcgttaacagacagcaagcagctgaacaagcagtaccgtcagtacccacttgctttagcccattatgggaatctctgatgcctttgtgaccactggagagtttaatcctcttggtttattttatttcccacctttgtgtgagtgtgtatgaaagagaagaaaatgcaatttttaggtaatcttttttttttttcccctcccctgaaagtctgggaacctgagagtcctcggggaggggtcctggatgtgatgagggaaagggggattgggggatccgggagggtggggttgtctctgacttgacattaaaaagtgttccatgtccctcttc

SEQ ID NO: 14327 - DNA, 2583 bp, Homo sapiens
  source 1..2583: mol_type = unassigned DNA
ccttcaggtgcactattgacaaccgggtcacccgggtggcctggctaaaccgcagcaccatcctctatgctgggaatgacaagtggtgcctggatcctcgcgtggtccttctgagcaacacccaaacgcagtacagcatcgagatccagaacgtggatgtgtatgacgagggcccttacacctgctcggtgcagacagacaaccacccaaagacctctagggtccacctcattgtgcaagtatctcccaaaattgtagagatttcttcagatatctccattaatgaagggaacaatattagcctcacctgcatagcaactggtagaccagagcctacggttacttggagacacatctctcccaaagcggttggctttgtgagtgaagacgaatacttggaaattcagggcatcaccagggagcagtcaggggactacgagtgcagtgcctccaatgacgtggccgcgcccgtggtacggagagtaaaggtcaccgtgaactatccaccatacatttcagaagccaagggtacaggtgtccccgtgggacaaaaggggacactgcagtgtgaagcctcagcagtcccctcagcagaattccagtggtacaaggatgacaaaagactgattgaaggaaagaaaggggtgaaagtggaaaacagacctttcctctcaaaactcatcttcttcaatgtctctgaacatgactatgggaactacacttgcgtggcctccaacaagctgggccacaccaatgccagcatcatgctatttgaagtgaaaactacagccctgaccccttggaaaggtccaggcgccgtcagcgaggtgagcaacggcacgtcgaggagggcaggctgcgtctggctgctgcctcttctggtcttgcacctgcttctcaaattttgatgtgagtgccacttccccacccgggaaaggctgccgccaccaccaccaccaacacaacagcaatggcaacaccgacagcaaccaatcagatatatacaaatgaaattagaagaaacacagcctcatgggacagaaatttgagggaggggaacaaagaatactttggggggaaaaaagttttaaaaaagaaattgaaaattgccttgcagatatttaggtacaatggagttttcttttcccaaacgggaagaacacagcacacccggcttggacccactgcaagctgcatcgtgcaacctctttggtgccagtgtgggcaagggctcagcctctctgcccacagagtgcccccacgtggaacattctggagctggccatcccaaattcaatcagtccatagagacgaacagaatgagaccttccggcccaagcgtggcgctgcgggcactttggtagactgtgccaccacggcgtgtgttgtgaaacgtgaaataaaaagagcaagaaagaaaaaggaaacaaaataagaccgtctgacagcaacaacggtcccacaaacaagtcacaaaagataccgttaaacttttttttttttttatcattttactacatgaacatcatggataacaagggattctgattcattattaatttcattaattatattttctgatatgagtctagaacttactgcaaaaacaagacaaaactaaaaaaatacaactgagaagggtgaagagaagtatgtttgttaaacagtaaaaatgaatagtatacttcttaactaggtttacaactggtggaccacacaccaggcactaatcacctggtgaggatttggcatatccaccaaaaaatgcatccgatttaaccaacatctccaccagcgctacggactcctcccaattctgacatctcttgcagacaatactatgctctctacacactgtttagaaatggaaaggtgatctgcactgtatcttgggtttgttggctatgcttcctttgatgacatatattatacagtatatatatacatatattttttttgttagagttctagccattttatttctccgcagggtcctttctcagacattactgcatgctgtatatggcgttagctgtgtgttgatcttctaaaagatgatagagtttactggtaattgtgtaatcagctcctgcctttttattttcttgggttatttacatgtcagagacatttataaaaagtgaaaggataaaaaaaaaaaaaaacaactaataccgggcgcagcatctttccaggtgtggctctgcgctaggccaccccaggtggccccgctttctccattctgccctgtggcgttaacagacagcaagcagctgaacaagcagtaccgtcagtacccacttgctttagcccattatgggaatctctgatgcctttgtgaccactggagagtttaatcctcttggtttattttatttcccacctttgtgtgagtgtgtatgaaagagaagaaaatgcaatttttaggtaatcttttttttttttcccctcccctgaaagtctgggaacctgagagtcctcggggaggggtcctggatgtgatgagggaaagggggattgggggatccgggagggtggggttgtctctgacttgacattaaaaagtgttccatgtccctcttc

SEQ ID NO: 14328 - DNA, 3040 bp, Homo sapiens
  source 1..3040: mol_type = unassigned DNA
agagtgtgtgtgcgtgtgtgtgtgtgtgtgtgcccgcgcgcgtgtgttgtagctctgtcaatccttggattagaaccaatgattgcagcttgtaggagggctgtccagggccagattgtacaatgtgtctcagtgccagagtatgagtggagataattacggagaagtcatactctctcacaccctcggctttcttgttgtgtccttcagcaaaacagtggatttaaatctccttgcacaagcttgagagcaacacaatctatcaggaaagaaagaaagaaaaaaaccgaacctgacaaaaaagaagaaaaagaagaagaaaaaaaatcatgaaaaccatccagccaaaaatgcacaattctatctcttgggcaatcttcacggggctggctgctctgtgtctcttccaaggagtgcccgtgcgcagcggagatgccaccttccccaaagctatggacaacgtgacggtccggcagggggagagcgccaccctcaggtgcactattgacaaccgggtcacccgggtggcctggctaaaccgcagcaccatcctctatgctgggaatgacaagtggtgcctggatcctcgcgtggtccttctgagcaacacccaaacgcagtacagcatcgagatccagaacgtggatgtgtatgacgagggcccttacacctgctcggtgcagacagacaaccacccaaagacctctagggtccacctcattgtgcaagtatctcccaaaattgtagagatttcttcagatatctccattaatgaagggaacaatattagcctcacctgcatagcaactggtagaccagagcctacggttacttggagacacatctctcccaaagcggttggctttgtgagtgaagacgaatacttggaaattcagggcatcaccagggagcagtcaggggactacgagtgcagtgcctccaatgacgtggccgcgcccgtggtacggagagtaaaggtcaccgtgaactatccaccatacatttcagaagccaagggtacaggtgtccccgtgggacaaaaggggacactgcagtgtgaagcctcagcagtcccctcagcagaattccagtggtacaaggatgacaaaagactgattgaaggaaagaaaggggtgaaagtggaaaacagacctttcctctcaaaactcatcttcttcaatgtctctgaacatgactatgggaactacacttgcgtggcctccaacaagctgggccacaccaatgccagcatcatgctatttggtccaggcgccgtcagcgaggtgagcaacggcacgtcgaggagggcaggctgcgtctggctgctgcctcttctggtcttgcacctgcttctcaaattttgatgtgagtgccacttccccacccgggaaaggctgccgccaccaccaccaccaacacaacagcaatggcaacaccgacagcaaccaatcagatatatacaaatgaaattagaagaaacacagcctcatgggacagaaatttgagggaggggaacaaagaatactttggggggaaaaaagttttaaaaaagaaattgaaaattgccttgcagatatttaggtacaatggagttttcttttcccaaacgggaagaacacagcacacccggcttggacccactgcaagctgcatcgtgcaacctctttggtgccagtgtgggcaagggctcagcctctctgcccacagagtgcccccacgtggaacattctggagctggccatcccaaattcaatcagtccatagagacgaacagaatgagaccttccggcccaagcgtggcgctgcgggcactttggtagactgtgccaccacggcgtgtgttgtgaaacgtgaaataaaaagagcaagaaagaaaaaggaaacaaaataagaccgtctgacagcaacaacggtcccacaaacaagtcacaaaagataccgttaaacttttttttttttttatcattttactacatgaacatcatggataacaagggattctgattcattattaatttcattaattatattttctgatatgagtctagaacttactgcaaaaacaagacaaaactaaaaaaatacaactgagaagggtgaagagaagtatgtttgttaaacagtaaaaatgaatagtatacttcttaactaggtttacaactggtggaccacacaccaggcactaatcacctggtgaggatttggcatatccaccaaaaaatgcatccgatttaaccaacatctccaccagcgctacggactcctcccaattctgacatctcttgcagacaatactatgctctctacacactgtttagaaatggaaaggtgatctgcactgtatcttgggtttgttggctatgcttcctttgatgacatatattatacagtatatatatacatatattttttttgttagagttctagccattttatttctccgcagggtcctttctcagacattactgcatgctgtatatggcgttagctgtgtgttgatcttctaaaagatgatagagtttactggtaattgtgtaatcagctcctgcctttttattttcttgggttatttacatgtcagagacatttataaaaagtgaaaggataaaaaaaaaaaaaaacaactaataccgggcgcagcatctttccaggtgtggctctgcgctaggccaccccaggtggccccgctttctccattctgccctgtggcgttaacagacagcaagcagctgaacaagcagtaccgtcagtacccacttgctttagcccattatgggaatctctgatgcctttgtgaccactggagagtttaatcctcttggtttattttatttcccacctttgtgtgagtgtgtatgaaagagaagaaaatgcaatttttaggtaatcttttttttttttcccctcccctgaaagtctgggaacctgagagtcctcggggaggggtcctggatgtgatgagggaaagggggattgggggatccgggagggtggggttgtctctgacttgacattaaaaagtgttccatgtccctcttca

SEQ ID NO: 14329 - DNA, 5954 bp, Homo sapiens
  source 1..5954: mol_type = unassigned DNA
cttcgggggcgagcgcgcgtgtgtgtgagtgcgcgccggccagcgcgccttctgcggcaggcggacagatcctcggcgcggcagggccggggcaagctggacgcagcatgatgcgcgcagtgtgggaggcgctggcggcgctggcggcggtggcgtgcctggtgggcgcggtgcgcggcgggcccgggctcagcatgttcgcgggccaggcggcgcagcccgatccctgctcggacgagaacggccacccgcgccgctgcatcccggactttgtcaatgcggccttcggcaaggacgtgcgcgtgtccagcacctgcggccggcccccggcgcgctactgcgtggtgagcgagcgcggcgaggagcggctgcgctcgtgccacctctgcaacgcgtccgaccccaagaaggcgcacccgcccgccttcctcaccgacctcaacaacccgcacaacctgacgtgctggcagtccgagaactacctgcagttcccgcacaacgtcacgctcacactgtccctcggcaagaagttcgaagtgacctacgtgagcctgcagttctgctcgccgcggcccgagtccatggccatctacaagtccatggactacgggcgcacgtgggtgcccttccagttctactccacgcagtgccgcaagatgtacaaccggccgcaccgcgcgcccatcaccaagcagaacgagcaggaggccgtgtgcaccgactcgcacaccgacatgcgcccgctctcgggcggcctcatcgccttcagcacgctggacgggcggccctcggcgcacgacttcgacaactcgcccgtgctgcaggactgggtcacggccacagacatccgcgtggccttcagccgcctgcacacgttcggcgacgagaacgaggacgactcggagctggcgcgcgactcgtacttctacgcggtgtccgacctgcaggtgggcggccggtgcaagtgcaacggccacgcggcccgctgcgtgcgcgaccgcgacgacagcctggtgtgcgactgcaggcacaacacggccggcccggagtgcgaccgctgcaagcccttccactacgaccggccctggcagcgcgccacagcccgcgaagccaacgagtgcgtggcctgtaactgcaacctgcatgcccggcgctgccgcttcaacatggagctctacaagctttcggggcgcaagagcggaggtgtctgcctcaactgtcgccacaacaccgccggccgccactgccattactgcaaggagggctactaccgcgacatgggcaagcccatcacccaccggaaggcctgcaaagcctgtgattgccaccctgtgggtgctgctggcaaaacctgcaaccaaaccaccggccagtgtccctgcaaggacggcgtgacgggtatcacctgcaaccgctgcgccaaaggctaccagcagagccgctctcccatcgccccctgcataaagatccctgtagcgccgccgacgactgcagccagcagcgtggaggagcctgaagactgcgattcctactgcaaggcctccaaggggaagctgaagattaacatgaaaaagtactgcaagaaggactatgccgtccagatccacatcctgaaggcggacaaggcgggggactggtggaagttcacggtgaacatcatctccgtgtataagcagggcacgagccgcatccgccgcggtgaccagagcctgtggatccgctcgcgggacatcgcctgcaagtgtcccaaaatcaagcccctcaagaagtacctgctgctgggcaacgcggaggactctccggaccagagcggcatcgtggccgataaaagcagcctggtgatccagtggcgggacacgtgggcgcggcggctgcgcaagttccagcagcgtgagaagaagggcaagtgcaagaaggcctagcgccgaggcagcgggcgggcgggcgggcgggcgccagggcggggccgagcgagagcgggcgccttggcccggccgccgcggacttggcccgcgagggctttcccaggtggggggagggagggggcggggccgcacggcgcggggggcgggaccctcggcggcccctccccctacccccaccctgcgcgctctgggcgggagccgcgtgcacgcggggcggggtgcgccgccggccgggccctggagaaatgacgagacgtagctacctcacggggctccttccagagcagagacgcgcttccctgggcctgggcgcggccgccgtggaggggctgggggcagcctgccctggggcccgggggcgggcgcagaatcgcacaactggggccccaggcgcggggcgtggatggcgcggagacgtggacgggaggagaactgtgaattctcaagcccgtagtgtgggcggggcgcggagcacccaccaaaccaccacccgacacgcagccgacgggatccccccctttctccccggccccttctagcagttccccgcgggccacctggctgtcacagcctggactcctccatctgaaggggcctggcagcatttggggagtggacagctcctgtccagccagcatgccccaggcggcctctgtctccactgctacctgctgagtgggtcctactgggtgggggcttggggtcggtgagtggttcacctgtggagagaggagaggaagcccctgctgctgcctgtctctgcccctgcccctgcccctgcccagcgtggggctggcccatccggaaggcagtgggcccagggacacccctgagaagcccaagccgggtggtcaccgcctcatgctggagctgcctgttggaggaggcatcgcaaacgcaaaacctcccagagagtttccttttggaaacttggaaccagccctttttatgacgttttccagggggagggggaggggcactggctgggtttacggcagtgacactatttatgtaaatgacatcagctcccgcaaggcccctcagcaatgtcaacagctggaaagggcctgaacgggcttggagtctgcaggctgcgaaggcacttgggcctggcttggggccgggggcttgtttgagctgggatggggtttgctggctcagtgaagtaccagagtgcctgagccatgggtgggcaggggcacaggaatgaccaggttcctgggggccaaggaggccatgctggcttctccaagggaaggcacagaggctgccggcctgccccctacagctgtcttgggtctggcctgggccacaccttgaccgtgcctttccagacggtctttgtggagtctgcccgtgccctccactgtgccccagccctccttccaaaatctcctagagacacggtcctcaagcaggcagccccttttgttctgacctcctcacacagggtccattcctgtgccctggggcctcctggctccctgccttcctgggctctctgcactgcccgggcctctggcccacatcctcacacccggcgcactgaattaagaggcctggctcccctcacagtcaggaaattggtttcactttcccggccagagtttggctgctcaaaagggtcataccaagtatgaagctcggcccccggtggtctggcttccctccgccttccccacatttacccgcatcacggctgccatttattgagcacctgctgtgtgccaggcactttacccacatgctcccagtgtgtactcatgacaaccctgtgggacagggactcattatcaccagcaaggagactggagtacacgtgcccaaggtcatgctgcaaattggtggcaggactggggctcaaactccagagcccgactttctgaccaggggccacgctggccctcactgcactccagctctgcagcctacccgcccaatccctgtgcaggctgggagggtgctcttgggggagtggccaccgagcccctggccctggttactgcctcttgaggacactggcatctgggctggagaacaggagcccggggtggggtagggcatggggacaatcacatcttcagaggaggcagcaaagtggtgcgggatgcagggacggacttgccagatggcagctccaggttccaggaaggcaggccttggatgctccgaagaggtggtagaaaggtgtttttagaaaggtgttttggctgcctcagggtggttggagagactccaggagagactggcagaggtgcctcaggggcagggagcagacagacctgccctgggaaggggcatttggcttccctgaatccagcccaaggctagaagacagggcccctctccaagctgtcagcgcccctcggatgcccagtgtggtgtgctgggcgccatcagcatcacaaggcactacgctgctggggcggttgtcctatttctgtctatgccagtgtggtttcttcaccctgcccagaagggctgtggcagccccacgatatcccaccctgggtctgggtctcacgggtgtcctgtgaggggcttgcatttgtggtggtctctgaggccacctcagcaacggagctggcgacacgccaagcaacaaggcatcttgcggaaaattcagccagtgtcctgcccctcccttcggctcagcaccccgcagggcacaggctgtccgcccggtggtctggcccttggggaatgcgtcagggtgaccagatccaccatgctagcagccaggtcactgttgggattgcacggtcgtcacgagctgcctttcctatccacacacccagccaggacccagcccaccactcccgactgcagccccggcctctgcggtgagcaccatccttgggaaagcacccctcctccactccggtgccccactccaaggagcagagggaaatgggaattgaggtgtcccggtttgtacagttaggaagggatgtaaaacggaactagattttgattttgaagagtgtattaaccagaattgtgctatgtaggtgtttgtttgaagaaaaacataccagattagtctttgtttttgaaacagcttccccagttgtcctttttcttaccagctgggtggtctggtgcccctgacagctgagtgcctgctttacggacacgcagtaatgccgaagatttgcgggggaggacatagggctgtccccgggattcacctgctggctgtggtctctgcccactgcttctgtccttggaaagcagggcaggaggcagcatccccaggggcctctatgtgggagggagggacacctggggtcacaacccagggagggagggtcacagcccagggaggctgggagctgctccaaggccctggaactctgcctcagtcgcggcatgctggagaggggtacggacttactttcttggagttgtcccaggttggaatgagactgaactcaagaagagaccctaagggactggggaatggttcctgccttcaggaaagtgaaagacgcttaggctgtcaacacttaaaggaagtccccttgaagcccagagtggacagactagacccattgatggggccactggccatggtccgtggacaagacattcctgtgggccatggcacaccgggggggatcaaaatgtgtacttgtggggtctcgccccttgccaaaagccaaaccagtcccactcctgtcattggacgtttcttcccattccctcctcccaaatgcacttcccctcctccctctgccccctcctgtgttttggatttctgttcactcagaattgtaaatgtttagttgtgaccatgacgtattgtttgggtcaatgtccctttccaatgcatactaatatattatggttattatatatgaatatatttaatgacatggaaaaagttgtggattttctttctttccttttttttgggggggggtggggggttggttagagttgtaatggacccagatggaacttgtaatgtgggccccacatgatagaactaaattcagatatcattaaataaactcttgtacacta

SEQ ID NO: 14330 - DNA, 700 bp, Homo sapiens
  source 1..700: mol_type = unassigned DNA
cattactgcaaggagggctactaccgcgacatgggcaagcccatcacccaccggaaggcctgcaaagcctgtgattgccaccctgtgggtgctgctggcaaaacctgcaaccaaaccaccggccagtgtccctgcaaggacggcgtgacgggtatcacctgcaaccgctgcgccaaaggctaccagcagagccgctctcccatcgccccctgcataaagatccctgtagcgccgccgacgactgcagccagcagcgtggaggagcctgaagctgcccgccagcccaacaccttccaggctgaggggttgtcactccttcctggggctgcagagaaggaaggagccagatgctggggatacagaaggaggcttgggcacagggtcgcacaagcagaatgcagggggcccaggagctgggcgtgggggagaatcacatcttcattttcattcgcctctaactaaaaatttagcatttcctccatggcaaagagaggccgcagaccgcagcatgcggccaagcctgcaccgtggtcactggcggaagtcacagcggtttacacatcacattctagctggtgcagatatcataaatatcgttcatgctggttattgcttctcaaaacgacagaagttactagacctgctgctagatcctgatttataatcattaataaagaagcactcgcgtaacgtaaccata

SEQ ID NO: 14331 - DNA, 3615 bp, Homo sapiens
  source 1..3615: mol_type = unassigned DNA
ggacgggacggagccggggcagccagaagaggtgggaaaagcggaggaggacgcccaggaggaggcggcggcggcggccgggaagtgaaaggtctcgcaaagttcagcggcggctgcgggcgccgagccccgggctagcggcagacgagcccgcagggccgctccgcggggcagcgcagccaggccggctatggtcccggggctcccgccgccccccaggtgcccgggacccgccaggccggtgcgcgagggtcaccccacctccccgcgcggtcccggcccctggctcccagctgccggcgaccgctgaccgagcccggcgccccaggaggaggaagaaaccagggccccgttccctcccgaggacggcggcgcttcatcccgcagcccagaggtctcggctccctccggcacccgcccggcccggctgctcccggctcctcccggccatggggagctgcgcgcggctgctgctgctctggggctgcacggtggtggccgcaggactgagtggagtagctggagtgagttcccgctgtgaaaaagcctgcaaccctcggatgggaaatttggctttggggcgaaaactctgggcagacaccacctgcggtcagaatgctaccgaactgtactgcttctacagtgagaacacggatctgacttgtcggcagcccaaatgtgacaagtgcaatgctgcctatcctcacctggctcacctgccatctgccatggcagactcatccttccggtttcctcgcacatggtggcagtctgcggaggatgtgcacagagaaaagatccagttagacctggaagctgaattctacttcactcacctaattgtgatgttcaagtcccccaggccggctgccatggtgctggaccgctcccaggactttgggaaaacatggaagccttataagtactttgcgactaactgctccgctacatttggcctggaagatgatgttgtcaagaagggcgctatttgtacttctaaatactccagtccttttccatgcactggaggagaggttattttcaaagctttgtcaccaccatacgatacagagaacccttacagtgccaaagttcaggagcagctgaagatcaccaaccttcgcgtgcagctgctgaaacgacagtcttgtccctgtcagagaaatgacctgaacgaagagcctcaacattttacacactatgcaatctatgatttcattgtcaagggcagctgcttctgcaatggccacgctgatcaatgcatacctgttcatggcttcagacctgtcaaggccccaggaacattccacatggtccatgggaagtgtatgtgtaagcacaacacagcaggcagccactgccagcactgtgccccgttatacaatgaccggccatgggaggcagctgatggcaaaacgggggctcccaacgagtgcagaacctgcaagtgtaatgggcatgctgatacctgtcacttcgacgttaatgtgtgggaggcatcagggaatcgtagtggtggtgtctgtgatgactgtcagcacaacacagaaggacagtattgccagaggtgcaagccaggcttctatcgtgacctgcggagacccttctcagctccagatgcttgcaaaccgtgttcctgccatccagtaggatcagctgtccttcctgccaactcagtgaccttctgcgaccccagcaatggtgactgcccttgcaagcctggggtggcagggcgacgttgtgacaggtgcatggtgggatactggggcttcggagactatggctgtcgaccatgtgactgtgcggggagctgtgaccctatcaccggagactgcatcagcagccacacagacatagactggtatcatgaagttcctgacttccgtcccgtgcacaataagagcgaaccagcctgggagtgggaggatgcgcaggggttttctgcacttctacactcaggtaaatgcgaatgtaaggaacagacattaggaaatgccaaggcattctgtggaatgaaatattcatatgtgctaaaaataaagattttatcagctcatgataaaggtactcatgttgaggtcaatgtgaagattaaaaaggtcttaaaatctaccaaactgaagattttccgaggaaagcgaacattatatccagaatcatggacggacagaggatgcacttgtccaatcctcaatcctggtttggaataccttgtagcaggacatgaggatataagaacaggcaaactaattgtgaatatgaaaagctttgtccagcactggaaaccttctcttggaagaaaagtcatggatattttaaaaagagagtgcaagtagcattaagatggatagcacataatggcacttgtctatgtacaaaacacaaactttagagcaagaagacctcagacaggaaactggaattttttaaagtgccaaaacatatagaaatgtttgaatgcatgggtcttatctaacttatctcttctggacccatgtttaaatacagttttatttcatgaagagaaatgaaaacccctacactgatatctgttttctatgggactgattctgaaattcttaactattaagaatattttaatagcagcatgacatttagcagtaatccattaagggcagtacctctaacaaggacgccttccagcttcagcgatgttacttacgtttgatgctacttaaagtaatgaatgacgttttaaggaatccctaaccctactatcagaaaaggtgtttgttaaagagccttctcttgtgtgttacgcatgaactttggtctgtaggtgttaaatggaacctctccatgtgtatatagtatttccttgtataaagcactttactacctaccacttgtgttgtgaacgtttggtgactgctgttgaaagaaggaaaagggtgtgtgagaaagcctactgaagcagcagcactgccactacatgtggacaaaagtgaccatataaaagaagttgtgctatttaactctgaatacttggagaaactaggtgaagatgcaaccagaaaggagaatatgtatgcgtgaagtctcagctttgagctggaggctagattccaagatgacagccatgatgaaactttttaaaaaactaaaccagaagagactttaaaataagagaaagaaatcataaatgtagacatatgcttggctaaaggggaaatggactttaaattttaaagagctcatttgcaatgcacttgtatacacttcaaaaattattgtagacacagaatttgttatatttttgtgcttagtatttaaacctgaacattgaaacagttttcctccttgtctttcttaacagtaatagtcattatatttacctgttttttaacacaatgtatgtgatagtcaaaaaatcacagtttttcattattattcatcttctgtacccacgcataaccactatacatagtttcttttgtacttgaatatacaaaacatgaacacagtgccatatgaataatttcacatacagaacctttttttctctgaagtcctgtggacttgcaaatatatatatatattgctttgttaatttgtttttatatttcatatatgtaataaaggaatatgatctga

SEQ ID NO: 14332 - DNA, 3152 bp, Homo sapiens
  source 1..3152: mol_type = unassigned DNA
ggagaaggacgggacggagccggggcagccagaagaggtgggactgagtggagtagctggagtgagttcccgctgtgaaaaagcctgcaaccctcggatgggaaatttggctttggggcgaaaactctgggcagacaccacctgcggtcagaatgctaccgaactgtactgcttctacagtgagaacacggatctgacttgtcggcagcccaaatgtgacaagtgcaatgctgcctatcctcacctggctcacctgccatctgccatggcagactcatccttccggtttcctcgcacatggtggcagtctgcggaggatgtgcacagagaaaagatccagttagacctggaagctgaattctacttcactcacctaattgtgatgttcaagtcccccaggccggctgccatggtgctggaccgctcccaggactttgggaaaacatggaagccttataagtactttgcgactaactgctccgctacatttggcctggaagatgatgttgtcaagaagggcgctatttgtacttctaaatactccagtccttttccatgcactggaggagaggttattttcaaagctttgtcaccaccatacgatacagagaacccttacagtgccaaagttcaggagcagctgaagatcaccaaccttcgcgtgcagctgctgaaacgacagtcttgtccctgtcagagaaatgacctgaacgaagagcctcaacattttacacactatgcaatctatgatttcattgtcaagggcagctgcttctgcaatggccacgctgatcaatgcatacctgttcatggcttcagacctgtcaaggccccaggaacattccacatggtccatgggaagtgtatgtgtaagcacaacacagcaggcagccactgccagcactgtgccccgttatacaatgaccggccatgggaggcagctgatggcaaaacgggggctcccaacgagtgcagaacctgcaagtgtaatgggcatgctgatacctgtcacttcgacgttaatgtgtgggaggcatcagggaatcgtagtggtggtgtctgtgatgactgtcagcacaacacagaaggacagtattgccagaggtgcaagccaggcttctatcgtgacctgcggagacccttctcagctccagatgcttgcaaaccgtgttcctgccatccagtaggatcagctgtccttcctgccaactcagtgaccttctgcgaccccagcaatggtgactgcccttgcaagcctggggtggcagggcgacgttgtgacaggtgcatggtgggatactggggcttcggagactatggctgtcgaccatgtgactgtgcggggagctgtgaccctatcaccggagactgcatcagcagccacacagacatagactggtatcatgaagttcctgacttccgtcccgtgcacaataagagcgaaccagcctgggagtgggaggatgcgcaggggttttctgcacttctacactcaggtaaatgcgaatgtaaggaacagacattaggaaatgccaaggcattctgtggaatgaaatattcatatgtgctaaaaataaagattttatcagctcatgataaaggtactcatgttgaggtcaatgtgaagattaaaaaggtcttaaaatctaccaaactgaagattttccgaggaaagcgaacattatatccagaatcatggacggacagaggatgcacttgtccaatcctcaatcctggtttggaataccttgtagcaggacatgaggatataagaacaggcaaactaattgtgaatatgaaaagctttgtccagcactggaaaccttctcttggaagaaaagtcatggatattttaaaaagagagtgcaagtagcattaagatggatagcacataatggcacttgtctatgtacaaaacacaaactttagagcaagaagacctcagacaggaaactggaattttttaaagtgccaaaacatatagaaatgtttgaatgcatgggtcttatctaacttatctcttctggacccatgtttaaatacagttttatttcatgaagagaaatgaaaacccctacactgatatctgttttctatgggactgattctgaaattcttaactattaagaatattttaatagcagcatgacatttagcagtaatccattaagggcagtacctctaacaaggacgccttccagcttcagcgatgttacttacgtttgatgctacttaaagtaatgaatgacgttttaaggaatccctaaccctactatcagaaaaggtgtttgttaaagagccttctcttgtgtgttacgcatgaactttggtctgtaggtgttaaatggaacctctccatgtgtatatagtatttccttgtataaagcactttactacctaccacttgtgttgtgaacgtttggtgactgctgttgaaagaaggaaaagggtgtgtgagaaagcctactgaagcagcagcactgccactacatgtggacaaaagtgaccatataaaagaagttgtgctatttaactctgaatacttggagaaactaggtgaagatgcaaccagaaaggagaatatgtatgcgtgaagtctcagctttgagctggaggctagattccaagatgacagccatgatgaaactttttaaaaaactaaaccagaagagactttaaaataagagaaagaaatcataaatgtagacatatgcttggctaaaggggaaatggactttaaattttaaagagctcatttgcaatgcacttgtatacacttcaaaaattattgtagacacagaatttgttatatttttgtgcttagtatttaaacctgaacattgaaacagttttcctccttgtctttcttaacagtaatagtcattatatttacctgttttttaacacaatgtatgtgatagtcaaaaaatcacagtttttcattattattcatcttctgtacccacgcataaccactatacatagtttcttttgtacttgaatatacaaaacatgaacacagtgccatatgaataatttcacatacagaacctttttttctctgaagtcctgtggacttgcaaatatatatatatattgctttgttaatttgtttttatatttcatatatgtaataaaggaatatgatctga

SEQ ID NO: 14333 - DNA, 1971 bp, Homo sapiens
  source 1..1971: mol_type = unassigned DNA
ctagagggagtctactgctcttaggaatgttccgggagaaggactgagtggagtagctggagtgagttcccgctgtgaaaaagcctgcaaccctcggatgggaaatttggctttggggcgaaaactctgggcagacaccacctgcggtcagaatgctaccgaactgtactgcttctacagtgagaacacggatctgacttgtcggcagcccaaatgtgacaagtgcaatgctgcctatcctcacctggctcacctgccatctgccatggcagactcatccttccggtttcctcgcacatggtggcagtctgcggaggatgtgcacagagaaaagatccagttagacctggaagctgaattctacttcactcacctaattgtgatgttcaagtcccccaggccggctgccatggtgctggaccgctcccaggactttgggaaaacatggaagccttataagtactttgcgactaactgctccgctacatttggcctggaagatgatgttgtcaagaagggcgctatttgtacttctaaatactccagtccttttccatgcactggaggagaggttattttcaaagctttgtcaccaccatacgatacagagaacccttacagtgccaaagttcaggagcagctgaagatcaccaaccttcgcgtgcagctgctgaaacgacagtcttgtccctgtcagagaaatgacctgaacgaagagcctcaacattttacacactatgcaatctatgatttcattgtcaagggcagctgcttctgcaatggccacgctgatcaatgcatacctgttcatggcttcagacctgtcaaggccccaggaacattccacatggtccatgggaagtgtatgtgtaagcacaacacagcaggcagccactgccagcactgtgccccgttatacaatgaccggccatgggaggcagctgatggcaaaacgggggctcccaacgagtgcagaacctgcaagtgtaatgggcatgctgatacctgtcacttcgacgttaatgtgtgggaggcatcagggaatcgtagtggtggtgtctgtgatgactgtcagcacaacacagaaggacagtattgccagaggtgcaagccaggcttctatcgtgacctgcggagacccttctcagctccagatgcttgcaaaccgtgttcctgccatccagtaggatcagctgtccttcctgccaactcagtgaccttctgcgaccccagcaatggtgactgcccttgcaagcctggggtggcagggcgacgttgtgacaggtgcatggtgggatactggggcttcggagactatggctgtcgaccatgtgactgtgcggggagctgtgaccctatcaccggagactgcatcagcagccacacagacatagactggtatcatgaagttcctgacttccgtcccgtgcacaataagagcgaaccagcctgggagtgggaggatgcgcaggggttttctgcacttctacactcaggtaaatgcgaatgtaaggaacagacattaggaaatgccaaggcattctgtggaatgaaatattcatatgtgctaaaaataaagattttatcagctcatgataaaggtactcatgttgaggtcaatgtgaagattaaaaaggtcttaaaatctaccaaactgaagattttccgaggaaagcgaacattatatccagaatcatggacggacagaggatgcacttgtccaatcctcaatcctggtttggaataccttgtagcaggacatgaggatataagaacaggcaaactaattgtgaatatgaaaagctttgtccagcactggaaaccttctcttggaagaaaagtcatggatattttaaaaagagagtgcaagtagcattaagatggatagcacataatggcacttgtctatgtacaaaacacaaactttagagcaagaagacctcagacaggaaactggaattttttaaagtg

SEQ ID NO: 14334 - DNA, 1818 bp, Homo sapiens
  source 1..1818: mol_type = unassigned DNA
atggggagctgcgcgcggctgctgctgctctggggctgcacggtggtggccgcaggactgagtggagtagctggagtgagttcccgctgtgaaaaagcctgcaaccctcggatgggaaatttggctttggggcgaaaactctgggcagacaccacctgcggtcagaatgctaccgaactgtactgcttctacagtgagaacacggatctgacttgtcggcagcccaaatgtgacaagtgcaatgctgcctatcctcacctggctcacctgccatctgccatggcagactcatccttccggtttcctcgcacatggtggcagtctgcggaggatgtgcacagagaaaagatccagttagacctggaagctgaattctacttcactcacctaattgtgatgttcaagtcccccaggccggctgccatggtgctggaccgctcccaggactttgggaaaacatggaagccttataagtactttgcgactaactgctccgctacatttggcctggaagatgatgttgtcaagaagggcgctatttgtacttctaaatactccagtccttttccatgcactggaggagaggttattttcaaagctttgtcaccaccatacgatacagagaacccttacagtgccaaagttcaggagcagctgaagatcaccaaccttcgcgtgcagctgctgaaacgacagtcttgtccctgtcagagaaatgacctgaacgaagagcctcaacattttacacactatgcaatctatgatttcattgtcaagggcagctgcttctgcaatggccacgctgatcaatgcatacctgttcatggcttcagacctgtcaaggccccaggaacattccacatggtccatgggaagtgtatgtgtaagcacaacacagcaggcagccactgccagcactgtgccccgttatacaatgaccggccatgggaggcagctgatggcaaaacgggggctcccaacgagtgcagaacctgcaagtgtaatgggcatgctgatacctgtcacttcgacgttaatgtgtgggaggcatcagggaatcgtagtggtggtgtctgtgatgactgtcagcacaacacagaaggacagtattgccagaggtgcaagccaggcttctatcgtgacctgcggagacccttctcagctccagatgcttgcaaaccgtgttcctgccatccagtaggatcagctgtccttcctgccaactcagtgaccttctgcgaccccagcaatggtgactgcccttgcaagcctggggtggcagggcgacgttgtgacaggtgcatggtgggatactggggcttcggagactatggctgtcgaccatgtgactgtgcggggagctgtgaccctatcaccggagactgcatcagcagccacacagacatagactggtatcatgaagttcctgacttccgtcccgtgcacaataagagcgaaccagcctgggagtgggaggatgcgcaggggttttctgcacttctacactcagtgctaaaaataaagattttatcagctcatgataaaggtactcatgttgaggtcaatgtgaagattaaaaaggtcttaaaatctaccaaactgaagattttccgaggaaagcgaacattatatccagaatcatggacggacagaggatgcacttgtccaatcctcaatcctggtttggaataccttgtagcaggacatgaggatataagaacaggcaaactaattgtgaatatgaaaagctttgtccagcactggaaaccttctcttggaagaaaagtcatggatattttaaaaagagagtgcaagtag

SEQ ID NO: 14335 - DNA, 287 bp, Homo sapiens
  source 1..287: mol_type = unassigned DNA
tccagaatcatggacggacagaggatgcacttgtccaatcctcaatcctgttcaacagccaaggccaaagaaagctgataagaaaactgaaaccttacacgccaacctgcttccttggctactttggaaaagaaacaatcctattgggtatccctgcatattcattcattcttaattcatgcatacatttactcattcatcagtcatatattttagaacaccaaaactagcactaaagtattgtatcttctttttctatggatacaaaataaacttcgtgttctcag

SEQ ID NO: 14336 - DNA, 421 bp, Homo sapiens
  source 1..421: mol_type = unassigned DNA
agctcccactgtctgggctcaggaagcagaagagcttcaaagttcctacagaccttgacagagcttcctctggctttgcctgtgcggaacaattctgagggttattttcaaagctttgtcaccaccatacgatacagagaacccttacagtgccaaagttcaggagcagctgaagatcaccaaccttcgcgtgcagctgctgaaacgacagtcttgtccctgtcagagaaatgacctgaacgaagagcctcaacattttacacactatgcaatctatgatttcattgtcaagggcagctgcttctgcaatggccacgctgatcaatgcatacctgttcatggcttcagacctgtcaaggccccaggaacattccacatggtccatgggaagtgtatgtgtaagcacaacacagcaggcagc

SEQ ID NO: 14337 - DNA, 749 bp, Homo sapiens
  source 1..749: mol_type = unassigned DNA
gagggaacaaaggacccagctcgccatcccccggcacttcatggcctaaggaatgatgaggaggggtggcccagcgaccctgggcgcgcgtgggctggggccggtctctggtagaagcccatcgctggtgtccctgacctggtgctgggtactagagaaccaggactgagtggagtagctggagtgagttcccgctgtgaaaaagcctgcaaccctcggatgggaaatttggctttggggcgaaaactctgggcagacaccacctgcggtcagaatgctaccgaactgtactgcttctacagtgagaacacggatctgacttgtcggcagcccaaatgtgacaagtgcaatgctgcctatcctcacctggctcacctgccatctgccatggcagactcatccttccggtttcctcgcacatggtggcagtctgcggaggatgtgcacagagaaaagatccagttagacctggaagctgaattctacttcactcacctaattgtgatgttcaagtcccccaggccggctgccatggtgctggaccgctcccaggactttgggaaaacatggaagccttataagtactttgcgactaactgctccgctacatttggcctggaagatgatgttgtcaagaagggcgctatttgtacttctaaatactccagtccttttccatgcactggaggagaggttattttcaaagctttgtcaccaccatacgatacagagaacccttacagtgccaa

SEQ ID NO: 14338 - DNA, 3048 bp, Homo sapiens
  source 1..3048: mol_type = unassigned DNA
gaggtacacgaggagttactggaaacggcgcttctgtggaggagccgggggggatggggagtagagggagggggccctgttgcctcagcgccccgaggtcgtggagcggcagcagctgcagccggagcagcaccagcaacagcaacagcgagcgggacggagttaggaccgctcggagcgcacaggtctcgagggtgttggtgccagaagaaaagaatgattgatgggaaacagacaccgggctatagacactcatccttttgcttcagatactgatatctcagcctgcttgagcatcccttgtgagctgtgaacattgaggatcactcagggttatcggatgtacaacgggagagccatcgctttgctaaattattatctgcaattggacatcttttacaaaaaccaaactagacctgagtctaatagatatgttctaagacaaagaaaaagctgcaagttgttaacgcctaacacacaagtatgttaggcttccaccaaagtcctcaatatacctgaatacgcacaatatcttaactcttcatatttggttttgggatctgctttgaggtcccatcttcatttaaaaaaaaatacagagacctacctacccgtacgcatacatacatatgtgtatatatatgtaaactagacaaagatcgcagatcataaagcaagctctgctttagtttccaagaagattacaaagaatttagagatgtatttgtcaagattcctgtcgattcatgccctttgggttacggtgtcctcagtgatgcagccctaccctttggtttggggacattatgatttgtgtaagactcagatttacacggaagaagggaaagtttgggattacatggcctgccagccggaatccacggacatgacaaaatatctgaaagtgaaactcgatcctccggatattacctgtggagaccctcctgagacgttctgtgcaatgggcaatccctacatgtgcaataatgagtgtgatgcgagtacccctgagctggcacacccccctgagctgatgtttgattttgaaggaagacatccctccacattttggcagtctgccacttggaaggagtatcccaagcctctccaggttaacatcactctgtcttggagcaaaaccattgagctaacagacaacatagttattacctttgaatctgggcgtccagaccaaatgatcctggagaagtctctcgattatggacgaacatggcagccctatcagtattatgccacagactgcttagatgcttttcacatggatcctaaatccgtgaaggatttatcacagcatacggtcttagaaatcatttgcacagaagagtactcaacagggtatacaacaaatagcaaaataatccactttgaaatcaaagacaggttcgcgttttttgctggacctcgcctacgcaatatggcttccctctacggacagctggatacaaccaagaaactcagagatttctttacagtcacagacctgaggataaggctgttaagaccagccgttggggaaatatttgtagatgagctacacttggcacgctacttttacgcgatctcagacataaaggtgcgaggaaggtgcaagtgtaatctccatgccactgtatgtgtgtatgacaacagcaaattgacatgcgaatgtgagcacaacactacaggtccagactgtgggaaatgcaagaagaattatcagggccgaccttggagtccaggctcctatctccccatccccaaaggcactgcaaatacctgtatccccagtatttccagtattggtacgaatgtctgcgacaacgagctcctgcactgccagaacggagggacgtgccacaacaacgtgcgctgcctgtgcccggccgcatacacgggcatcctctgcgagaagctgcggtgcgaggaggctggcagctgcggctccgactctggccagggcgcgcccccgcacggctccccagcgctgctgctgctgaccacgctgctgggaaccgccagccccctggtgttctaggtgtcacctccagccacaccggacgggcctgtgccgtggggaagcagacacaacccaaacatttgctactaacataggaaacacacacatacagacacccccactcagacagtgtacaaactaagaaggcctaactgaactaagccatatttatcacccgtggacagcacatccgagtcaagactgttaatttctgactccagaggagttggcagctgttgatattatcactgcaaatcacattgccagctgcagagcatattgtggattggaaaggctgcgacagccccccaaacaggaaagacaaaaaacaaacaaatcaaccgacctaaaaacattggctactctagcgtggtgcgccctagtacgactccgcccagtgtgtggaccaaccaaatagcattctttgctgtcaggtgcattgtgggcataaggaaatctgttacaagctgccatattggcctgcttccgtccctgaatcccttccaacctgtgctttagtgaacgttgctctgtaacccttgttggttgaaagatttctttgtctgatgttagtgatgcacatgtgtaacagccccctctaaaagcgcaagccagtcatacccctgtatatcttagcagcactgagtccagtgcgagcacacacccactatacaagagtggctataggaaaaaagaaagtgtatctatccttttgtattcaaatgaagttatttttcttgaactactgtaatatgtagattttttgtattattgccaatttgtgttaccagacaatctgttaatgtatctaattcgaatcagcaaagactgacattttattttgtcctctttcgttctgttttgtttcactgtgcagagatttctctgtaagggcaacgaacgtgctggcatcaaagaatatcagtttacatatataacaagtgtaataagattccaccaaaggacattctaaatgttttcttgttgctttaacactggaagatttaaagaataaaaactcctgcataaac

SEQ ID NO: 14339 - DNA, 4034 bp, Homo sapiens
  source 1..4034: mol_type = unassigned DNA
taaaagtttaaggcgagaagtgtcagaggcagcggagcgaggaggcgcggaggagagccggcgagcaggggactgggctggcacgacctccgaaggctgagatctcattattaatatcactatatttttggagggagaggcacctttctcatcctctcttcctctccgcccacccttactccctccccctcatctacctgtcaaagtcactgatcttttgcatttcggaagaggacgtcaacgggaaggaattccccctctgggtgcgggctccgagagggggcgacttgcaggaggctccccccgggggcggaggcgaagggtgttggtgccagaagaaaagaatgattgatgggaaacagacaccgggctatagacactcatccttttgcttcagatactgatatctcagcctgcttgagcatcccttgtgagctgtgaacattgaggatcactcagggttatcggatgtacaacgggagagccatcgctttgctaaattattatctgcaattggacatcttttacaaaaaccaaactagacctgagtctaatagatatgttctaagacaaagaaaaagctgcaagttgttaacgcctaacacacaagtatgttaggcttccaccaaagtcctcaatatacctgaatacgcacaatatcttaactcttcatatttggttttgggatctgctttgaggtcccatcttcatttaaaaaaaaatacagagacctacctacccgtacgcatacatacatatgtgtatatatatgtaaactagacaaagatcgcagatcataaagcaagctctgctttagtttccaagaagattacaaagaatttagagatgtatttgtcaagattcctgtcgattcatgccctttgggttacggtgtcctcagtgatgcagccctaccctttggtttggggacattatgatttgtgtaagactcagatttacacggaagaagggaaagtttgggattacatggcctgccagccggaatccacggacatgacaaaatatctgaaagtgaaactcgatcctccggatattacctgtggagaccctcctgagacgttctgtgcaatgggcaatccctacatgtgcaataatgagtgtgatgcgagtacccctgagctggcacacccccctgagctgatgtttgattttgaaggaagacatccctccacattttggcagtctgccacttggaaggagtatcccaagcctctccaggttaacatcactctgtcttggagcaaaaccattgagctaacagacaacatagttattacctttgaatctgggcgtccagaccaaatgatcctggagaagtctctcgattatggacgaacatggcagccctatcagtattatgccacagactgcttagatgcttttcacatggatcctaaatccgtgaaggatttatcacagcatacggtcttagaaatcatttgcacagaagagtactcaacagggtatacaacaaatagcaaaataatccactttgaaatcaaagacaggttcgcgttttttgctggacctcgcctacgcaatatggcttccctctacggacagctggatacaaccaagaaactcagagatttctttacagtcacagacctgaggataaggctgttaagaccagccgttggggaaatatttgtagatgagctacacttggcacgctacttttacgcgatctcagacataaaggtgcgaggaaggtgcaagtgtaatctccatgccactgtatgtgtgtatgacaacagcaaattgacatgcgaatgtgagcacaacactacaggtccagactgtgggaaatgcaagaagaattatcagggccgaccttggagtccaggctcctatctccccatccccaaaggcactgcaaatacctgtatccccagtatttccagtattggtaattgtgaatgcttcggccactccaatcgatgcagttatatcgatctgctaaatacagtcatttgcgtgagctgtaaacacaacactagagggcagcactgtgagttatgcaggctgggctacttcagaaatgcttctgcacaactggacgatgagaatgtgtgcatagagtgttattgtaaccctttgggctcaatccatgatcgttgtaatggctcaggattttgtgagtgtaagactggaacaacagggcctaagtgtgatgagtgtctgccgggaaattcctggcactacggctgtcaaccgaatgtctgcgacaacgagctcctgcactgccagaacggagggacgtgccacaacaacgtgcgctgcctgtgcccggccgcatacacgggcatcctctgcgagaagctgcggtgcgaggaggctggcagctgcggctccgactctggccagggcgcgcccccgcacggctccccagcgctgctgctgctgaccacgctgctgggaaccgccagccccctggtgttctaggtgtcacctccagccacaccggacgggcctgtgccgtggggaagcagacacaacccaaacatttgctactaacataggaaacacacacatacagacacccccactcagacagtgtacaaactaagaaggcctaactgaactaagccatatttatcacccgtggacagcacatccgagtcaagactgttaatttctgactccagaggagttggcagctgttgatattatcactgcaaatcacattgccagctgcagagcatattgtggattggaaaggctgcgacagccccccaaacaggaaagacaaaaaacaaacaaatcaaccgacctaaaaacattggctactctagcgtggtgcgccctagtacgactccgcccagtgtgtggaccaaccaaatagcattctttgctgtcaggtgcattgtgggcataaggaaatctgttacaagctgccatattggcctgcttccgtccctgaatcccttccaacctgtgctttagtgaacgttgctctgtaacccttgttggttgaaagatttctttgtctgatgttagtgatgcacatgtgtaacagccccctctaaaagcgcaagccagtcatacccctgtatatcttagcagcactgagtccagtgcgagcacacacccactatacaagagtggctataggaaaaaagaaagtgtatctatccttttgtattcaaatgaagttatttttcttgaactactgtaatatgtagattttttgtattattgccaatttgtgttaccagacaatctgttaatgtatctaattcgaatcagcaaagactgacattttattttgtcctctttcgttctgttttgtttcactgtgcagagatttctctgtaagggcaacgaacgtgctggcatcaaagaatatcagtttacatatataacaagtgtaataagattccaccaaaggacattctaaatgttttcttgttgctttaacactggaagatttaaagaataaaaactcctgcataaacgatttcaggaatttgtattgcaatttcttaagatgaaaggaacagccaccaagcagtttcacactcactttactgatttctgtgtggactgagtacattcagctgacgaatttagttcccaggaagatggattgatgttcactagcttggacaacttctgcaaaatatgagactatttccacttgggaaaaattacaacagcaaaaaaaaaaaaaaaaaaaaaaaaaaatctaagtgattgccaagattatgccaaagcctgttggcagagtactaagagacttttatttttaagtcatgctattttcacagattgatggtgatcatgtgactctagggatgctgatctatgtatctttccaaatacagtgtttacatggagtatcacaagacgcaacctggggaaccaggaagggagcagggaaattgagtgatttgcaatttgactttgaatatattcagacttaagtatttagaggaaatatcaaaatataaagcagcaagtagacataactgctgttcctgagaataaagtttgttttaagtgctgcccaa

SEQ ID NO: 14340 - DNA, 4703 bp, Homo sapiens
  source 1..4703: mol_type = unassigned DNA
ttattaatatcactatatttttggagggagaggcacctttctcatcctctcttcctctccgcccacccttactccctccccctcatctacctgtcaaagtcactgatcttttgcatttcggaagaggacgtcaacgggaaggaattccccctctgggtgcgggctccgagagggggcgacttgcaggaggctccccccgggggcggaggcgaagggtgttggtgccagaagaaaagaatgattgatgggaaacagacaccgggctatagacactcatccttttgcttcagatactgatatctcagcctgcttgagcatcccttgtgagctgtgaacattgaggatcactcagggttatcggatgtacaacgggagagccatcgctttgctaaattattatctgcaattggacatcttttacaaaaaccaaactagacctgagtctaatagatatgttctaagacaaagaaaaagctgcaagttgttaacgcctaacacacaagtatgttaggcttccaccaaagtcctcaatatacctgaatacgcacaatatcttaactcttcatatttggttttgggatctgctttgaggtcccatcttcatttaaaaaaaaatacagagacctacctacccgtacgcatacatacatatgtgtatatatatgtaaactagacaaagatcgcagatcataaagcaagctctgctttagtttccaagaagattacaaagaatttagagatgtatttgtcaagattcctgtcgattcatgccctttgggttacggtgtcctcagtgatgcagccctaccctttggtttggggacattatgatttgtgtaagactcagatttacacggaagaagggaaagtttgggattacatggcctgccagccggaatccacggacatgacaaaatatctgaaagtgaaactcgatcctccggatattacctgtggagaccctcctgagacgttctgtgcaatgggcaatccctacatgtgcaataatgagtgtgatgcgagtacccctgagctggcacacccccctgagctgatgtttgattttgaaggaagacatccctccacattttggcagtctgccacttggaaggagtatcccaagcctctccaggttaacatcactctgtcttggagcaaaaccattgagctaacagacaacatagttattacctttgaatctgggcgtccagaccaaatgatcctggagaagtctctcgattatggacgaacatggcagccctatcagtattatgccacagactgcttagatgcttttcacatggatcctaaatccgtgaaggatttatcacagcatacggtcttagaaatcatttgcacagaagagtactcaacagggtatacaacaaatagcaaaataatccactttgaaatcaaagacaggttcgcgttttttgctggacctcgcctacgcaatatggcttccctctacggacagctggatacaaccaagaaactcagagatttctttacagtcacagacctgaggataaggctgttaagaccagccgttggggaaatatttgtagatgagctacacttggcacgctacttttacgcgatctcagacataaaggtgcgaggaaggtgcaagtgtaatctccatgccactgtatgtgtgtatgacaacagcaaattgacatgcgaatgtgagcacaacactacaggtccagactgtgggaaatgcaagaagaattatcagggccgaccttggagtccaggctcctatctccccatccccaaaggcactgcaaatacctgtatccccagtatttccagtattggtagtaagtaaaaacaaaaacaaaaaaaacaccaaaccaagtctaggctagctttgctttgttgttcacctcctcagatctattttcccagtgtccatttctgatgtaatagggtattttctttgtgaattgcatttttgtgttggttttctgcacagatctggtgagaacacagataaagtgattatttgtgcataactccatgaacatggcagtgctatgacttttctgactactcttaaccagtgagggctacctagactcaggtgcaattccttagataatcatcattcaggaaaaatataagtagtcctatttatccatacttagcaaccaacaaacaaattgaactctctcttagactggatttggatgtctgacataattttaaaaagcagaaaatgaaagccaatgaatgccttgggtatatgcatcagaacccaagaaaaagtccatgataccaagggaagggaattttgttaatgcattaaattctatgttttgtgaaggcctgaaacaggcaaatttgtgatcagtagtctctctggagagataaaggaaaaagagaatctgtacattcatttctccttcctaaaatacgatgatctatgtcttcttgactacttagctttgagtttgatatagaaagagtataaaaaatatgtgcagaatttgggagtgagagtactagaaattcctttaataaatctgttagtatgaatccaagcaattgaagagaaaccgctcttcaaccatctgtagaacacttccccagtatcactacaaagaactttcttccagctatcatgggagaaccaggtgtagctcccgcttcatgtgtaaaataatgatgccctcatgccaagcctgaaattcacattaagaaaatgcccagtaactttacagagcaaaattttaaatttttttttatacattgcaccctttatctctaatggctaaaatctttgaacaactactaagtaactgattacaaataaattaccgagaaagcaagattacgcatggtaagcggagagaattttcactgtagtgtcatcccctcacaggcttgtgtcataggtgctgtgccaggcagggtgatcgcagtgtaaatagccattgaatgattgcgattcccagcatccatctaaaaagcaatactctgataatttggataaagcaacttcctgcttcttataaatgcacagtcaggtgtcccaatttataaatcaacccagtttacttgagcttgtgaataggcctggacactgatttgttaagcgctagatgtggtaaatgccatgaaaattggccactttgtaaatagaagtagtgttcacatccatttagagataccagcctaatgctacagcatcctctttgtgatcttgttgaaacagcatcagtgttaaaaacttgcaaatgaaaaccttcagctctaatagtctaatttttctgctttagtatcccccttggcatttgcctaactgtatatataccccacaatgtgctcctttcaggccttgacaattgcatttgcacgtgcattttagtgcaacagggaagcaagtagaagcaagctgacacagattattgaggctgctatagtgatctggcctgtcagaagtttcagaaatggatggatggaaaagtagttctttggcgttggggtgtctttctgtttggagtgtcagttgtatgttgcatggcccctctaactgtactgctcactcgacatcccattcggccgcctccaccacattccccatatctgagcatcagcagatgttgaccttttacacatcaaatcaggaaatttctgttttgttttgttttgttttgttttgaaatcagtggtgacctgaaaggatgcttcgttgtgcctttgaaaaaaatatattaacctttattatcgagaacctaggaaaatttactcctaataaaaaccctctgactaaaagtgatattttggactctcccttcaatatgcctctggctgttccgcttagaatgcaatgggtattttctcagatttccagcaaacaggatgtaagagcttccagaggtcacccaacatcacacatgactagcttacctgtttcctggcttttaaggtaaagagttacagtaaaaccatcaaacgtgattgtatcttctaggctgctttaatggcattcgaaagttccttctttgtgggcttataagttgctttttgcgtgcactcgtggattcctttcccctccaaagggcaagaattcacacgtagacgacactgcctgttccagagggcacgggaatggggttttcaaggtgcaagccagagaaaaggaagctgtttggatatttagctaagttatgggtgtttgccagtgctttttgcattaccccaaagaaggaatcaatgactataattccactaactatatagaaagataccattatagcagatgtaacacccctgagaccccgattatcacagcatagctcaaggaaaataaatgatgtatattatcgatgtagattattgatgtatataaccatcagtttacatacatattctgtatacacagtgattaaaggttttggggccctaataaatttcagtatagatctcaaaatgccaacgcctgtattaaggttcaaatgcatggatagggtggtcatcctttccgatcatctgctaaaaatgtttttgaaacaaatttcccattaaggtcattcgtacctgctgttgtctatctattaacaaataggtttcccataatcctaaggatacttgacttagaactcagtcattctgatctgctttggccatggctgaaaaaatgctggtgatattgtcagcaattaatgaatcccaaaataaatctgtagcctttg

SEQ ID NO: 14341 - DNA, 4628 bp, Homo sapiens
  source 1..4628: mol_type = unassigned DNA
gcatttcggaagaggacgtcaacgggaaggaattccccctctgggtgcgggctccgagagggggcgacttgcaggaggctccccccgggggcggaggcgaagggtgttggtgccagaagaaaagaatgattgatgggaaacagacaccgggctatagacactcatccttttgcttcagatactgatatctcagcctgcttgagcatcccttgtgagctgtgaacattgaggatcactcagggttatcggatgtacaacgggagagccatcgctttgctaaattattatctgcaattggacatcttttacaaaaaccaaactagacctgagtctaatagatatgttctaagacaaagaaaaagctgcaagttgttaacgcctaacacacaagtatgttaggcttccaccaaagtcctcaatatacctgaatacgcacaatatcttaactcttcatatttggttttgggatctgctttgaggtcccatcttcatttaaaaaaaaatacagagacctacctacccgtacgcatacatacatatgtgtatatatatgtaaactagacaaagatcgcagatcataaagcaagctctgctttagtttccaagaagattacaaagaatttagagatgtatttgtcaagattcctgtcgattcatgccctttgggttacggtgtcctcagtgatgcagccctaccctttggtttggggacattatgatttgtgtaagactcagatttacacggaagaagggaaagtttgggattacatggcctgccagccggaatccacggacatgacaaaatatctgaaagtgaaactcgatcctccggatattacctgtggagaccctcctgagacgttctgtgcaatgggcaatccctacatgtgcaataatgagtgtgatgcgagtacccctgagctggcacacccccctgagctgatgtttgattttgaaggaagacatccctccacattttggcagtctgccacttggaaggagtatcccaagcctctccaggttaacatcactctgtcttggagcaaaaccattgagctaacagacaacatagttattacctttgaatctgggcgtccagaccaaatgatcctggagaagtctctcgattatggacgaacatggcagccctatcagtattatgccacagactgcttagatgcttttcacatggatcctaaatccgtgaaggatttatcacagcatacggtcttagaaatcatttgcacagaagagtactcaacagggtatacaacaaatagcaaaataatccactttgaaatcaaagacaggttcgcgttttttgctggacctcgcctacgcaatatggcttccctctacggacagctggatacaaccaagaaactcagagatttctttacagtcacagacctgaggataaggctgttaagaccagccgttggggaaatatttgtagatgagctacacttggcacgctacttttacgcgatctcagacataaaggtgcgaggaaggtgcaagtgtaatctccatgccactgtatgtgtgtatgacaacagcaaattgacatgcgaatgtgagcacaacactacaggtccagactgtgggaaatgcaagaagaattatcagggccgaccttggagtccaggctcctatctccccatccccaaaggcactgcaaatacctgtatccccagtatttccagtattggtaatcctccaaagtttaataggatatggccgaatatttcttcccttgaggtttctaacccaaaacaagcgaatgtctgcgacaacgagctcctgcactgccagaacggagggacgtgccacaacaacgtgcgctgcctgtgcccggccgcatacacgggcatcctctgcgagaagctgcggtgcgaggaggctggcagctgcggctccgactctggccagggcgcgcccccgcacggctccccagcgctgctgctgctgaccacgctgctgggaaccgccagccccctggtgttctaggtgtcacctccagccacaccggacgggcctgtgccgtggggaagcagacacaacccaaacatttgctactaacataggaaacacacacatacagacacccccactcagacagtgtacaaactaagaaggcctaactgaactaagccatatttatcacccgtggacagcacatccgagtcaagactgttaatttctgactccagaggagttggcagctgttgatattatcactgcaaatcacattgccagctgcagagcatattgtggattggaaaggctgcgacagccccccaaacaggaaagacaaaaaacaaacaaatcaaccgacctaaaaacattggctactctagcgtggtgcgccctagtacgactccgcccagtgtgtggaccaaccaaatagcattctttgctgtcaggtgcattgtgggcataaggaaatctgttacaagctgccatattggcctgcttccgtccctgaatcccttccaacctgtgctttagtgaacgttgctctgtaacccttgttggttgaaagatttctttgtctgatgttagtgatgcacatgtgtaacagccccctctaaaagcgcaagccagtcatacccctgtatatcttagcagcactgagtccagtgcgagcacacacccactatacaagagtggctataggaaaaaagaaagtgtatctatccttttgtattcaaatgaagttatttttcttgaactactgtaatatgtagattttttgtattattgccaatttgtgttaccagacaatctgttaatgtatctaattcgaatcagcaaagactgacattttattttgtcctctttcgttctgttttgtttcactgtgcagagatttctctgtaagggcaacgaacgtgctggcatcaaagaatatcagtttacatatataacaagtgtaataagattccaccaaaggacattctaaatgttttcttgttgctttaacactggaagatttaaagaataaaaactcctgcataaacgatttcaggaatttgtattgcaatttcttaagatgaaaggaacagccaccaagcagtttcacactcactttactgatttctgtgtggactgagtacattcagctgacgaatttagttcccaggaagatggattgatgttcactagcttggacaacttctgcaaaatatgagactatttccacttgggaaaaattacaacagcaaaaaaaaaaaaaaaaaaaaaaaaaaatctaagtgattgccaagattatgccaaagcctgttggcagagtactaagagacttttatttttaagtcatgctattttcacagattgatggtgatcatgtgactctagggatgctgatctatgtatctttccaaatacagtgtttacatggagtatcacaagacgcaacctggggaaccaggaagggagcagggaaattgagtgatttgcaatttgactttgaatatattcagacttaagtatttagaggaaatatcaaaatataaagcagcaagtagacataactgctgttcctgagaataaagtttgttttaagtgctgcccaaggtgtaataaattcttgtttctgccttttattaggccaattactgtgcaagacagcaaggggaggcaggtggggaagaacctttgcaaagtttcaaagaggctaagacagtgtgcatttcgttcccagcacactgttgtcctacagattacaagtgtattagcagcagcatctcctggaatcaaaaacaattatcagcccgaaccagagtcttaaggacaatgaaattctacatgacttggtagaacaataacctatgatagtgtaaggtcagaaacctagttccagtctgaattcttcaccctgctgccactccttgctgaaacagggaaggggggaggaatgtctcctgataaataacctgggtaaaaactagatgaaggaacagcatgtcttattggttttgttcccagaaaagccaattcgaagaaggcaataaaaggtaaacaggtaatgcctgtgctgcctgccaccccacgtctaagtctattgaatgtttgttattcaaaccaacagtctcttttgatgtaagaaataaggaaagatggaaataaattagagcttaggcttagtgccagagtggccaaccagaaattggagatttacgttggaagcataaatagaaaattatatttcaggctcaccaaagaaacacatgaaaatgctgataacatagggagtttgagattatttataatgaggtggatttctgatattaaaattagagtttaagttgtcttatagtttattagcacaaaccaaaggcagcccatgttatttctggcaaagatgcactttatcgttatctgctcatggctttgtcgcaacgctcaggaatcagacactgcacacttcaatagttgggattccaaaagctaattctaaaatttaatgaaggcctgatttaaactgattcatctgcattttatctttatgaggccataagaatctaaattgatgaggaatatctttcattccgtgtatttagatatagttttctgaatttcctgaagcgatgtgatctgcttttaataaaaattcacttttaggt

SEQ ID NO: 14342 - DNA, 830 bp, Homo sapiens
  source 1..830: mol_type = unassigned DNA
cgcccgaggcggaccaggctggctgcgcagggccgccgccccgcgccgtcggctcggctcccgcccggcgcaagggcaaacgagccacacgggtgttggtgccagaagaaaagaatgattgatgggaaacagacaccgggctatagacactcatccttttgcttcagatactgatatctcagcctgcttgagcatcccttgtgagctgtgaacattgaggatcactcagggttatcggatgtacaacgggagagccatcgctttgctaaattattatctgcaattggacatcttttacaaaaaccaaactagacctgagtctaatagatatgttctaagacaaagaaaaagctgcaagttgttaacgcctaacacacaagtatgttaggcttccaccaaagtcctcaatatacctgaatacgcacaatatcttaactcttcatatttggttttgggatctgctttgaggtcccatcttcatttaaaaaaaaatacagagacctacctacccgtacgcatacatacatatgtgtatatatatgtaaactagacaaagatcgcagatcataaagcaagctctgctttagtttccaagaagattacaaagaatttagagatgtatttgtcaagattcctgtcgattcatgccctttgggttacggtgtcctcagtgatgcagccctaccctttggtttggggacattatgatttgtgtaagactcagatttacacggaagaagggaaagtttgggattacatggcctgccagccggaatccacggacatgacaaaatatctgaaagtgaaactcgatcctccggatattacct

SEQ ID NO: 14343 - DNA, 574 bp, Homo sapiens
  source 1..574: mol_type = unassigned DNA
ttttctggatgccgtgaaatgagatatatttcacccactgaagaccaccatgaaggcattcaggattctatatactgcactactaatttggtggtatttccttactgtggaatttaagacggataatcttaaaacttttgcatggaaacagtttatttgaacataaagctggtttcctgttaatatttttgttttgtcagttttcaatgggtatatgtgttaaaatgattcaggttagcctttttaggaggaggcaaatgtattttgcagtttccttttgtatatttgcaagtggtgcaaatacctatttttgcttccattattattctgaaaaatattcagggtgttggtgccagaagaaaagaatgattgatgggaaacagacaccgggctatagacactcatccttttgcttcagatactgatatctcagcctgcttgagcatcccttgtgagctgtgaacattgaggatcactcagggttatcggatgtacaacgggagagccatcgctttgctaaattattatctgcaattggacatcttttacaaaaaccaaactagacctgagtcta

SEQ ID NO: 14344 - DNA, 1443 bp, Homo sapiens
  source 1..1443: mol_type = unassigned DNA
atgtatttgtcaagattcctgtcgattcatgccctttgggttacggtgtcctcagtgatgcagccctaccctttggtttggggacattatgatttgtgtaagactcagatttacacggaagaagggaaagtttgggattacatggcctgccagccggaatccacggacatgacaaaatatctgaaagtgaaactcgatcctccggatattacctgtggagaccctcctgagacgttctgtgcaatgggcaatccctacatgtgcaataatgagtgtgatgcgagtacccctgagctggcacacccccctgagctgatgtttgattttgaaggaagacatccctccacattttggcagtctgccacttggaaggagtatcccaagcctctccaggttaacatcactctgtcttggagcaaaaccattgagctaacagacaacatagttattacctttgaatctgggcgtccagaccaaatgatcctggagaagtctctcgattatggacgaacatggcagccctatcagtattatgccacagactgcttagatgcttttcacatggatcctaaatccgtgaaggatttatcacagcatacggtcttagaaatcatttgcacagaagagtactcaacagggtatacaacaaatagcaaaataatccactttgaaatcaaagacaggttcgcgttttttgctggacctcgcctacgcaatatggcttccctctacggacagctggatacaaccaagaaactcagagatttctttacagtcacagacctgaggataaggctgttaagaccagccgttggggaaatatttgtagatgagctacacttggcacgctacttttacgcgatctcagacataaaggtgcgaggaaggtgcaagtgtaatctccatgccactgtatgtgtgtatgacaacagcaaattgacatgcgaatgtgagcacaacactacaggtccagactgtgggaaatgcaagaagaattatcagggccgaccttggagtccaggctcctatctccccatccccaaaggcactgcaaatacctgtatccccagtatttccagtattggtaatcctccaaagtttaataggatatggccgaatatttcttcccttgaggtttctaacccaaaacaagttgctcccaaattagctttgtcaacagtttcttctgttcaagttgcaaaccacaagagagcgaatgtctgcgacaacgagctcctgcactgccagaacggagggacgtgccacaacaacgtgcgctgcctgtgcccggccgcatacacgggcatcctctgcgagaagctgcggtgcgaggaggctggcagctgcggctccgactctggccagggcgcgcccccgcacggctccccagcgctgctgctgctgaccacgctgctgggaaccgccagccccctggtgttctag

SEQ ID NO: 14345 - DNA, 1485 bp, Homo sapiens
  source 1..1485: mol_type = unassigned DNA
atgtatttgtcaagattcctgtcgattcatgccctttgggttacggtgtcctcagtgatgcagccctaccctttggtttggggacattatgatttgtgtaagactcagatttacacggaagaagggaaagtttgggattacatggcctgccagccggaatccacggacatgacaaaatatctgaaagtgaaactcgatcctccggatattacctgtggagaccctcctgagacgttctgtgcaatgggcaatccctacatgtgcaataatgagtgtgatgcgagtacccctgagctggcacacccccctgagctgatgtttgattttgaaggaagacatccctccacattttggcagtctgccacttggaaggagtatcccaagcctctccaggttaacatcactctgtcttggagcaaaaccattgagctaacagacaacatagttattacctttgaatctgggcgtccagaccaaatgatcctggagaagtctctcgattatggacgaacatggcagccctatcagtattatgccacagactgcttagatgcttttcacatggatcctaaatccgtgaaggatttatcacagcatacggtcttagaaatcatttgcacagaagagtactcaacagggtatacaacaaatagcaaaataatccactttgaaatcaaagacaggttcgcgttttttgctggacctcgcctacgcaatatggcttccctctacggacagctggatacaaccaagaaactcagagatttctttacagtcacagacctgaggataaggctgttaagaccagccgttggggaaatatttgtagatgagctacacttggcacgctacttttacgcgatctcagacataaaggtgcgaggaaggtgcaagtgtaatctccatgccactgtatgtgtgtatgacaacagcaaattgacatgcgaatgtgagcacaacactacaggtccagactgtgggaaatgcaagaagaattatcagggccgaccttggagtccaggctcctatctccccatccccaaaggcactgcaaatacctgtatccccagtatttccagtattggtaattgtgaatgcttcggccactccaatcgatgcagttatatcgatctgctaaatacagtcatttgcgtgagctgtaaacacaacactagagggcagcactgtgagttatgcaggctgggctacttcagaaatgcttctgcacaactggacgatgagaatgtgtgcatagcgaatgtctgcgacaacgagctcctgcactgccagaacggagggacgtgccacaacaacgtgcgctgcctgtgcccggccgcatacacgggcatcctctgcgagaagctgcggtgcgaggaggctggcagctgcggctccgactctggccagggcgcgcccccgcacggctccccagcgctgctgctgctgaccacgctgctgggaaccgccagccccctggtgttctag

SEQ ID NO: 14346 - DNA, 1066 bp, Homo sapiens
  source 1..1066: mol_type = unassigned DNA
cacacacgtaccgctctggtttcttctgttggcattttctgctgcttctgttgcctgacaaacctgataaatgaaagccactgattcaaagccaatattttacacagagaaaggagattccagctgggactactcaccaaggttagttcataggcaagagaaaaaagcaaggaaaaggatctagagatcttggtgaactaaagctgcagcccagggcaatccctacatgtgcaataatgagtgtgatgcgagtacccctgagctggcacacccccctgagctgatgtttgattttgaaggaagacatccctccacattttggcagtctgccacttggaaggagtatcccaagcctctccaggttaacatcactctgtcttggagcaaaaccattgagctaacagacaacatagttattacctttgaatctgggcgtccagaccaaatgatcctggagaagtctctcgattatggacgaacatggcagccctatcagtattatgccacagactgcttagatgcttttcacatggatcctaaatccgtgaaggatttatcacagcatacggtcttagaaatcatttgcacagaagagtactcaacagggtatacaacaaatagcaaaataatccactttgaaatcaaagacaggttcgcgttttttgctggacctcgcctacgcaatatggcttccctctacggacagctggatacaaccaagaaactcagagatttctttacagtcacagacctgaggataaggctgttaagaccagccgttggggaaatatttgtagatgagctacacttggcacgctacttttacgcgatctcagacataaaggtgcgaggaagtaagaacttgaagaaagtggactggaaaactcccatcaacatcttcagtatttaccctttaacaaaatattcctgaaggtataaatgaccattatagaacatttacagaatcctgtggaatactactatgtaaaaggctagtgaaattgtgatggaagagtcagcaaagatgtgaaaaatgaaatgccaagtggtacaatctggtgtattt

SEQ ID NO: 14347 - DNA, 3149 bp, Homo sapiens
  source 1..3149: mol_type = unassigned DNA
gaggtacacgaggagttactggaaacggcgcttctgtggaggagccgggggggatggggagtagagggagggggccctgttgcctcagcgccccgaggtcgtggagcggcagcagctgcagccggagcagcaccagcaacagcaacagcgagcgggacggagttaggaccgctcggagcgcacaggtctcgagggtgttggtgccagaagaaaagaatgattgatgggaaacagacaccgggctatagacactcatccttttgcttcagatactgatatctcagcctgcttgagcatcccttgtgagctgtgaacattgaggatcactcagggttatcggatgtacaacgggagagccatcgctttgctaaattattatctgcaattggacatcttttacaaaaaccaaactagacctgagtctaatagatatgttctaagacaaagaaaaagctgcaagttgttaacgcctaacacacaagtatgttaggcttccaccaaagtcctcaatatacctgaatacgcacaatatcttaactcttcatatttggttttgggatctgctttgaggtcccatcttcatttaaaaaaaaatacagagacctacctacccgtacgcatacatacatatgtgtatatatatgtaaactagacaaagatcgcagatcataaagcaagctctgctttagtttccaagaagattacaaagaatttagagatgtatttgtcaagattcctgtcgattcatgccctttgggttacggtgtcctcagtgatgcagccctaccctttggtttggggacattatgatttgtgtaagactcagatttacacggaagaagggaaagtttgggattacatggcctgccagccggaatccacggacatgacaaaatatctgaaagtgaaactcgatcctccggatattacctgtggagaccctcctgagacgttctgtgcaatgggcaatccctacatgtgcaataatgagtgtgatgcgagtacccctgagctggcacacccccctgagctgatgtttgattttgaaggaagacatccctccacattttggcagtctgccacttggaaggagtatcccaagcctctccaggttaacatcactctgtcttggagcaaaaccattgagctaacagacaacatagttattacctttgaatctgggcgtccagaccaaatgatcctggagaagtctctcgattatggacgaacatggcagccctatcagtattatgccacagactgcttagatgcttttcacatggatcctaaatccgtgaaggatttatcacagcatacggtcttagaaatcatttgcacagaagagtactcaacagggtatacaacaaatagcaaaataatccactttgaaatcaaagacaggttcgcgttttttgctggacctcgcctacgcaatatggcttccctctacggacagctggatacaaccaagaaactcagagatttctttacagtcacagacctgaggataaggctgttaagaccagccgttggggaaatatttgtagatgagctacacttggcacgctacttttacgcgatctcagacataaaggtgcgaggaaggtgcaagtgtaatctccatgccactgtatgtgtgtatgacaacagcaaattgacatgcgaatgtgagcacaacactacaggtccagactgtgggaaatgcaagaagaattatcagggccgaccttggagtccaggctcctatctccccatccccaaaggcactgcaaatacctgtatccccagtatttccagtattggtaatcctccaaagtttaataggatatggccgaatatttcttcccttgaggtttctaacccaaaacaagttgctcccaaattagctttgtcaacagtttcttctgttcaagttgcaaaccacaagagagcgaatgtctgcgacaacgagctcctgcactgccagaacggagggacgtgccacaacaacgtgcgctgcctgtgcccggccgcatacacgggcatcctctgcgagaagctgcggtgcgaggaggctggcagctgcggctccgactctggccagggcgcgcccccgcacggctccccagcgctgctgctgctgaccacgctgctgggaaccgccagccccctggtgttctaggtgtcacctccagccacaccggacgggcctgtgccgtggggaagcagacacaacccaaacatttgctactaacataggaaacacacacatacagacacccccactcagacagtgtacaaactaagaaggcctaactgaactaagccatatttatcacccgtggacagcacatccgagtcaagactgttaatttctgactccagaggagttggcagctgttgatattatcactgcaaatcacattgccagctgcagagcatattgtggattggaaaggctgcgacagccccccaaacaggaaagacaaaaaacaaacaaatcaaccgacctaaaaacattggctactctagcgtggtgcgccctagtacgactccgcccagtgtgtggaccaaccaaatagcattctttgctgtcaggtgcattgtgggcataaggaaatctgttacaagctgccatattggcctgcttccgtccctgaatcccttccaacctgtgctttagtgaacgttgctctgtaacccttgttggttgaaagatttctttgtctgatgttagtgatgcacatgtgtaacagccccctctaaaagcgcaagccagtcatacccctgtatatcttagcagcactgagtccagtgcgagcacacacccactatacaagagtggctataggaaaaaagaaagtgtatctatccttttgtattcaaatgaagttatttttcttgaactactgtaatatgtagattttttgtattattgccaatttgtgttaccagacaatctgttaatgtatctaattcgaatcagcaaagactgacattttattttgtcctctttcgttctgttttgtttcactgtgcagagatttctctgtaagggcaacgaacgtgctggcatcaaagaatatcagtttacatatataacaagtgtaataagattccaccaaaggacattctaaatgttttcttgttgctttaacactggaagattt

SEQ ID NO: 14348 - DNA, 3347 bp, Homo sapiens
  source 1..3347: mol_type = unassigned DNA
gaggtacacgaggagttactggaaacggcgcttctgtggaggagccgggggggatggggagtagagggagggggccctgttgcctcagcgccccgaggtcgtggagcggcagcagctgcagccggagcagcaccagcaacagcaacagcgagcgggacggagttaggaccgctcggagcgcacaggtctcgagggtgttggtgccagaagaaaagaatgattgatgggaaacagacaccgggctatagacactcatccttttgcttcagatactgatatctcagcctgcttgagcatcccttgtgagctgtgaacattgaggatcactcagggttatcggatgtacaacgggagagccatcgctttgctaaattattatctgcaattggacatcttttacaaaaaccaaactagacctgagtctaatagatatgttctaagacaaagaaaaagctgcaagttgttaacgcctaacacacaagtatgttaggcttccaccaaagtcctcaatatacctgaatacgcacaatatcttaactcttcatatttggttttgggatctgctttgaggtcccatcttcatttaaaaaaaaatacagagacctacctacccgtacgcatacatacatatgtgtatatatatgtaaactagacaaagatcgcagatcataaagcaagctctgctttagtttccaagaagattacaaagaatttagagatgtatttgtcaagattcctgtcgattcatgccctttgggttacggtgtcctcagtgatgcagccctaccctttggtttggggacattatgatttgtgtaagactcagatttacacggaagaagggaaagtttgggattacatggcctgccagccggaatccacggacatgacaaaatatctgaaagtgaaactcgatcctccggatattacctgtggagaccctcctgagacgttctgtgcaatgggcaatccctacatgtgcaataatgagtgtgatgcgagtacccctgagctggcacacccccctgagctgatgtttgattttgaaggaagacatccctccacattttggcagtctgccacttggaaggagtatcccaagcctctccaggttaacatcactctgtcttggagcaaaaccattgagctaacagacaacatagttattacctttgaatctgggcgtccagaccaaatgatcctggagaagtctctcgattatggacgaacatggcagccctatcagtattatgccacagactgcttagatgcttttcacatggatcctaaatccgtgaaggatttatcacagcatacggtcttagaaatcatttgcacagaagagtactcaacagggtatacaacaaatagcaaaataatccactttgaaatcaaagacaggttcgcgttttttgctggacctcgcctacgcaatatggcttccctctacggacagctggatacaaccaagaaactcagagatttctttacagtcacagacctgaggataaggctgttaagaccagccgttggggaaatatttgtagatgagctacacttggcacgctacttttacgcgatctcagacataaaggtgcgaggaaggtgcaagtgtaatctccatgccactgtatgtgtgtatgacaacagcaaattgacatgcgaatgtgagcacaacactacaggtccagactgtgggaaatgcaagaagaattatcagggccgaccttggagtccaggctcctatctccccatccccaaaggcactgcaaatacctgtatccccagtatttccagtattggtaattgtgaatgcttcggccactccaatcgatgcagttatatcgatctgctaaatacagtcatttgcgtgagctgtaaacacaacactagagggcagcactgtgagttatgcaggctgggctacttcagaaatgcttctgcacaactggacgatgagaatgtgtgcatagagtgttattgtaaccctttgggctcaatccatgatcgttgtaatggctcaggattttgtgagtgtaagactggaacaacagggcctaagtgtgatgagtgtctgccgggaaattcctggcactacggctgtcaaccgaatgtctgcgacaacgagctcctgcactgccagaacggagggacgtgccacaacaacgtgcgctgcctgtgcccggccgcatacacgggcatcctctgcgagaagctgcggtgcgaggaggctggcagctgcggctccgactctggccagggcgcgcccccgcacggctccccagcgctgctgctgctgaccacgctgctgggaaccgccagccccctggtgttctaggtgtcacctccagccacaccggacgggcctgtgccgtggggaagcagacacaacccaaacatttgctactaacataggaaacacacacatacagacacccccactcagacagtgtacaaactaagaaggcctaactgaactaagccatatttatcacccgtggacagcacatccgagtcaagactgttaatttctgactccagaggagttggcagctgttgatattatcactgcaaatcacattgccagctgcagagcatattgtggattggaaaggctgcgacagccccccaaacaggaaagacaaaaaacaaacaaatcaaccgacctaaaaacattggctactctagcgtggtgcgccctagtacgactccgcccagtgtgtggaccaaccaaatagcattctttgctgtcaggtgcattgtgggcataaggaaatctgttacaagctgccatattggcctgcttccgtccctgaatcccttccaacctgtgctttagtgaacgttgctctgtaacccttgttggttgaaagatttctttgtctgatgttagtgatgcacatgtgtaacagccccctctaaaagcgcaagccagtcatacccctgtatatcttagcagcactgagtccagtgcgagcacacacccactatacaagagtggctataggaaaaaagaaagtgtatctatccttttgtattcaaatgaagttatttttcttgaactactgtaatatgtagattttttgtattattgccaatttgtgttaccagacaatctgttaatgtatctaattcgaatcagcaaagactgacattttattttgtcctctttcgttctgttttgtttcactgtgcagagatttctctgtaagggcaacgaacgtgctggcatcaaagaatatcagtttacatatataacaagtgtaataagattccaccaaaggacattctaaatgttttcttgttgctttaacactggaagatttaaagaataaaaactcctgcat

SEQ ID NO: 14349 - DNA, 4792 bp, Homo sapiens
  source 1..4792: mol_type = unassigned DNA
cgctcagcccgggcgggcgatgcgggcggcgcgggcggccccctcccccggcccgcgtctccgggacggctgcgggcggcccccccggcggccggagggctccctggccccgatctgacggcggcggcggcggcggccacagcggcgggagcggcgcggggaaggagcagcggctcgcagccctcggcccgcgcccccacccagcgccagcccgaggggggaggcgcagcgccggagggtggcggtcctcggccctcccaggtctccgcgccgggaagccgctccgagccggggctggagggttgttttgccgttgtgttgagcacgtcacccattaagagccctttaaagacctggattgattggaaggacaaaaattaaaagcaatctgatccagcctcatgcaggatccctgcggattttctccttatcccatttccatccactgtcacaatttgagaatctgcctgatttgatcagattcacctccaggggaggtgtgataccagggttaggaggacgtgaagttatgggcaactttctgatctgtccatcagcagtctgagaaacgctggctctgaattttccgtgtcggccttttggaaacaacaagttcctcgctgtttgcaaagcttcagtgctcgggtccctgggacaccccggccaccctcgcctggtagatgtggcatttccatgctgaggccgcgagtcccgcctgaccccgtcgctgcctctccagggcttctctgggccgcgcctctgcagactgcgcagccatgctgcatctgctggcgctcttcctgcactgcctccctctggcctctggggactatgacatctgcaaatcctgggtgaccacagatgagggccccacctgggagttctacgcctgccagcccaaggtgatgcgcctgaaggactacgtcaaggtgaaggtggagccctcaggcatcacatgtggagacccccctgagaggttctgctcccatgagaatccctacctatgcagcaacgagtgtgacgcctccaacccggacctggcccacccgcccaggctcatgttcgacaaggaggaggagggcctggccacctactggcagagcatcacctggagccgctaccccagcccgctggaagccaacatcaccctttcgtggaacaagaccgtggagctgaccgacgacgtggtgatgaccttcgagtacggccggcccacggtcatggtcctggagaagtccctggacaacgggcgcacctggcagccctaccagttctacgccgaggactgcatggaggccttcggtatgtccgcccgccgggcccgcgacatgtcatcctccagcgcgcaccgcgtgctctgcaccgaggagtactcgcgctgggcaggctccaagaaggagaagcacgtgcgcttcgaggtgcgggaccgcttcgccatctttgccggccccgacctgcgcaacatggacaacctctacacgcggctggagagcgccaagggcctcaaggagttcttcaccctcaccgacctgcgcatgcggctgctgcgcccggcgctgggcggcacctatgtgcagcgggagaacctctacaagtacttctacgccatctccaacatcgaggtcatcggcaggtgcaagtgcaacctgcacgccaacctgtgctccatgcgcgagggcagcctgcagtgcgagtgcgagcacaacaccaccggccccgactgcggcaagtgcaagaagaatttccgcacccggtcctggcgggccggctcctacctgccgctgccccatggctctcccaacgcctgtgccactgcaggttcctttggcaactgcgaatgctacggtcactccaaccgctgcagctacattgacttcctgaatgtggtgacctgcgtcagctgcaagcacaacacgcgaggtcagcactgccagcactgccggctgggctactaccgcaacggctcggcagagctggatgatgagaacgtctgcattgagtgtaactgcaaccagataggctccgtgcacgaccggtgcaacgagaccggcttctgcgagtgccgcgagggcgcggcgggccccaagtgcgacgactgcctccccacgcactactggcgccagggctgctaccccaacgtgtgcgacgacgaccagctgctgtgccagaacggaggcacctgcctgcagaaccagcgctgcgcctgcccgcgcggctacaccggcgtgcgctgcgagcagccccgctgcgaccccgccgacgatgacggcggtctggactgcgaccgcgcgcccggggccgccccgcgccccgccaccctgctcggctgcctgctgctgctggggctggccgcccgcctgggccgctgagccccgcccggaggacgctccccgcacccggaggccgggggtcccggggtcccggggcggggccggcgtccgaggccgggcggtgagaagggtgcggcccgaggtgctcccaggtgctactcagcagggccccccgcccggcccgcgctcccgcccgcactgccctccccccgcagcaggggcgccttgggactccggtccccgcgcctgcgatttggtttcgtttttcttttgtattatccgccgcccagttccttttttgtctttctctctctctctttttttttttttttttctggcggtgagccagagggtcgggagaaacgctgctcgccccacaccccgtcctgcctcccaccacacttacacacacgggactgtggccgacaccccctggcctgtgccaggctcacgggcggcggcggaccccgacctccagttgcctacaattccagtcgctgacttggtcctgttttctattctttatttttcctgcaacccaccagaccccaggcctcaccggaggcccggtgaccacggaactcaccgtctgggggaggaggagagaaggaaggggtggggggcctggaaacttcgttctgtagagaactatttttgtttgtattcactgtcccctgcaagggggacggggcgggagcactggtcaccgcgggggccgatggtggagaatccgaggagtaaagagtttgctcactgctgcctccacggcctgttttctttctgtgttggggacggtgggcaggtgtggggcttacagaggaatccacaacacagccttaaagaaacggtttccctactggggccaccatttccctgggcctttctgtggattccagcaggcagtgccccctccccgcaggcttggctggcagagttttccaccccgcggccaggctgcaggtgccccacctgttaggagcctccccacactgaaaggctgcctccctcctttcccaaaaaagaaatccggagtgtattggcccttttctacagaagtccaagggaaatgactcagggagaatcctagcagaggttgaatccaatgctctgatttatactgtgtctcggtggccacctccgatggatgtgtcatctcagacctgttgcagccggagcctcaagtccaatatcagatgaagctgaacccacaattcggccaccgcctccttccagagtttcagatggccaggtgggcagaggcgggcagtgcagagaccccagacgtgccggccctgtcctccctaccttctcaagattaggaaggggtgctggaggggacaggggcagcttgggagtggtgaggaagctcctagattcggggctcatcccctggggcctctgattcagaggatccagcagttctcccatctccgcttggtgtctccagccctggggccacacttccccctcggtccagcctcctgtccacctatgtttatttcagagcagtgccgggggtccggtcctggttgctaactgctgccactgctccacctgcaggtgctcccagcactggcttctgccaccacacctgttctttcccagctgcgaggtttagacctgggtccttcccttgagtccccaaagctaagctaagaccaagtggaacaaacttggccttggggacagcaggagattacaacacagaaaaggagggggaggcacaacgggacactgcataggactcacagtgtcccgagcccacacaccagcccctcctggcctcctctctctgctcccacccccagcaccctgctgacccggaagtgccttccgacaggccctgcatcctcctgcagctggcccatctctaccctcacattcttccttacgcacagaaccccactgcctgggacccaaagtgcccagataaaataaaacacctctctggggcttcttgtggataggagtggccaggggacacagctctgggcagtgagatgtaagcaggactgatgggtgggcttccagaaagttcttaaaagtcatcccttcctccacgccccacaaagcctcagttgtccaagtttgtggctctggtttttctctctcatccctccctctgctcttcagtcagcaggatggggaaggagccttcttgagacactgagcataacagtgtcaccctcaggatagtgaagggtggagccgggggtggaagttgcagagcctgggacacctgccttggctgcaacctctgcactgcttttatttatctacttatttttatagagttgaggtctcactatgttgcccaggctggtctcaaactcctaggctcaagtgagcctccggccttggcctcccgaagtgctgagattacaggcatgagccaccgcaccacctgcctgtcttactgtgtgagaaaaaaaataaacggtgatgtgattaaaacactagaa

SEQ ID NO: 14350 - DNA, 735 bp, Homo sapiens
  source 1..735: mol_type = unassigned DNA
gcgacccctctagttgcccagagaggggaaggggctgacccaggccacaccagtgccagggcggggaaggtggggctgggacgtgtttgatcccaaggaaggaagccagagtcttctctccaggcctggccaccctgggaagtccccacctgccgtccagccgcgggctcacgtggacccagtgtggggagcatcccctggggagtgtggagatgctccctgcgaggccgggagagtgggggtccgagaagacggcgcccacacgtagccctgaccgcgcgcccgtgcccgtgtccgtccagagtgtaactgcaaccagataggctccgtgcacgaccggtgcaacgagaccggcttctgcgagtgccgcgagggcgcggcgggccccaagtgcgacgactgcctccccacgcactactggcgccagggctgctaccccaacgtgtgcgacgacgaccagctgctgtgccagaacggaggcacctgcctgcagaaccagcgctgcgcctgcccgcgcggctacaccggcgtgcgctgcgagcagccccgctgcgaccccgccgacgatgacggcggtctggactgcgaccgcgcgcccggggccgccccgcgccccgccaccctgctcggctgcctgctgctgctggggctggccgcccgcctgggccgctgagccccgcccggaggacgctccccgcacccggaggccgggggtcccggggtcccggggcgggg

SEQ ID NO: 14351 - DNA, 358 bp, Homo sapiens
  source 1..358: mol_type = unassigned DNA
acctgaggcacggtggtgcctggtgggaactacgagaaagaccgagctggggttggttggaaagccaacgtgtgcgacgacgaccagctgctgtgccagaacggaggcacctgcctgcagaaccagcgctgcgcctgcccgcgcggctacaccggcgtgcgctgcgagcagccccgctgcgaccccgccgacgatgacggcggtctggactgcgaccgcgcgcccggggccgccccgcgccccgccaccctgctcggctgcctgctgctgctggggctggccgcccgcctgggccgctgagccccgcccggaggacgctccccgcacccggaggccgggggtcccggggtcccggggc

SEQ ID NO: 14352 - DNA, 3984 bp, Homo sapiens
  source 1..3984: mol_type = unassigned DNA
cgcagcccggatcagaccgagagataaaagccccgatggtgatcacaagtcagaccccaggtacctggatggattgagagctgagatctcagcaactttctgatctgtccatcagcagtctgagaaacgctggctctgaattttccgtgtcggccttttggaaacaacaagttcctcgctgtttgcaaagcttcagtgctcgggtccctgggacaccccggccaccctcgcctggtagatgtggcatttccatgctgaggccgcgagtcccgcctgaccccgtcgctgcctctccagggcttctctgggccgcgcctctgcagactgcgcagccatgctgcatctgctggcgctcttcctgcactgcctccctctggcctctggggactatgacatctgcaaatcctgggtgaccacagatgagggccccacctgggagttctacgcctgccagcccaaggtgatgcgcctgaaggactacgtcaaggtgaaggtggagccctcaggcatcacatgtggagacccccctgagaggttctgctcccatgagaatccctacctatgcagcaacgagtgtgacgcctccaacccggacctggcccacccgcccaggctcatgttcgacaaggaggaggagggcctggccacctactggcagagcatcacctggagccgctaccccagcccgctggaagccaacatcaccctttcgtggaacaagaccgtggagctgaccgacgacgtggtgatgaccttcgagtacggccggcccacggtcatggtcctggagaagtccctggacaacgggcgcacctggcagccctaccagttctacgccgaggactgcatggaggccttcggtatgtccgcccgccgggcccgcgacatgtcatcctccagcgcgcaccgcgtgctctgcaccgaggagtactcgcgctgggcaggctccaagaaggagaagcacgtgcgcttcgaggtgcgggaccgcttcgccatctttgccggccccgacctgcgcaacatggacaacctctacacgcggctggagagcgccaagggcctcaaggagttcttcaccctcaccgacctgcgcatgcggctgctgcgcccggcgctgggcggcacctatgtgcagcgggagaacctctacaagtacttctacgccatctccaacatcgaggtcatcggcaggtgcaagtgcaacctgcacgccaacctgtgctccatgcgcgagggcagcctgcagtgcgagtgcgagcacaacaccaccggccccgactgcggcaagtgcaagaagaatttccgcacccggtcctggcgggccggctcctacctgccgctgccccatggctctcccaacgcctgtgccactgcaggttcctttggcaccttgcaaacccctccccctgggaggtcgccatctgctctgcgaggcagcaggagaggactggccaatgtcaaagagccagccgggagcagaccccaaatctcagagatgcttctggggtgcaccgtcaccctccaccagggctctgtggggccccacatcccacccaagttgtccctcccggacccagggggcccctggctgggaagccagtgagccgagagggcgccagaaagaagctggaccctgcagggacgctggtctgcacagccgtcgtaagttgcttctctgtggtgtccccaccccggcaaccccccaaccctctcttgcttttcccatctctcaccaggcatcagcaggtcccagaaagaccccgaccccaaaggccctgtggccactgcggccaccacagccatgacaggggcccctactactcctgtcccctccacgtccactgcctgggcccccatggcgcccagcaccccacagcccacaggtgggtgccagggtacagcgacccctgtcatcccaccctctcctgcttctagcctgggtccctgcctctcttggggtgggagggtcggcagccctgggcagagagcaggggcttggctcttagaatagagacgctagaaccctagagctgggaggccacaggccaaaggggcttgaggacacctgggtcaacctgttcctgagcccagccaggggattcagggatcagttcagcttccaaagtcgtcttcctcctgcccttcaagccattgcttggaagggctcccagaccattgtggccagacggctgcaggaactgagaggaaaggtgctgggggcagcgaggccatcctgacatgcagccaaagactggccttatctcccaatggtgcttctgcctccgtggtccctggagccccgcccacaccctgtccccacctggcccccagggcctctctgtccttagcccctcagcagcacaccggtgggatggatggagcagggttagcccagaaagcaaatgtctctgatcagcagggcaaagggagcctctggagctgagtttggacaccgtgggctgctgggaatgtggaggctgtgtgtgtagtgcaaggccaggccagggccagacgtcctgccccctcaggggtctgccacagacaggcatggaaacctgattctcgctcccctccaacggagggattcacgtgtattcaaggctgggggtgctggagtgggcctctgctctcacctggactcacctggggagtatccctgcactctgtgcagtgcaggtgccaggggtctgaaaggatttatccttcccagagggcaccaggaagacgatgaccaaggggaattcttcctggtcccagccagggaggggtgctccaatagcctgccacaccctgtcccccgccaccctgcagggaggacctggtggggactcctggccccttgggtagtgccctggccctccatctctctgatccaaggagacctgccccactgatccttcccccttggggggtggcatttctaaagggcagagtcccctccatcagctcctgcctcggcctgttgctgggtggacactcaggctccccagacaggggcaaatgctgagagaaagacctcctccttcctaggccatccagagcagctcccctgggggcagcacaccccacctctttctacatccttccttttctgcaggaggcatttacaggaggcaggggctagccaaaagattggaggatttccgggaagcctcctgacccaggaatcctctttggggtggaagacatgggtcactctgagaattctggacttcagacataggttggcccagccacaagggacctgtgctttgctgctgagcctgtggtgggcagacagaagcaaaaacagtggtggtgggtgctgtgcctgtctccaaacaggggtttggctgggaggccagatactctccatatcacatgtgcaagtgcacacatgcacacacacacatgcatgcacacacacaggcatgcacacgcacatgtacacacacacacacacagaggaatccatttgcagagctgcttctgacttggtgccagggcagccgtgggaggctgggcagattgtgcaaagttgggaattaaagaggaaaagtcagaggccagagtgggaaatgcaggggaggtgagggtccccaggaccccctcagtgagcagaaggcacaccctccctctcggcaagacagtgctgctctgcaccctcagccctgtatcaagaagcaggacattaggggaggaggtggctccaatgtgacagccagtggcccctacagcccacatctaggggctcctccctcctcttcagcaactgaagcccctgtccagagcccccattaatgaaaacgatcattgcagtagctgagggtgagttctcctgggctgtgctcgtatcattgtatcatcatatcattgtattctgggctcacagctccgtgagatggaggctgttattttcctagtcccacaggtgaggggatcgaggcttaggaagaagcagctggattttatgatatgtaaattacacctcaatcaagctgtttc

SEQ ID NO: 14353 - DNA, 4132 bp, Homo sapiens
  source 1..4132: mol_type = unassigned DNA
caagctcgccccgcgcagcccgagccgggctgggcgctgtcctcgggggcctggggaaccgcgcggtttggagatcggaggcacctggaacccgtggcaagcgccgagccgggagacagcccgaggaaccacgggttctggagctaggagccggaagctgggagtccggaggagagcggagcccggagcccggagcccggggcggcgcgtctgggtctggcgcttcccgactggacggcgcgcccgctggtcttcgccacgcgccctcccctgggctcccgttcatcggtccccgcctgagacgcgcccactcctgcccggacttccagccccggaggcgccggacagagccgcggactccagcgcccaccatgcgcctcaacagctccgcgccgggaaccccgggcacgccggccgccgaccccttccagcgggcgcaggccggactggaggaggcgctgctggccccgggcttcggcaacgcttcgggcaacgcgtcggagcgcgtcctggcggcacccagcagcgagctggacgtgaacaccgacatctactccaaggtgctggtgaccgccgtgtacctggcgctcttcgtggtgggcacggtgggcaacacggtgacggcgttcacgctggcgcggaagaagtcgctgcagagcctgcagagcacggtgcattaccacctgggcagcctggcgctgtccgacctgctcaccctgctgctggccatgcccgtggagctgtacaacttcatctgggtgcaccacccctgggccttcggcgacgccggctgccgcggctactacttcctgcgcgacgcctgcacctacgccacggccctcaacgtggccagcctgagtgtggagcgctacctggccatctgccaccccttcaaggccaagaccctcatgtcccgaagccgcaccaagaagttcatcagcgccatctggctcgcctcggccctgctggcggtgcctatgctgttcaccatgggcgagcagaaccgcagcgccgacggccagcacgccggcggcctggtgtgcacccccaccatccacactgccaccgtcaaggtcgtcatacaggtcaacaccttcatgtccttcatattccccatggtggtcatctcggtcctgaacaccatcatcgccaacaagctgaccgtcatggtacgccaggcggccgagcagggccaagtgtgcacggtcgggggcgagcacagcacattcagcatggccatcgagcctggcagggtccaggccctgcggcacggcgtgcgcgtcctacgtgcagtggtcatcgcctttgtggtctgctggctgccctaccacgtgcggcgcctcatgttctgctacatctcggatgagcagtggactccgttcctctatgacttctaccactacttctacatggtgaccaacgcactcttctacgtcagctccaccatcaaccccatcctgtacaacctcgtctctgccaacttccgccacatcttcctggccacactggcctgcctctgcccggtgtggcggcgcaggaggaagaggccagccttctcgaggaaggccgacagcgtgtccagcaaccacaccctctccagcaatgccacccgcgagacgctgtactaggctgtgcgccccggaacgtgtccaggaggagcctggccatgggtccttgcccccgacagacagagcagcccccacccgggagccttgatgggggtcaggcagaggccagcctgcactggagtctgaggcctgggacccccccctcccaccccctaacccatgtttctcattagtgtctcccgggcctgtccccaactcctccccacccctcccccatctcctctttgaaagccagaacaagagagcgctcctctcccagataggaaaagggcctctaacaaggagaaattagtgtgcggcaaaaggcagttttctttgttctcagactaatggatggttccagagaaggaaatgaaaggtgctgggtggggccgggcctccggcggcccggctgctgttcccatgtccacatctctgaggcctgcaccccctctgtctagctcggggagtccagccccagtcccgcaggctccgtggctttgggcctcacgtgcagaccctgccatgcagacccatgcccccctcccccaggcagctccaagaaagctccctgactcgccccttcaggcctggcaagctgggggcccatcgccgtggggagtccctcccaccaccctcgccgcaggcagctgcagcccccagaggggaccacaagcccaaaaaggacaaaaatgggctggcctggaatggcccagaccccagcctcccctcctccctcccatcctcacccaggccaaggcccaggggctctgccaggacaccacatgggagggggctcaggcctcagcctcaagatcttcagctgtggcctctcgggctcggcagaagggacgccggatcaggggcctggtctccagcacctgcccgagtggccgtggccaggatggggtgcgcattccgtgtgctttgcttgtggctgtgcaggctgaggtctggagccaggcccagagctggcttcagggtggggccttgagaaggggaatgtgggacaggggcgatggtgcctggtctctgagtaagatgccaggtcccaggaactcaggcttcaggtgagaaggagcggtgtgtccaggcaccgctggccggcagccctgggctgaggcacagactcatttgtcaccttctggcggcggcagccctggccccggcctccaagcagttgaaaaagctggcgcctccttggtctctaggatccaggctccacagagcacatgactagccaggcccctggcttaagaaggtcgcctaagcctaagagaagacagtcccaggagaagctggccgggaccagccaggagctgggagccacaggaagcaaaagtcagccttttcttcaagggatttccctgtctcagagcagcctttgccccagggaaatgggctctgggctggctgcctgcaccggccatgtcgacccaggacccggacacctggtcttgggctgtgttcagccactttgccttctctggactcagtttccccgtctgagaaatgagagtcgaatgctacagtatctgcagtcgcttggatctggctgttgagttgacgggttccttgaaccccacaaaatccctctccaaccacaggacccttcggctcaccaagaacagggcccaggggagtcaggcctattcgctgcacttcctgccaaactttgcccccacaagcctggtcatcagccaggcagccctcccagtgcccaagggccaccaaccccagggaaacagggccagcacagaggggccttcctcccccacagagcccccatgacatagtctgctctgggcggaagagctttgctgccagccagggatgtccagaggtcagtgcagcccctacccctgctcaggagtgggctcagagtctagcaaatgctaaggcccctcaggctgggctctgaacgaggacctggactcagagccagacagggcagcctcagacccttctctggggctcctggaccttgggccataatttctgagcctcggtttccccatctaaggaacagatgtggtcgttccgccctctcagctggatgagactgtcctggaggatccaccccggaacagacagaatggtgtctctcaggatggtgctctgagagagggcagagtggatgccccactgccctagaccctcggtagacgtggggtctctggggcggggtctgtggctgtgactgaagtcggcttttcccgttgatgtcttgatgctcctatctgtgcacttaccgtaggtagggacacgtgtccacgcaccacagacacacccacgacacctgatctcgtatcactagcttgcggccaggtcatgatgtggccccggaagctggccctgcgtgccatgagtgcgtcggtcatggagtccggagcccctgagccggcccctggtgacggcacagccctcacagctcaaacgcccacccccactcccaccatctgcaggtggtgaaaacaaaccccgtgtatctctcaataaaggtggccgaagggcctcgatgtgga

SEQ ID NO: 14354 - DNA, 2950 bp, Homo sapiens
  source 1..2950: mol_type = unassigned DNA
acggagctctcagggctggcgaagcccacagcagggcaacgcccatcctatcggaaccctgaggaccagccccagctcaggacggctggcttgccaacatccaaggtgcagtggtcatcgcctttgtggtctgctggctgccctaccacgtgcggcgcctcatgttctgctacatctcggatgagcagtggactccgttcctctatgacttctaccactacttctacatggtgaccaacgcactcttctacgtcagctccaccatcaaccccatcctgtacaacctcgtctctgccaacttccgccacatcttcctggccacactggcctgcctctgcccggtgtggcggcgcaggaggaagaggccagccttctcgaggaaggccgacagcgtgtccagcaaccacaccctctccagcaatgccacccgcgagacgctgtactaggctgtgcgccccggaacgtgtccaggaggagcctggccatgggtccttgcccccgacagacagagcagcccccacccgggagccttgatgggggtcaggcagaggccagcctgcactggagtctgaggcctgggacccccccctcccaccccctaacccatgtttctcattagtgtctcccgggcctgtccccaactcctccccacccctcccccatctcctctttgaaagccagaacaagagagcgctcctctcccagataggaaaagggcctctaacaaggagaaattagtgtgcggcaaaaggcagttttctttgttctcagactaatggatggttccagagaaggaaatgaaaggtgctgggtggggccgggcctccggcggcccggctgctgttcccatgtccacatctctgaggcctgcaccccctctgtctagctcggggagtccagccccagtcccgcaggctccgtggctttgggcctcacgtgcagaccctgccatgcagacccatgcccccctcccccaggcagctccaagaaagctccctgactcgccccttcaggcctggcaagctgggggcccatcgccgtggggagtccctcccaccaccctcgccgcaggcagctgcagcccccagaggggaccacaagcccaaaaaggacaaaaatgggctggcctggaatggcccagaccccagcctcccctcctccctcccatcctcacccaggccaaggcccaggggctctgccaggacaccacatgggagggggctcaggcctcagcctcaagatcttcagctgtggcctctcgggctcggcagaagggacgccggatcaggggcctggtctccagcacctgcccgagtggccgtggccaggatggggtgcgcattccgtgtgctttgcttgtggctgtgcaggctgaggtctggagccaggcccagagctggcttcagggtggggccttgagaaggggaatgtgggacaggggcgatggtgcctggtctctgagtaagatgccaggtcccaggaactcaggcttcaggtgagaaggagcggtgtgtccaggcaccgctggccggcagccctgggctgaggcacagactcatttgtcaccttctggcggcggcagccctggccccggcctccaagcagttgaaaaagctggcgcctccttggtctctaggatccaggctccacagagcacatgactagccaggcccctggcttaagaaggtcgcctaagcctaagagaagacagtcccaggagaagctggccgggaccagccaggagctgggagccacaggaagcaaaagtcagccttttcttcaagggatttccctgtctcagagcagcctttgccccagggaaatgggctctgggctggctgcctgcaccggccatgtcgacccaggacccggacacctggtcttgggctgtgttcagccactttgccttctctggactcagtttccccgtctgagaaatgagagtcgaatgctacagtatctgcagtcgcttggatctggctgttgagttgacgggttccttgaaccccacaaaatccctctccaaccacaggacccttcggctcaccaagaacagggcccaggggagtcaggcctattcgctgcacttcctgccaaactttgcccccacaagcctggtcatcagccaggcagccctcccagtgcccaagggccaccaaccccagggaaacagggccagcacagaggggccttcctcccccacagagcccccatgacatagtctgctctgggcggaagagctttgctgccagccagggatgtccagaggtcagtgcagcccctacccctgctcaggagtgggctcagagtctagcaaatgctaaggcccctcaggctgggctctgaacgaggacctggactcagagccagacagggcagcctcagacccttctctggggctcctggaccttgggccataatttctgagcctcggtttccccatctaaggaacagatgtggtcgttccgccctctcagctggatgagactgtcctggaggatccaccccggaacagacagaatggtgtctctcaggatggtgctctgagagagggcagagtggatgccccactgccctagaccctcggtagacgtggggtctctggggcggggtctgtggctgtgactgaagtcggcttttcccgttgatgtcttgatgctcctatctgtgcacttaccgtaggtagggacacgtgtccacgcaccacagacacacccacgacacctgatctcgtatcactagcttgcggccaggtcatgatgtggccccggaagctggccctgcgtgccatgagtgcgtcggtcatggagtccggagcccctgagccggcccctggtgacggcacagccctcacagctcaaacgcccacccccactcccaccatctgcaggtggtgaaaacaaaccccgtgtatctctcaataaaggtggccgaagggcctcgatgtgga

SEQ ID NO: 14355 - DNA, 1569 bp, Homo sapiens
  source 1..1569: mol_type = unassigned DNA
agtgagagggagggagcgccggccgcgggagcgggatggaaaccagcagcccgcggcccccgcggcccagctccaacccggggctgagcctggacgcccggctgggcgtggacactcgcctctgggccaaggtgctgttcaccgcgctctacgcactcatctgggcgctgggcgcggcgggcaatgcgctgtccgcgcacgtggtgctgaaggcgcgggccgggcgcgcggggcgcctgcgccaccacgtgctcagcctggcgctcgcgggcctgctgctgctgctggtcggcgtgccggtggagctctacagcttcgtgtggttccactacccctgggtcttcggcgacctgggctgccgcggctactacttcgtgcacgagctgtgcgcctacgccacggtgctgagcgtggcaggcctgagcgccgagcgctgcctagccgtgtgccagcccctgcgtgcccgcagcctgctgacgccacgccggacccggtggctggtggcgctctcgtgggccgcctcgctcggcctcgccctgcccatggccgtcatcatggggcagaagcacgaactcgagacggcggacggggagccggagcccgcctcgcgagtgtgcacggtgctggtgagccgcaccgcgctccaagtctttatccaggtgaatgtgctggtgtccttcgtgctccccttggcactaactgctttcctgaatggggtcacagtgagccacctgctggccctctgctcccaagtgccgtccacttctaccccgggcagctccacccccagccgcctggagctgctgagtgaggagggtctcctcagcttcatcgtatggaagaagacctttatccagggaggccaggtcagcctggtgagacataaagacgtgcgccggatccgcagcctccagcgcagcgtccaggttctcagagccatcgtggtcatgtatgtcatctgctggctgccgtaccatgcccgcaggctcatgtactgctacgtacctgatgacgcgtggactgacccactgtacaatttctaccactacttctacatggtgaccaacacacttttctacgtcagctcagctgtgactcctcttctctacaacgccgtgtcctcctccttcagaaaactcttcctggaagccgtcagctccctgtgtggagagcaccaccccatgaagcggttacccccgaagccccagagtcccaccctaatggatacagcttcaggctttggggatcccccagaaacccggacctgaatgtaatgcaagaatgaacagaacaagcaaaatgaccagctgcttagtcacctggcaaagcaggtgagcaacctcatcactaatcattcaagcttcgcagccagggcgacttctatcaacccctgctctgctgagaaccatcaagcgcagggaagccacgtgacccctcctagcctcaggctccctcgtctgtgtagtggagataaagaacagcacccatctcttagtgttgcctgagactaaagtgcttagcacagaacctggtgcgtagtagatgctcaataaatttttgctggcacga

SEQ ID NO: 14356 - DNA, 821 bp, Homo sapiens
  source 1..821: mol_type = unassigned DNA
taggaattagggcagagttaggagcggcctgcggaggggcccgctcaggccgatgccggtagtggaaacagaggaagccaccgccgcgctcttctcggaactggctaaaatagctccgtaaatgggccgagcgcaacacggaggggataccgctcactaccagcttcccgaactttggcttaccctcagcttgagccagcgcacatctcctccttaacagcctctcctgagaataggctggcttcaaggaatgggggaagtgaatgatctcaaactacagaaatggcagtgaacttgtctgtttcaattcgggagtgggctgcttcctgattggctgtgattgggctttcactgtgcttgtgaacaccttcttcagcttccttcgacgcaaaacagactttttcattggaggagaagaagggatggcagagaagcttatcacacagactttcagccaccacaatcagctggcacagaagacccggcgggagaagagagcccggcaggaggccgagcggcgggagaaggcggagcgggcggccagactggccaaggaagccaagtcagagacctcagggccccagatcaaggagctaactgatgaagaggcagagaggctgcagctagagattgaccagaaaaaggatgcagagaatcatgaggcccagctcaagaacggcagccttgactccccagggaagcaggatactgaggaagatgaggaggaagatgagaaggacaaaggaaaactgaagcccaacctaggcaacggggcagacctgcccaattaccgctggacccagaccctgtcggagctggac

SEQ ID NO: 14357 - DNA, 1800 bp, Homo sapiens
  source 1..1800: mol_type = unassigned DNA
gtgtttccggctccgctgcggaaggcggacgactagagtcgttgggcccggcgcgacccgcaggagcgtagagagcgcgggactagagtgcagagctccgggacgtggatcggagccggcgcgatgggcggagagcaggaggaggagcggttcgacggcatgttgctggccatggctcagcagcacgagggcggcgtgcaggagcttgtgaacaccttcttcagcttccttcgacgcaaaacagactttttcattggaggagaagaagggatggcagagaagcttatcacacagactttcagccaccacaatcagctggcacagaagacccggcgggagaagagagcccggcaggaggccgagcggcgggagaaggcggagcgggcggccagactggccaaggaagccaagtcagagacctcagggccccagatcaaggagctaactgatgaagaggcagagaggctgcagctagagattgaccagaaaaaggatgcagagaatcatgaggcccagctcaagaacggcagccttgactccccagggaagcaggatactgaggaagatgaggaggaagatgagaaggacaaaggaaaactgaagcccaacctaggcaacggggcagacctgcccaattaccgctggacccagaccctgtcggagctggacctggcggtccctttctgtgtgaacttccggctgaaagggaaggacatggtggtggacatccagcggcggcacctccgggtggggctcaaggggcagccagcgatcattgatggggagctctacaatgaagtgaaggtggaggagagctcgtggctcattgaggacggcaaggtggtgactgtgcatctggagaagatcaataagatggagtggtggagccgcttggtgtccagtgaccctgagatcaacaccaagaagattaaccctgagaattccaagctgtcagacctggacagtgagactcgcagcatggtggaaaagatgatgtatgaccagcgacagaagtccatggggctgccaacttcagacgaacagaagaaacaggagattctgaagaagttcatggatcaacatccggagatggatttttccaaggctaaattcaactagcccctgttttttcctccctgaactcttggggctgagctgcaaccacccaactttctttcccactcttctctgggacttgtgggcctcagggcttggggcaggcatgggactggcccaggcacacaggtcccggggcatcaggagaaaggctgggtcttgggaccttgtcctccccagttggcctactgttacacattaaaacgatttgcccagctccttctgtgtcctctcttgcctctggcctttctctggggcacaggcctcttacggctgctgctgggaactgggagtttggcttctagcccagattctgccatgtgacctagggcacatccttgcccctctctgggcctcagtttctcattacttaaagattaaaacaaggcttggccgggtgtgatggttcatgtctgtaatcccagcactttgggaggctgaggggagcagatcacctgatgtcaggagtttgagaccagcttggccaacatggagaaacccagtctctactaaaaatacaaaaattagccgggtgtggtggtgcacacctgtaatcccagctactcgggaggctgaggcaggagaatcgcttgaacccgggtggcggaggttgcagtgagccgagattgcactacttcactccagcatgggtgacagagactccatctcaaaaaaataaataaa

SEQ ID NO: 14358 - DNA, 816 bp, Homo sapiens
  source 1..816: mol_type = unassigned DNA
gcaaattatcgcatccctgagcttaggatccccctttagtttcacatatgcccccacccccgtttccactttgatggcggcttccaaggagcatcccttagtaagaaccgtcgcaaatatcgtgatttggatccaccaaggcttggggcgagccgtcgaatgtgtgtggtaggggagcgggctgatgttagcacgtggtcttgttaggccttgaatgggggaataggaggcctgtgttcacgattagtttccaccacctaccaacttggaacctttacatctctccaagcctgagtttccttatctgtgagacagctgcgaataccggtttccagagagtagttaagaacccttgtgaacaccttcttcagcttccttcgacgcaaaacagactttttcattggaggagaagaagggatggcagagaagcttatcacacagactttcagccaccacaatcagctggcacagaagacccggcgggagaagagagcccggcaggaggccgagcggcgggagaaggcggagcgggcggccagactggccaaggaagccaagtcagagacctcagggccccagatcaaggagctaactgatgaagaggcagagaggctgcagctagagattgaccagaaaaaggatgcagagaatcatgaggcccagctcaagaacggcagccttgactccccagggaagcaggatactgaggaagatgaggaggaagatgagaaggacaaaggaaaactgaagcccaacctaggcaacggggcagacctgcccaattaccgctggacccagaccctgtcggagctggac

SEQ ID NO: 14359 - DNA, 607 bp, Homo sapiens
  source 1..607: mol_type = unassigned DNA
ctccctccaccctggatgaatatctccctttctgctttcttctttcccttatcacactgatttgtaactctttgcctctgtgtctcccctagctgcaggaagggcacagtcttgtacctctggatccagtgtaggcctgcaagggtctcaggtgcaggatgtggatgggagagagtttggttgtgaaagggttaaggggtgattcctggtgcacagagcaggccacctcccaccctctggttgttctcttcacagatcaataagatggagtggtggagccgcttggtgtccagtgaccctgagatcaacaccaagaagattaaccctgagaattccaaggtgagccctggctggttgggggagcttcagcaggaaggtgaggggcctcgttgtttccagagcttcaccgattcctgtcactgcctgccctcagctgtcagacctggacagtgagactcgcagcatggtggaaaagatgatgtatgaccagcgacagaagtccatggggctgccaacttcagacgaacagaagaaacaggagattctgaagaagttcatggatcaacatccggagatggatttttccaaggctaaattcaactagccc

SEQ ID NO: 14360 - DNA, 8256 bp, Homo sapiens
  source 1..8256: mol_type = unassigned DNA
gccctcgcagcgcagcagaagccacgggcttccttccgcgtaggaacctccttgctgcccttgtcgggctcttttgtctaagaccacctcaaggcaaagcccgtggggcagctgggtctggggaaaacagcccggggccgcgggggccgaacgagcacggaccggaagttccgcagccgcgccgtccggcggagccgttggctgcggacgccggaagtggccagtcggcaggtctgaggcggcgctgtgtgtgtgaagcgtacctagggcgggaggcgacatggagacaggggcggccgagctgtatgaccaggcccttttgggcatcctgcagcacgtgggcaacgtccaggatttcctgcgcgttctctttggcttcctctaccgcaagacagacttctatcgcttgctgcgccacccatcggaccgcatgggcttcccgcccggggccgcgcaggccttggtgctgcaggtattcaaaacctttgaccacatggcccgtcaggatgatgagaagagaaggcaggaacttgaagagaaaatcagaagaaaggaagaggaagaggccaagactgtgtcagctgctgcagctgagaaggagccagtcccagttccagtccaggaaatagagattgactccaccacagaattggatgggcatcaggaagtagagaaagtgcagcctccaggccctgtgaaggaaatggcccatggttcacaggaggcagaagctccaggagcagttgctggtgctgctgaagtccctagggaaccaccaattcttcccaggattcaggagcagttccagaaaaatcccgacagttacaatggtgctgtccgagagaactacacctggtcacaggactatactgacctggaggtcagggtgccagtacccaagcacgtggtgaagggaaagcaggtctcagtggcccttagcagcagctccattcgtgtggccatgctggaggaaaatggggagcgcgtcctcatggaagggaagctcacccacaagatcaacactgagagttctctctggagtctcgagcccgggaagtgcgttttggtgaacctgagcaaggtgggcgagtattggtggaacgccatcctggagggagaagagcccatcgacattgacaagatcaacaaggagcgctccatggccaccgtggatgaggaggaacaggcggtgttggacaggcttacctttgactaccaccagaagctgcagggcaagccacagagccatgagctgaaagtccatgagatgctgaagaaggggtgggatgctgaaggttctcccttccgaggccagcgattcgaccctgccatgttcaacatctccccgggggctgtgcagttttaatgaccagaaggaaaggaaaccctcgccggtggggaggcagagccttatcctcggctgcccttcttggctccctgcattccagggacttgctcgtcttgtttacccctagccatcctttctttcaagggtgaaccaggccttccaccctgaccttgcatctccagactgttccagagaaggtgcggggccagctgctatgtggtggccgctgtggctgacactgagtgaaggtgtttgaaatgcaggagaggatatcccagcaaattgggatcacatgcttttgtctccacagcaaccagccactgcaggcagcatgtctttcctcccctgctctctgcttgctgttgttttgacgctattctgcttgcatgtcttctggttgggatgtggagttgttgctggactctcaggcgaagctgaagtcattgaagtgtgtgaagctctgtgcttgcatgagggcaagcaaggaatggctgtgcctgaggctgctctgggaaactccttgccccttgacctcttttgagagcattcacgtggtcttcttgctcatccccttataaatgtgctttgcctgcctcagcctcatggtcagagcagtggagactggagccctgtttgcacgttctagttgttcggagaaagcctaggttctgggctcaggtccagatgcagcggggattctgttctctgactgtggcgaccttgctttggttcttgttgaagtgaaccaagcccggccaccacgcatggcatgctgtgcttggctccccataagacgtcctctttgggtgcacggtgtcaaagtgtgggcaggagtggagagctggtgccctcaggaggagaccacagcatgtccatcagctcagcagagctcgacagccacaagtcctgagaagctttgaccttgaagggcttctgggagaggaggaatttctgcatggggcgtgaaggcacactgtcccaccacaactgaaccagaagagagtgaagactcccctcttcccatcctctgtgccaggtgccagactgtgctccttggaacttatggcccaatcttacctgttctccagggactggtcactgcctcaggacccccaagcctatgccctgagccatggctgctgactgactccagccaaggtgcaaagacgagattatgagacaggtcctcaggcctgtgttccaagtactcacaggggctctgggtgcccatcgccgggagtatggttcagctgccaccggcactgtccatttgcctgtctgtcaagctcagagcatggataagccacacagcagggcagtgcaccctggcaccatgcacggccagcaagaatcaaggcccgcagatgctaagagggcctattgtcaggggaaggtccccgctcctgcacactctctatggatacttgggttgtgggggctctcttggagagtaagtttgtggtttgtttctggtttacagtggtggctgacaccccttgtaagaaagcattcctgggaagtcttctgtgggtccaaacatgttgctccgatcatcacaggagagcaaaaggccctagataccccctttggaatgtgagagtcttgttgtctgatatttgccactgagctggtgaagcccctctaaagagatctcgaccctggggagcagaattcttgtcatctatgaggggtcctgagaaagacttgtcattttttttcctggagttcttcccattgaggtcctaggatttgcacaccactgtcccacaagagctttcctgcctaatgaaaggaggtcttgtggtgtgtgtctcctctcttctctatagttcccgagttggcccccattgcagcccccaccctgtgggtagtcttccagaagtgatgcagtggtgtgagatgccctacaccttgttatttgggagactttgagagtcattcacttccatggtgactagtgtttgttttgcctgattttatattctgtgttgcatttctccccactccctgccctgctttaataaacagcaaaccaatatctaggaagaatgactgagggatagtattgggtattggccccatggcaggaacagccacttgcatctggtcccggtgccacactgcggtgcttggtgtggttgtggagcctgtccctgcgcgccttgctcccgttgagccacgctgtctggtgggtgattctctgccctgagccaccaccctggactggcccagtctccagagctggcacaccctgcctgttttctctttttagacacaacagccgcagtttggccagccactaagtcccaccagctgaggtccgaggaaagcggggtgactcatttcccttgtccagggcccgaggagagtgaggtgtccagcctgcaaagctattccagctccttggtgttggtttgcaataaattggtatttaagcagttctgggtctgcgtgtgacatttgctgctgagacagttctgtctgtgcatggtcattattgttgcattctagccttgaggtcccaggccaacgtacacagcaaacaccagcatggggaattcttaggggttgtttcccatctggtctgaatgcactgggcaagatctcaatacagctttagaaatcctgtaagattttgaccagtggggagaaaaagaatgtagctatagatcttacatcctttcaaacaggttctggaattctgtagttactggaaagcttagggtgagtgcagagttgggaatgattccactgaagggccacctttgcccaccaggctccaaggccctccttggtctccaggtgcatacctgctgttaactttgctgagccctcgcaatgggcttcctccaggacataacgccgtgtctgacacagaagtctcccaggtggctggccacctgcttcttcctcagtcagatctttgactctccttctctgtgcccaccccatctccagcctcctctgaccctgctcacccctggggacaggacctaggggtgtgagaagtacttggctgaataaagactgtttcaaaggcaatccttagaattgcctagcatactcccagggccagaaataacccgccagaaaggagaggcgtatttgcccctgaagagtgcaggagggagaacagttgagaagtgttttgtgtggaaatgtgtccaagaggcgtcagctgctgcacagagaactcactgcccagaacactgcgcttggggaacagacctcacccccacctcaaatctgctctccactgggcctgttggcagccagctcagctggggaagggacagcatgactcgctttgtcgatgaaaagcacgaagttgtcagcacagaacctggccagtccttgagaaactccctccttggtggtcagaggtcaagcagcccatgtggcccacggtcctgaagaactgggctatgtccctgaggctcctctctaccgtctgactgtggggtctggggaacaggcatttaaaccaggctgctgccctggggagtgcccactggacgccagggtgccccatagggacagggtcacaaagccctggggcttcccctgccagtcctggtgaggacagtgtggtcactatctcagagagacgaaaaatgaatattctgtcatttcagactaaactactcacccagctcacactaatatggatttgttaattttacctttttttttctttccaactttaggttcaagggttgttacatgggtaaattggatcataggggtttggtgtacagataattttgtcacccaggtaatcagcatgatacctgatatgtagtttttcagtcctcaccttcctcccactcggttttattttttagtactgaaagtttaacagattggtcttacctcagagggagggaagaaacccccccatcgctgggctccttggtgtgacaggggtctggtaggggttttcaatcccaccacccattcctccacaccaaatgcctgaagtccccactttgcacagggagacagcatcgtgccagggaagagaggtcaggcccggctacccctcacaacttcctgcttccccctcagagggtgatggggagaccagagcccatggcaggatgaactgtcactgaacccagctggcacaggtctgccagaacactctgggggtatgcgctgggctttctgggtaaacccctggcaagctggcgtttgctgtcttctcagtgctgatggagataggcacacatggggtgtgggaatgtggccaccctcaggcaggttcacgagggtactgtcaggcgctcaggtgtatgccgcctcctgtcaggcagggctgaggctattctccctggagaaggacagcttaggaaacacttgcaggaaagctgcctggacctgggaggtgaccctggccagcctccctgctgcctctctcagtcctaggccttcttccccagagctggtcagggcctgagggactttgtagtctaacccctcattgtgctacaatcacaggagtaagtaacactcccaaggccatgtggctggtgactcggggggcccaggtccaggatcctgccccatctgcaggccagtggttccttgtctcctatttgcttcttggagcagcctcctcataagccaacagctccttcacctgagcccagtcactttgcgctcctccccagaaccaaagagcaagaccatctgccccaggtacagtcctggccatgccacactctctgtggcatcatgaccaaggtgagtggcagatactgaaatcatccagggccactgcaggccccattcccagtggactgttcatcaagggaccctgtctcaggccatctcagccaaccttgttgcccagcacaggtctggcacattggagatgatctgtgttggatggggaaggcagagggaggatcctccagcattgatcacccatcaaaaccctcaacaacccagacattgccgctgcactgaccccatgctatgaggaggtcactcaggctgttaggagcctgctgactcaggcattgggctggggccctgcctgccttgtctgcctgccagcggagcactgccccaagcccttcttactgcagagacaggctcttgcctcccagtgtgcactttgtgcaagacacaggcaggtaagggtctaccagaggacaggaagtgttgttggggcactgtggggtttggaggaggcccctctagcagggaaagcgagccctaacctctgctggactagggagtttaggaagctgctctggttcagggaactggggatccagataactggggatcaaggccatcttgtgaccccagtggtggtccctagtgggactgctgagctccagcctgagagttcatgaactcaacagtgattgcttgtgggtactaatgacccagtgtgtggagacctcatttaccaggtgtgcctagcctgcaggcaaatcccaaggcagtgacccttagggaagagacagcgtttggggtcatcaaaggctgggaaacccaggtacctgtcagggaatgggctacagactggagctaagccttaaggtggggaagattccagcacccctgagtgaccacctcttttggtaatgcaaagaagggattttgtgactccagggtgacatttctaagcttggcatcatgcagggtgggcttgggctcaatatgggtgactgttagtctagggctgtctcaatgaggctgtccaggcagaaaggcttacacacctggcaggcagagggtctagagaggaaggggcaacaggcctaaggaggggacagccaggcaaggaggtagaataggccttgtctggacagtggtcacctgttaggtccacagcttgtcctccctggcctgaccagccaggtgaggagagatccaaaccatccacctgaaagcattcagggtgcctgatgacaagaccccagccactgtgggctctcatgtcctggtaggaaggtatacctaaagcaggtggacctggtagtggtggacgctgtctgcctccccggggcttgtctgtttatgccagaccgttttcccatttgcttccacctccagctcagagaggaatcaccttcacacctctgctaaaactaacccagctctgcacccaccattccccactgtgcaacacctgctactggagaaccctgccccctcaaatacacgtcatcctcagggccctgcgatgtgctgtggtctccctgccaccattcaaggggccacagccaggtccagcctgtcttccctggcaccaggctctatgcagtgggggaaactcgggcacccctaaactattctccagtgttctcaccagaggtggtcagccatgtgatggcaagagtcacttcttaagcttttgctatccccagaaacttaaagcaacaccaaccacacccaaaagtcaagtgatatccagacagcaacagtagagcattaactgagtgcagggccgtggtgactcctcgacactccaggctctcctgctggtaacctcccattggcagagccaggcactcagcaaagccctggacagtcagcagcctcctgaacaggctctgctgtccccactcacgacttcagagcagctaggactcctgtgaccacccctgtcccctgttcccccccaccccgccccgccccgccaactgcctcatctctgtcccaagataactgctctccagaattttccatgatatggtcattttaaaagttttttttttttttgagacagagtttttcctgtgttgcccagactggactcaaacctctgggctcaagtgatcctcctgcttcagcctcccaagtagctgggactgtaagtgtgcaccactgtgcctggcttgatggtgtcatttttcactgtacgtgtatttgtaaaccgtataaatcag

SEQ ID NO: 14361 - DNA, 314 bp, Homo sapiens
  source 1..314: mol_type = unassigned DNA
tgccatctccatggactgagaggtcgtgatagccctgccttaaaacactggccttgactctcctgccttccgttgggtgaactcagtgcagatcatggagcaggtcacgatgctctcaagttggttccctctgagcgaggagctcttgacacaacagccgcagtttggccagccactaagtcccaccagctgaggtccgaggaaagcggggtgactcatttcccttgtccagggcccgaggagagtgaggtgtccagcctgcaaagctattccagctccttggtgttggtttgcaataaattggtatttaagca

SEQ ID NO: 14362 - DNA, 3641 bp, Homo sapiens
  source 1..3641: mol_type = unassigned DNA
ggtgatctgagtgggcctgatctatcagctgaaagcctgaagagcgcagcagagctcccctgaagtagaagaaatttctccgatggacagcagctgcactcagtttctggagagttccacattggcctgctatgtggatttcagactggcctagccagcccccacaatcatgattcaggagcagttccagaaaaatcccgacagttacaatggtgctgtccgagagaactacacctggtcacaggactatactgacctggaggtcagggtgccagtacccaagcacgtggtgaagggaaagcaggtttcttttatgcctcctcagggaacaggtgtcaggctgtgggcctttgttcccctcagcaacaaacacaaaatttatttttcttcagctacaaacacccggtcacccccctttaaactacatcaggtcatgggtgagacccattgaagccccatccagtcctgagaggcaaagcaaagaacccaggtcacagcgatgaagtggacggccaggcctgtgtgctgtggggctcttccatggagcagggagccatgtcctataagtaccgcatgctaaccgattgcgccactggagccacaccatgtcatgatgtacctgtaacattcgcaacttgagtttcaaacactaaagtttctgaaacctccatctaatgagtttaaaaatggagtctccctgtgttgttcaggctggtcttaaactcctaggctcaagtaatccccctgcctcagactcccaaagtgctggaattacaggtctcagtggcccttagcagcagctccattcgtgtggccatgctggaggaaaatggggagcgcgtcctcatggaagggaagctcacccacaagatcaacactgagagttctctctggagtctcgagcccgggaagtgcgttttggtgaacctgagcaaggtgggcgagtattggtggaacgccatcctggagggagaagagcccatcgacattgacaagatcaacaaggagcgctccatggccaccgtggatgaggaggaacaggcggtgttggacaggcttacctttgactaccaccagaagctgcagggcaagccacagagccatgagctgaaagtccatgagatgctgaagaaggggtgggatgctgaaggttctcccttccgaggccagcgattcgaccctgccatgttcaacatctccccgggggctgtgcagttttaatgaccagaaggaaaggaaaccctcgccggtggggaggcagagccttatcctcggctgcccttcttggctccctgcattccagggacttgctcgtcttgtttacccctagccatcctttctttcaagggtgaaccaggccttccaccctgaccttgcatctccagactgttccagagaaggtgcggggccagctgctatgtggtggccgctgtggctgacactgagtgaaggtgtttgaaatgcaggagaggatatcccagcaaattgggatcacatgcttttgtctccacagcaaccagccactgcaggcagcatgtctttcctcccctgctctctgcttgctgttgttttgacgctattctgcttgcatgtcttctggttgggatgtggagttgttgctggactctcaggcgaagctgaagtcattgaagtgtgtgaagctctgtgcttgcatgagggcaagcaaggaatggctgtgcctgaggctgctctgggaaactccttgccccttgacctcttttgagagcattcacgtggtcttcttgctcatccccttataaatgtgctttgcctgcctcagcctcatggtcagagcagtggagactggagccctgtttgcacgttctagttgttcggagaaagcctaggttctgggctcaggtccagatgcagcggggattctgttctctgactgtggcgaccttgctttggttcttgttgaagtgaaccaagcccggccaccacgcatggcatgctgtgcttggctccccataagacgtcctctttgggtgcacggtgtcaaagtgtgggcaggagtggagagctggtgccctcaggaggagaccacagcatgtccatcagctcagcagagctcgacagccacaagtcctgagaagctttgaccttgaagggcttctgggagaggaggaatttctgcatggggcgtgaaggcacactgtcccaccacaactgaaccagaagagagtgaagactcccctcttcccatcctctgtgccaggtgccagactgtgctccttggaacttatggcccaatcttacctgttctccagggactggtcactgcctcaggacccccaagcctatgccctgagccatggctgctgactgactccagccaaggtgcaaagacgagattatgagacaggtcctcaggcctgtgttccaagtactcacaggggctctgggtgcccatcgccgggagtatggttcagctgccaccggcactgtccatttgcctgtctgtcaagctcagagcatggataagccacacagcagggcagtgcaccctggcaccatgcacggccagcaagaatcaaggcccgcagatgctaagagggcctattgtcaggggaaggtccccgctcctgcacactctctatggatacttgggttgtgggggctctcttggagagtaagtttgtggtttgtttctggtttacagtggtggctgacaccccttgtaagaaagcattcctgggaagtcttctgtgggtccaaacatgttgctccgatcatcacaggagagcaaaaggccctagataccccctttggaatgtgagagtcttgttgtctgatatttgccactgagctggtgaagcccctctaaagagatctcgaccctggggagcagaattcttgtcatctatgaggggtcctgagaaagacttgtcattttttttcctggagttcttcccattgaggtcctaggatttgcacaccactgtcccacaagagctttcctgcctaatgaaaggaggtcttgtggtgtgtgtctcctctcttctctatagttcccgagttggcccccattgcagcccccaccctgtgggtagtcttccagaagtgatgcagtggtgtgagatgccctacaccttgttatttgggagactttgagagtcattcacttccatggtgactagtgtttgttttgcctgattttatattctgtgttgcatttctccccactccctgccctgctttaataaacagcaaaccaatatctaggaagaatgactgagggatagtattgggtattggccccatggcaggaacagccacttgcatctggtcccggtgccacactgcggtgcttggtgtggttgtggagcctgtccctgcgcgccttgctcccgttgagccacgctgtctggtgggtgattctctgccctgagccaccaccctggactggcccagtctccagagctggcacaccctgcctgttttctctttttagacacaacagccgcagtttggccagccactaagtcccaccagctgaggtccgaggaaagcggggtgactcatttcccttgtccagggcccgaggagagtgaggtgtccagcctgcaaagctattccagctccttggtgttggtttgcaataaattggtatttaagca

SEQ ID NO: 14363 - DNA, 983 bp, Homo sapiens
  source 1..983: mol_type = unassigned DNA
gtctctgtcctgcttgtccccaggtgaacctgagcaaggtgggcgagtattggtggaacgccatcctggagggagaagagcccatcgacattgacaagatcaacaaggagcgctccatggccaccgtggatgaggaggaacaggcggtgttggacaggcttacctttgactaccaccagaagctgcagggcaagccacagagccatgagctgaaagtccatgagatgctgaagaaggggtgggatgctgaaggttctcccttccgaggccagcgattcgaccctgccatgttcaacatctccccgggggctgtgcagttttaatgaccagaaggaaaggaaaccctcgccggtggggaggcagagccttatcctcggctgcccttcttggctccctgcattccagggacttgctcgtcttgtttacccctagccatcctttctttcaagggtgaaccaggccttccaccctgaccttgcatctccagactgttccagagaaggtgcggggccagctgctatgtggtggccgctgtggctgacactgagtgaaggtgtttgaaatgcaggagaggatatcccagcaaattgggatcacatgcttttgtctccacagcaaccagccactgcaggcagcatgtctttcctcccctgctctctgcttgctgttgttttgacgctattctgcttgcatgtcttctggttgggatgtggagttgttgctggactctcaggcgaagctgaagtcattgaagtgtgtgaagctctgtgcttgcatgagggcaagcaaggaatggctgtgcctgaggctgctctgggaaactccttgccccttgacctcttttgagagcattcacgtggtcttcttgctcatccccttataaatgtgctttgcctgcctcagcctcatggtcagagcagtggagactggagccctgtttgcacgttctagttgttcggagaaagcctaggttctgggctcag

SEQ ID NO: 14364 - DNA, 779 bp, Homo sapiens
  source 1..779: mol_type = unassigned DNA
acttgagcttcacgtggttgtggaggtatgagagcatgagtgatgcactagtagtactggggccggctagcttgccctctgaaggtgcagccctggccgcctgtattacactagtgagcccgtgatcctggggttgccatctccatggactgagaggtcgtgatagccctgccttaaaacactggccttgactctcctgccttccgttgggtgaactcagtgcagatcatggagcaggtcacgatgctctcaagttggttccctctgagcgaggagctcttggtgaacctgagcaaggtgggcgagtattggtggaacgccatcctggagggagaagagcccatcgacattgacaagatcaacaaggagcgctccatggccaccgtggatgaggaggaacaggcggtgttggacaggcttacctttgactaccaccagaagctgcagggcaagccacagagccatgagctgaaagtccatgagatgctgaagaaggggtgggatgctgaaggttctcccttccgaggccagcgattcgaccctgccatgttcaacatctccccgggggctgtgcagttttaatgaccagaaggaaaggaaaccctcgccggtggggaggcagagccttatcctcggctgcccttcttggctccctgcattccagggacttgctcgtcttgtttacccctagccatcctttctttcaagggtgaaccaggccttccaccctgaccttgcatctccagactgttccagagaaggtgcggggccagctgcta

SEQ ID NO: 14365 - DNA, 613 bp, Homo sapiens
  source 1..613: mol_type = unassigned DNA
acttgagtttcaaacactaaagtttctgaaacctccatctaatgagtttaagtctcagtggcccttagcagcagctccattcgtgtggccatgctggaggaaaatggggagcgcgtcctcatggaagggaagctcacccacaagatcaacactgagagttctctctggagtctcgagcccgggaagtgcgttttggtgaacctgagcaaggtgggcgagtattggtggaacgccatcctggagggagaagagcccatcgacattgacaagatcaacaaggagcgctccatggccaccgtggatgaggaggaacaggcggtgttggacaggcttacctttgactaccaccagaagctgcagggcaagccacagagccatgagctgaaagtccatgagatgctgaagaaggggtgggatgctgaaggttctcccttccgaggccagcgattcgaccctgccatgttcaacatctccccgggggctgtgcagttttaatgaccagaaggaaaggaaaccctcgccggtggggaggcagagccttatcctcggctgcccttcttggctccctgcattccagggacttgctcgtcttgtttacccctagccatccttt

SEQ ID NO: 14366 - DNA, 570 bp, Homo sapiens
  source 1..570: mol_type = unassigned DNA
attagcatttagatgcatttaaccatagactgggtaagatcaccaaggcagtgagggtggatggaggagacaaacctgagagcattccaggagcccttgtgaccggtgcagtaacccctcgattagacctgttgcttcatctctggtttgttcatggagtccggatgagcacctaaaatcctgtgtcattttgattcaggagcagttccagaaaaatcccgacagttacaatggtgctgtccgagagaactacacctggtcacaggactatactgacctggaggtcagggtgccagtacccaagcacgtggtgaagggaaagcaggtctcagtggcccttagcagcagctccattcgtgtggccatgctggaggaaaatggggagcgcgtcctcatggaagggaagctcacccacaagatcaacactgagagttctctctggagtctcgagcccgggaagtgcgttttggtgaacctgagcaaggtgggcgagtattggtggaacgccatcctggagggagaagagcccatcgacattgacaagatcaacaaggagcgctccatggccac

SEQ ID NO: 14367 - DNA, 811 bp, Homo sapiens
  source 1..811: mol_type = unassigned DNA
ggcgacatggagacaggggcggccgagctgtatgaccaggcccttttgggcatcctgcagcacgtgggcaacgtccaggatttcctgcgcgttctctttggcttcctctaccgcaagacagacttctatcgcttgctgcgccacccatcggaccgcatgggcttcccgcccggggccgcgcaggccttggtgctgcagttgtaccaggaccgtgtattctttgcattgtgaacaagactggggtctgtaaaataatgacaacaaagaccatctaactgtacatcttttaggtattcaaaacctttgaccacatggcccgtcaggatgatgagaagagaaggcaggaacttgaagagaaaatcagaagaaaggaagaggaagaggccaagactgtgtcagctgctgcagctgagaaggagccagtcccagttccagtccaggaaatagagattgactccaccacagaattggatgggcatcaggaagtagagaaagtgcagcctccaggccctgtgaaggaaatggcccatggttcacaggaggcagaagctccaggagcagttgctggtgctgctgaagtccctagggaaccaccaattcttcccaggattcaggagcagttccagaaaaatcccgacagttacaatggtgctgtccgagagaactacacctggtcacaggactatactgacctggaggtcagggtgccagtacccaagcacgtggtgaagggaaagcaggtctcagtggcccttagcagcagctccattcgtgtggccatgctggaggaaaatggggagcgcgtcctcat

SEQ ID NO: 14368 - DNA, 315 bp, Homo sapiens
  source 1..315: mol_type = unassigned DNA
cctggtcacaggactatactgacctggaggtcagggtgccagtacccaagcacgtggtgaagggaaagcaggtcatgggtgagacccattgaagccccatccagtcctgagaggcaaagcaaagaacccaggtcacagcgatgaagtggacggccaggcctgtgtgctgtggggctcttccatggagcagggagccatgtcctataagtaccgcatgctaaccgattgcgccactggagccacaccatgtcatgatgtacctgtaacattcgcaacttgagtttcaaacactaaagtttctgaaacctccatcta

SEQ ID NO: 14369 - DNA, 488 bp, Homo sapiens
  source 1..488: mol_type = unassigned DNA
cctttgaccacatggcccgtcaggatgatgagaagagaaggcaggaacttgaagagaaaatcagaagaaaggaagaggaagaggccaagactgtgtcagctgctgcagctgagaaggagccagtcccagttccagtccaggaaatagagattgactccaccacagaattggatgggcatcaggaagtagagaaagtgcagcctccaggccctgtgaaggaaatggcccatggttcacaggaggcagaagctccaggagcagttgctggtgctgctgaagtccctagggaaccaccaattcttcccaggagcactgctaggatttgctcatgatgcctgaggtataatggacacctgaaatgacagtctgttttaggtgactggattcacatcctcgctatgccgcttcctgaatgtattaccttgaacaagcagtataacctttctgtgtctcagttttcttctctataaaatgtaggtgataataat

SEQ ID NO: 14370 - DNA, 659 bp, Homo sapiens
  source 1..659: mol_type = unassigned DNA
tttgaagcgcggattggatgtcagcttattccgctgaggtgttcgctccggacgtcctgaggtttcagaagtagtaagccgactgttaagagccctactcagcacccgccagcgcgtacccctcacggtgctgggggccgctagtcagggagcgaaatccatgcaggccagacagaaggaaggacatttacagcaacagaaacgtgcatgccccagaactaccaaagacttgagctggcggggatgacggaggcattgtgttgatcaatgggtgtggtcgcttgtttgaaatgtgacttcccaggtcaaagactgtcaatgtagtgcttattaaaatttctatttgagcttaattccgtaccctccaggttaagtttattgtatgttggaaacgctgtcaatactcattcagtgaagttgactgggcacttttgaatgtagtggtattcaaaacctttgaccacatggcccgtcaggatgatgagaagagaaggcaggaacttgaagagaaaatcagaagaaaggaagaggaagaggccaagactgtgtcagctgctgcagctgagaaggagccagtcccagttccagtccaggaaatagagattgactccaccacagaattggatgggcatcaggaagtagagaaagtgcagcctcca

SEQ ID NO: 14371 - DNA, 9753 bp, Homo sapiens
  source 1..9753: mol_type = unassigned DNA
gcatgtgggcttcatttaaacagagcagagggggcggcgcgcggtcgccgcggtgctgctgctcagtgggagcgggtcttcgcaactgtctccgcgtggcgcgcgcctctagccgcccttcccctggcggctacggccggagggagcggaggcgagcgggagtcgggctccatggagagcggcggacaactgggcagaggcggagctttcatctcggcaccctggttccagtgacccgcgctagcgtcccgtcccgcccgcgtcggagcggccgccggccccgggactgaccggcctcgccgcacctcccgcaccgactagcgctcccgggcgctcctgcgcccgactcgccctcgcccccactccccggcggggtggcggcggccgggcccccacggcggcggccggagcagcagcagcagcagcaggagcccgcctctatgatgaagttcaagcccaaccagacgcggacctacgaccgcgagggcttcaagaagcgggcggcgtgcctgtgcttccggagcgagcaggaggacgaggtgctgctggtgagtagcagccggtacccagaccagtggattgtcccaggaggaggaatggaacccgaggaggaacctggcggtgctgccgtgagggaagtttatgaggaggctggagtcaaaggaaaactaggcagacttctgggcatatttgagcagaaccaagaccgaaagcacagaacatatgtttatgttctaacagtcactgaaatattagaagattgggaagattctgttaatattggaaggaagagagagtggttcaaagtagaagatgctatcaaagttctccagtgtcataaacctgtacatgcagagtatctggaaaagctaaagctgggttgttccccagccaatggaaattctacagtcccttcccttccggataataatgccttgtttgtaaccgctgcacagacctctgggttgccatctagtgtaagatagagagaactgggtaggcctctcccaccatgtgcagtctcatggggagaggcttctttcgtttcctcgtcaaacatctgattgacgcttgcaaactgtctgaatttgccatgcaaggttttcaaacaatttgcatgtttttcagatgctttcaaatctttttttaaaaaaatagtgtaaaatattttaataagccaaagccatgtggaatttttgtttagatgccttaactgtgccacaccccacaaccccctatattattttggttgtctatttctcacagcatattttcagttttttgtccatttgacatcagtctgtggtttattttgtcatcagattacttgtgggtatacctaccccaaaattgttttctcattcacagcattagcatattcagcaaatccatctgtggtgggaattaaaaatattattggtattaaagaaatccattcaccccaaaacttgttttacaggattacaattttaattcaaaatttccagatttgggctatttctgtatgatccaataacttattttgtcacagggcttaatttgccatttttggggatttgtcgactcattttgtctgaattttcacaactggtattatgtcactagctacctgatacggctatttcccttataactcaatagtaccttaacacaaagtataactctgtagagttggtgaatattttagggaaatattagcaaaatgcatgtagtaaagacatcttatgaaaactgtattcatggaatttgatttagcatgctcagttgccagttcccattatcgatactctttctttgcagaataccttagaaccgttatttccctcagtgtagattgctcttaaaatgtattcagttatttagtggcccccacaggagtggagtcttgaaatctaattctaaatgccagtcagtgatgatcgcatcacagttgagtgaaatggccttcctgttcagctgttagagactgaagattgttagggcaccttagaatgtctcatcttttctaggttgtcaacaggtactatttgtcacataactaactttcgaggcactggaacatacctgaactaagaattaaatcttttactttatactcacttaaaatcaagaatcccatctaaaacacataggtaccttatctgaaactcttgcacttccccaaccagggcagaaatgaggtgggagaagtttgactaaaatgagggatgggggaaagtaaaagatgtttttttttttttgagactcgctttgtcacccaggctggagtgcaatggcacaatctcaactcaccgcaacctccgcctcccgggttcaagcgattctcctgcctcagcctcccgagtagttgggattacaggcgcctgcctccatgcctggctaattttgtatttttagtagagacagggtttcttcatgttggtcaggctggtctcaaactcctaacctcgtgatccgcctgcctcgacctcccaaagtgctgggattacaggcatgagccaccatgcccagccaaagatcatttttttatatagacttcagccctttgtaaatattgtaactggggagtatagagtagaaaaaaagtatagttaaaacatttgttctacaaattaacctttaaaaatataattactgctaaaaatagagtgctgttacacttaaggaaaattagtgccattttggaaatgagatcttgtgccataaatacagctgaactgaatataaatgttcacaaattaatgctgtcaaaggaatgagtaaagcagaaaaacttttaaccagcaacatttcaagtacgtagtgtgatcaaacatgatcatccagaatttttatatttttttctttgtacagaggttacatattctgggtgttcttttataaaggaaacattttaaatcccacaaattgacactttctatcttcaatggactaagatttttttggtcagtaatctctgaaatttccttaaattatatacttaacatagcagagaaactggattgtttttgtatataagactgcttccacctgaaatgctgtcataagtactgggggggtgggggagtgcccatcttgtacatgatattcttagaggtaataaggtaatgatgcatgaatttattttataaactcttggactatgtatttgacatgtaaaatatgtacagtattaacgtcaaccatctctttaaagttagcctataaatattgttgtataattttctttggtcagaaacacttggactgaatagtgacactcggtaaggattttcagtgccatttagcaaaacgtctttagtctatgcaactagcaaaaatctgcataatgcaacaacacagttttcacacttcaaattttacatgaggggttcttcacgattctcctggaacccagtctagcaaaatgagaggaaaggccctagggagatttatttctgttaaatagttaactctgctgagtatgacaaatagtgtctactatctcaaccctccaaaatttgcagagtgttgggactgtcatttgtgattttttttttttttttttggtggggtagttgaataaaattgggcagctaaatttttcagttccatgtgcctcccaaataaaaaacagaaaataagtagtttttgtgaattgacttgcagacaaagtagaaactgtgctgcatgatgttattttgtaaacagatgacattttctgaccaggcacatgccatccaattttctgtcaatcacactgttgtataaagcagcagaactgaaggggaaaaatgattgttgtatacactgaattgctttgcatggtctcatttgagataattgatgtaagaatcctgacttttttatatttggaaacatcaaataaaaatggaaaaaatgatcatggctttaaaaaaaaaacaaaaacacacacacatgaactcagatttgcaaaccaggtttctgaaactttgggtaaggtgtatgcttttaactttgaaatgtataaacacccagcggaaacgtatacctttcagtgcatagtgcattgtgtgcttaccctgggttgtttaaacttgtgttcaaatattccccctccaagtgaaagcctgtcgggaattccacagtaacacctttactgttctcccattgatgatcatatacgttacctcttcctagcggtacatttgtatgatccttactactggaattaccgggttaaaaggaaatgcttaccactaagatgtcagtattctcctcatggatattttcagtctcaatgttgccagtctaatagtatagtatgtggttgctttactgctgttctccccacccccgtggagttgtgtcattattttaatgaatgtgagctcttgacttactctagaattctaatacagatactttctgcactagtatcacttttattattgcagttccatttaaaagcataactggctaagtcaccgccccacccgccgcattacatttcctaaaacatactgctgccaaagaccaactgtagaatccttaagtcctgttcaagtgtcacttcattttttattaggggtttcttagttggagggcatgagaaacttggccctttccaatgttgtcttcacattggagtataagaattctctataggactctttaatttttttttttttttggtagagatggggtcttgctgtgttgcccaggctggtctcaaactcctaggcttaagcagtcctccagcctcagccttctcaaagtgctaggatgattggcatgagccacctcgtctggcctgcaggtctttttaagcatttgctgttcaataataagcatcttctttatgcctagtatttgtgataagagcacaaaacaattttctaatctcaaagagcttatattctagtggggtagagataagtgatttatcttggtgtagttttggcttttttgtttgtttttttgagacagcatctcacactgtcgcccaggctggagtgcagtggtgcaatctcagcttactgtaacctccgcctgccaggttcaagcgattctcctgcctcatcctcccgaggagctgggatcacaggcgcctgccaccacgcccggctaatttttttgtatttttagtagagacggggtttcaccatattggccaggctggtctcaaactcctgacctcgtgatccgcctgcctcggcctccctaagtgctgggattatgggcgtgaaccaccgcacctggcctatcttggtgtttttacatccttcagtatttttcaaggttttacagcttttttatctatagacttataccatcttcaaaagcaatacaattttatttgtagacgtgatttcccccaccaaatgcacattttatggagctctaggacaaaagtcaggatgaaaagtaatctatcgctggtgctactttaataccttcctgactggtgccactggctaaattctagcagtacgatgagagggccattaaggcctatcttagcaagcaagacattatagcaaagacctaaacactcaaaggttcaacgtcttctagccagggaactattctctaattcttccaccttgatatgatttcagcaaattctgataacccggtattactcttaatgcatttttgtaacatttgacaaacatctcccaatatgtagactcccactctcctgatgctaatcagtatcagacaatggaagtaaattttcctgcttttctcaacttttcctcaaattcatgttagtgaagtactttcatttggccatcattatttatcaaccttaagaaacatgcctattgacgaagtaaatatactaggaattcaacgtatctacgggaatgtggacaaagacatataccaagacaaggcactagagtgaaaagccattaaaataaaatgctcagcagcaaaggatttgtaatggttaacttgcaatatatccatatggtgtaatattacagtcattagaaatgacatttgcgtaaggatctgagtggaaactgatacagcctgtcggagagctactgagtagtattttatcacagctgcatacataccctttcacccaacagttccactcctgggagtctagtcaacaaatggacaagttgcacaaccaagctatggtcaaatatgtgtgttgtaggatttatgaaactggtaccaatttaatattcaaatgtgattaagtcatggcaatctatttactggatactttgtggttaccaaagagctatgtgctgccacagggagtcctttcaatagtgattgaaaaaggcagaacactactagacagaactacctgttttatgcatgtattggcatacactgaaaaagcttagtcacttaaaatgaggttgtacagattgtagattttgtttttaaacgcctgtatggtttaaaaaatgttttgggaaatagacatgagcagggcagagaactacaacctacaggccaaaccccaccccactgcctgtttgtacggccaacaagtttaaaatttttttaatgttttaggtttttttttttttaaaaaaaatactatgcccatttgtttacaaatcgtctgtgggtgctttctcactacaatggcagaattcagtagttgagacagacctatggtccacaaaggccgaaatatttactgttttaggagaaaaaaacaacatgaattgtaataacttggacttacttggttgctcagtcctgatgtgtcctgttaaaacctaagagaaacagcaccaagttcaatctagtgcaatcagcctatcacatctaagctgcttttgccagatctgatatctactcccgaccttaagccaggagactttgtaaacttactaggttataataaaacttaagaactatcgatatttactaatctacatcatggaactatttcaaaagcagtcatatggtaagatggatcaggagtctttaaaaataaaactgagaaagaaaaatcatgtgatcaattcagtagtagagacagaggttggtatcaagtctatgttcatacacttaccagtgccacccagcagggccatacaagacacatgaaatgagatcagctcaagggtgacaagatgaaactgggagagggccggggagacccgaactcttaatattggattccacacaagaggaaaaattttagtccagctcccagcatggcagctaatggcaagttagtaccataaagccaactcttggaatatacctgacttccacgataaaatggagatgagtgcaggggtgagtgtatagttaagaaaacaaacaatatattactagtccaggtggtagatgacagatttttattatttacacttctctcaaattattacattcagcatgttttgctttttatgttatttaaagtataaaccctcatataattccctaagatgggtggcatgccaagtagctaaatgaaatatcatcccagcccaaaagtacttattcgaatgaaatattacatttttcttaaataaagcaataaattaggtaccctattatcatggtattttcttttttggccagcttttctagataaggttgtattgctactgcaactaacaaaaaagatgtggcagggctgggcacggtggctcacgcctgtaatcccagcactttgggaggccgaggcgggcagatcacgaggtcaggagatggagaccatcctggcccaacatggtgaaaccccgtctctactaaaaatacaaaaaattagccaggtgtggtggcaggtgtctgtagtcccagctcctcaggaggctgaggcaggagaatcgcttgaacgcgggaggcagaacctgcagtgagccaagatcatgccacagcactccagcctaaactacagagctagaaagtggctagagcagccaaaaaaaaaaaaaaaaaaaaaaaaaaaaaaggttcctgaaccattcaacagaaaaatgaggcctattcctatcatttcctcgatccaatttagttccacttaggtcactgtgtttataatgtcttttaggacagatttccttccccattctccatcaaacaaccatagcacctgtgacttttatctgttggtttgtatttaatcttatttttaagtgcttctttgaaattgttttacaagtacattcttggtctagagtaaggttctatatagttggccctccatatccatgggttccacttccgtggattcaaacaaccagacaaaatattccaaaaaacattgtgtctgtagtcaacatgtatatttttgtcattattccttaaacaatagtgtaactatttacatagcacttacattataataggtattataagtaatctaaatattaacataagcgggaggatttgtgtagattgtatgcatatacaacatcattttattccagagacttgagcatctgcgaatttggatatccaaaggaagtcctagaaccagttcccgacaaataccaagagatgactttactttagacctaagatcttgctagacagcctttgagaggatgaaggataactagagcagaagcaaatcgcagcgaagtagactacaacaatcaagtcaaaaaacataaagctcctatcaacacctcaagattttagaaaagcctcttaacgggcaattttcttttaaataaagactgggtcccactatgttagccaggctggtcacaaactcctggactcaagtgatcctcctgccttggcctcctaaagtgctgggattacaggcatgagccactgtgcccggcctgggcagtcgattttcaggaagccacttaatgttcagattcttttcttctctcccaggactttgcagatgctgctgttccctctgcctggagatgttcatctggcctgaatccaaaagtctgtccaagttacttctcttttccatgacagagttacaactatttgtctgtcccccttccccattagagtatatggtccccaaaggaaagccccatgccattcactcaccacctaatcatccccaacaactagtgggcaaacatgaaacacttttgttgaataatgtgtttcctttagcccagggattacaaagtcaaaggcttacaagggggaaggactagcaggtgtgctcggaggggactctagccaactggagagtaactggtgagaagacaatgacatgctcttagggtgtctgctactcagatcctctcagttaagtcccgtgcacaaaggtgggtcaggtctactgttgccagatcttcagatcattcaaaagttacccgaattctggattttcatgcaaatctcccaatttttaaaaatgttggcatcaaattcagaatgttttaaccagccacactgtgtgggccagggaaaacaggcccaaaggccaggtgaagctgcagttttcaactgctgccttggcctctcccagagccccttaagtcctaagaaggctcagtcaacacactggcactcgtttcatcccactggttgagaaagcaagtcttagcaaagtaatgggggagtcttaccaaaactgcaaaggaaaaaaatatgataccatgaaattagaaattcactgcatttgaaatgaaaatgacttatttctgtacttctataactcacaaatttagcagacatcatttagacatttttgtagtgcaacagatttaaatctggaatttcatggtttgtaaatcactatgtgatactagctataaccatgagcaatattacgggcagtaaatgttgatttctatttcgtttcttgaa

SEQ ID NO: 14372 - DNA, 4839 bp, Homo sapiens
  source 1..4839: mol_type = unassigned DNA
atttaaacagagcagagggggcggcgcgcggtcgccgcggtgctgctgctcagtgggagcgggtcttcgcaactgtctccgcgtggcgcgcgcctctagccgcccttcccctggcggctacggccggagggagcggaggcgagcgggagtcgggctccatggagagcggcggacaactgggcagaggcggagctttcatctcggcaccctggttccagtgacccgcgctagcgtcccgtcccgcccgcgtcggagcggccgccggccccgggactgaccggcctcgccgcacctcccgcaccgactagcgctcccgggcgctcctgcgcccgactcgccctcgcccccactccccggcggggtggcggcggccgggcccccacggcggcggccggagcagcagcagcagcagcaggagcccgcctctatgatgaagttcaagcccaaccagacgcggacctacgaccgcgagggcttcaagaagcgggcggcgtgcctgtgcttccggagcgagcaggaggacgaggtgctgctggtgagtagcagccggtacccagaccagtggattgtcccaggaggaggaatggaacccgaggaggaacctggcggtgctgccgtgagggaagtttatgaggaggctggagtcaaaggaaaactaggcagacttctgggcatatttgagaaccaagaccgaaagcacagaacatatgtttatgttctaacagtcactgaaatattagaagattgggaagattctgttaatattggaaggaagagagagtggttcaaagtagaagatgctatcaaagttctccagtgtcataaacctgtacatgcagagtatctggaaaagctaaagctgggttgttccccagccaatggaaattctacagtcccttcccttccggataataatgccttgtttgtaaccgctgcacagacctctgggttgccatctagtgtaagatagagagaactgggtaggcctctcccaccatgtgcagtctcatggggagaggcttctttcgtttcctcgtcaaacatctgattgacgcttgcaaactgtctgaatttgccatgcaaggttttcaaacaatttgcatgtttttcagatgctttcaaatctttttttaaaaaaatagtgtaaaatattttaataagccaaagccatgtggaatttttgtttagatgccttaactgtgccacaccccacaaccccctatattattttggttgtctatttctcacagcatattttcagttttttgtccatttgacatcagtctgtggtttattttgtcatcagattacttgtgggtatacctaccccaaaattgttttctcattcacagcattagcatattcagcaaatccatctgtggtgggaattaaaaatattattggtattaaagaaatccattcaccccaaaacttgttttacaggattacaattttaattcaaaatttccagatttgggctatttctgtatgatccaataacttattttgtcacagggcttaatttgccatttttggggatttgtcgactcattttgtctgaattttcacaactggtattatgtcactagctacctgatacggctatttcccttataactcaatagtaccttaacacaaagtataactctgtagagttggtgaatattttagggaaatattagcaaaatgcatgtagtaaagacatcttatgaaaactgtattcatggaatttgatttagcatgctcagttgccagttcccattatcgatactctttctttgcagaataccttagaaccgttatttccctcagtgtagattgctcttaaaatgtattcagttatttagtggcccccacaggagtggagtcttgaaatctaattctaaatgccagtcagtgatgatcgcatcacagttgagtgaaatggccttcctgttcagctgttagagactgaagattgttagggcaccttagaatgtctcatcttttctaggttgtcaacaggtactatttgtcacataactaactttcgaggcactggaacatacctgaactaagaattaaatcttttactttatactcacttaaaatcaagaatcccatctaaaacacataggtaccttatctgaaactcttgcacttccccaaccagggcagaaatgaggtgggagaagtttgactaaaatgagggatgggggaaagtaaaagatgtttttttttttttgagactcgctttgtcacccaggctggagtgcaatggcacaatctcaactcaccgcaacctccgcctcccgggttcaagcgattctcctgcctcagcctcccgagtagttgggattacaggcgcctgcctccatgcctggctaattttgtatttttagtagagacagggtttcttcatgttggtcaggctggtctcaaactcctaacctcgtgatccgcctgcctcgacctcccaaagtgctgggattacaggcatgagccaccatgcccagccaaagatcatttttttatatagacttcagccctttgtaaatattgtaactggggagtatagagtagaaaaaaagtatagttaaaacatttgttctacaaattaacctttaaaaatataattactgctaaaaatagagtgctgttacacttaaggaaaattagtgccattttggaaatgagatcttgtgccataaatacagctgaactgaatataaatgttcacaaattaatgctgtcaaaggaatgagtaaagcagaaaaacttttaaccagcaacatttcaagtacgtagtgtgatcaaacatgatcatccagaatttttatatttttttctttgtacagaggttacatattctgggtgttcttttataaaggaaacattttaaatcccacaaattgacactttctatcttcaatggactaagatttttttggtcagtaatctctgaaatttccttaaattatatacttaacatagcagagaaactggattgtttttgtatataagactgcttccacctgaaatgctgtcataagtactgggggggtgggggagtgcccatcttgtacatgatattcttagaggtaataaggtaatgatgcatgaatttattttataaactcttggactatgtatttgacatgtaaaatatgtacagtattaacgtcaaccatctctttaaagttagcctataaatattgttgtataattttctttggtcagaaacacttggactgaatagtgacactcggtaaggattttcagtgccatttagcaaaacgtctttagtctatgcaactagcaaaaatctgcataatgcaacaacacagttttcacacttcaaattttacatgaggggttcttcacgattctcctggaacccagtctagcaaaatgagaggaaaggccctagggagatttatttctgttaaatagttaactctgctgagtatgacaaatagtgtctactatctcaaccctccaaaatttgcagagtgttgggactgtcatttgtgattttttttttttttttttggtggggtagttgaataaaattgggcagctaaatttttcagttccatgtgcctcccaaataaaaaacagaaaataagtagtttttgtgaattgacttgcagacaaagtagaaactgtgctgcatgatgttattttgtaaacagatgacattttctgaccaggcacatgccatccaattttctgtcaatcacactgttgtataaagcagcagaactgaaggggaaaaatgattgttgtatacactgaattgctttgcatggtctcatttgagataattgatgtaagaatcctgacttttttatatttggaaacatcaaataaaaatggaaaaaatgatcatggctttaaaaaaaaaacaaaaacacacacacatgaactcagatttgcaaaccaggtttctgaaactttgggtaaggtgtatgcttttaactttgaaatgtataaacacccagcggaaacgtatacctttcagtgcatagtgcattgtgtgcttaccctgggttgtttaaacttgtgttcaaatattccccctccaagtgaaagcctgtcgggaattccacagtaacacctttactgttctcccattgatgatcatatacgttacctcttcctagcggtacatttgtatgatccttactactggaattaccgggttaaaaggaaatgcttaccactaagatgtcagtattctcctcatggatattttcagtctcaatgttgccagtctaatagtatagtatgtggttgctttactgctgttctccccacccccgtggagttgtgtcattattttaatgaatgtgagctcttgacttactctagaattctaatacagatactttctgcactagtatcacttttattattgcagttccatttaaaagcataactggctaagtcaccgccccacccgccgcattacatttcctaaaacatactgctgccaaagaccaactgtagaatccttaagtcctgttcaagtgtcacttcattttttattaggggtttcttagttggagggcatgagaaacttggccctttccaatgttgtcttcacattggagtataagaattctctataggactctttaatttttttttttttttggtagagatggggtcttgctgtgttgcccaggctggtctcaaactcctaggcttaagcagtcctccagcctcagccttctcaaagtgctaggatgattggcatgagccacctcgtctggcctgcaggtctttttaagcatttgctgttcaataataagcatcttctttatgcctagtatttgtgataagagcacaaaacaa

SEQ ID NO: 14373 - DNA, 531 bp, Homo sapiens
  source 1..531: mol_type = unassigned DNA
ctttcctccctcactcctttcctccctcacttcttccttcctttctctgggctgatagatgagacaaagggggctcgcccagccccagtttctccatctgggcactcgagaaggcgcctggtccccgggaaggtcccgggccgcctacgtggcgctcccatctggctgttcctgtactgaagttctcagtgctgctggtgagtagcagccggtacccagaccagtggattgtcccaggaggaggaatggaacccgaggaggaacctggcggtgctgccgtgagggaagtttatgaggaggctggagtcaaaggaaaactaggcagacttctgggcatatttgagaaccaagaccgaaagcacagaacatatgtttatgttctaacagtcactgaaatattagaagattgggaagattctgttaatattggaaggaagagagagtggttcaaagtagaagatgctatcaaagttctccagtgtcataaacctgtacatgcagagtatctggaaaagctaaagctgggttgtt

SEQ ID NO: 14374 - DNA, 3607 bp, Homo sapiens
  source 1..3607: mol_type = unassigned DNA
ctttcctccctcactcctttcctccctcacttcttccttcctttctctgggctgatagatgagacaaagggggctcgcccagccccagtttctccatctgggcactcgagaaggcgcctggtccccgggaaggtcccgggccgcgtaagtctcgcctagcgggagtcaccatcttaacgtgcgaattgagttgaaagccggataaacctcgagtgctcagcgagaggagggtggaaatggcgtgctgctggtgagtagcagccggtacccagaccagtggattgtcccaggaggaggaatggaacccgaggaggaacctggcggtgctgccgtgagggaagtttatgaggaggctggagtcaaaggaaaactaggcagacttctgggcatatttgagaaccaagaccgaaagcacagaacatatgtttatgttctaacagtcactgaaatattagaagattgggaagattctgttaatattggaaggaagagagagtggttcaaagtagaagatgctatcaaagttctccagtgtcataaacctgtacatgcagagtatctggaaaagctaaagctgggttgttccccagccaatggaaattctacagtcccttcccttccggataataatgccttgtttgtaaccgctgcacagacctctgggttgccatctagtgtaagatagagagaactgggtaggcctctcccaccatgtgcagtctcatggggagaggcttctttcgtttcctcgtcaaacatctgattgacgcttgcaaactgtctgaatttgccatgcaaggttttcaaacaatttgcatgtttttcagatgctttcaaatctttttttaaaaaaatagtgtaaaatattttaataagccaaagccatgtggaatttttgtttagatgccttaactgtgccacaccccacaaccccctatattattttggttgtctatttctcacagcatattttcagttttttgtccatttgacatcagtctgtggtttattttgtcatcagattacttgtgggtatacctaccccaaaattgttttctcattcacagcattagcatattcagcaaatccatctgtggtgggaattaaaaatattattggtattaaagaaatccattcaccccaaaacttgttttacaggattacaattttaattcaaaatttccagatttgggctatttctgtatgatccaataacttattttgtcacagggcttaatttgccatttttggggatttgtcgactcattttgtctgaattttcacaactggtattatgtcactagctacctgatacggctatttcccttataactcaatagtaccttaacacaaagtataactctgtagagttggtgaatattttagggaaatattagcaaaatgcatgtagtaaagacatcttatgaaaactgtattcatggaatttgatttagcatgctcagttgccagttcccattatcgatactctttctttgcagaataccttagaaccgttatttccctcagtgtagattgctcttaaaatgtattcagttatttagtggcccccacaggagtggagtcttgaaatctaattctaaatgccagtcagtgatgatcgcatcacagttgagtgaaatggccttcctgttcagctgttagagactgaagattgttagggcaccttagaatgtctcatcttttctaggttgtcaacaggtactatttgtcacataactaactttcgaggcactggaacatacctgaactaagaattaaatcttttactttatactcacttaaaatcaagaatcccatctaaaacacataggtaccttatctgaaactcttgcacttccccaaccagggcagaaatgaggtgggagaagtttgactaaaatgagggatgggggaaagtaaaagatgtttttttttttttgagactcgctttgtcacccaggctggagtgcaatggcacaatctcaactcaccgcaacctccgcctcccgggttcaagcgattctcctgcctcagcctcccgagtagttgggattacaggcgcctgcctccatgcctggctaattttgtatttttagtagagacagggtttcttcatgttggtcaggctggtctcaaactcctaacctcgtgatccgcctgcctcgacctcccaaagtgctgggattacaggcatgagccaccatgcccagccaaagatcatttttttatatagacttcagccctttgtaaatattgtaactggggagtatagagtagaaaaaaagtatagttaaaacatttgttctacaaattaacctttaaaaatataattactgctaaaaatagagtgctgttacacttaaggaaaattagtgccattttggaaatgagatcttgtgccataaatacagctgaactgaatataaatgttcacaaattaatgctgtcaaaggaatgagtaaagcagaaaaacttttaaccagcaacatttcaagtacgtagtgtgatcaaacatgatcatccagaatttttatatttttttctttgtacagaggttacatattctgggtgttcttttataaaggaaacattttaaatcccacaaattgacactttctatcttcaatggactaagatttttttggtcagtaatctctgaaatttccttaaattatatacttaacatagcagagaaactggattgtttttgtatataagactgcttccacctgaaatgctgtcataagtactgggggggtgggggagtgcccatcttgtacatgatattcttagaggtaataaggtaatgatgcatgaatttattttataaactcttggactatgtatttgacatgtaaaatatgtacagtattaacgtcaaccatctctttaaagttagcctataaatattgttgtataattttctttggtcagaaacacttggactgaatagtgacactcggtaaggattttcagtgccatttagcaaaacgtctttagtctatgcaactagcaaaaatctgcataatgcaacaacacagttttcacacttcaaattttacatgaggggttcttcacgattctcctggaacccagtctagcaaaatgagaggaaaggccctagggagatttatttctgttaaatagttaactctgctgagtatgacaaatagtgtctactatctcaaccctccaaaatttgcagagtgttgggactgtcatttgtgattttttttttttttttttggtggggtagttgaataaaattgggcagctaaatttttcagttccatgtgcctcccaaataaaaaacagaaaataagtagtttttgtgaattgacttgcagacaaagtagaaactgtgctgcatgatgttattttgtaaacagatgacattttctgaccaggcacatgccatccaattttctgtcaatcacactgttgtataaagcagcagaactgaaggggaaaaatgattgttgtatacactgaattgctttgcatggtctcatttgagataattgatgtaagaatcctgacttttttatatttggaaacatcaaataaaaatggaaaaaatgatcatggctttaaaaaaaaaacaaaa

SEQ ID NO: 14375 - DNA, 765 bp, Homo sapiens
  source 1..765: mol_type = unassigned DNA
acttcttccttcctttctctgggctgatagatgagacaaagggggctcgcccagccccagtttctccatctgggcactcgagaaggcgcctggtccccgggaaggtcccgggccgcgtgctgctggtgagtagcagccggtacccagaccagtggattgtcccaggaggaggaatggaacccgaggaggaacctggcggtgctgccgtgagggaagtttatgaggaggctggagtcaaaggaaaactaggcagacttctgggcatatttgagaaccaagaccgaaagcacagaacatatgtttatgttctaacagtcactgaaatattagaagattgggaagattctgttaatattggaaggaagagagagtggttcaaagtagaagatgctatcaaagttctccagtgtcataaacctgtacatgcagagtatctggaaaagctaaagctgggttgttccccagccaatggaaattctacagtcccttcccttccggataataatgccttgtttgtaaccgctgcacagacctctgggttgccatctagtgtaagatagagagaactgggtaggcctctcccaccatgtgcagtctcatggggagaggcttctttcgtttcctcgtcaaacatctgattgacgcttgcaaactgtctgaatttgccatgcaaggttttcaaacaatttgcatgtttttcagatgctttcaaatctttttttaaaaaaatagtgtaaaatattttaataagccaaagccatgtgg

SEQ ID NO: 14376 - DNA, 1419 bp, Homo sapiens
  source 1..1419: mol_type = unassigned DNA
acttcttccttcctttctctgggctgatagatgagacaaagggggctcgcccagccccagtttctccatctgggcactcgagaaggcgcctggtccccgggaaggtcccgggccgcgtaagtctcgcctagcgggagtcaccatcttaacgtgcgaattgagttgaaagccggataaacctcgagtgctcagcgagaggagggtggaaatggcgtgctgctggtgagtagcagccggtacccagaccagtggattgtcccaggaggaggaatggaacccgaggaggaacctggcggtgctgccgtgagggaagtttatgaggaggctggagtcaaaggaaaactaggcagacttctgggcatatttgagcagaaccaagaccgaaagcacagaacatatgtttatgttctaacagtcactgaaatattagaagattgggaagattctgttaatattggaaggaagagagagtggttcaaagtagaagatgctatcaaagttctccagtgtcataaacctgtacatgcagagtatctggaaaagctaaagctgggttgttccccagccaatggaaattctacagtcccttcccttccggataataatgccttgtttgtaaccgctgcacagacctctgggttgccatctagtgtaagatagagagaactgggtaggcctctcccaccatgtgcagtctcatggggagaggcttctttcgtttcctcgtcaaacatctgattgacgcttgcaaactgtctgaatttgccatgcaaggttttcaaacaatttgcatgtttttcagatgctttcaaatctttttttaaaaaaatagtgtaaaatattttaataagccaaagccatgtggaatttttgtttagatgccttaactgtgccacaccccacaaccccctatattattttggttgtctatttctcacagcatattttcagttttttgtccatttgacatcagtctgtggtttattttgtcatcagattacttgtgggtatacctaccccaaaattgttttctcattcacagcattagcatattcagcaaatccatctgtggtgggaattaaaaatattattggtattaaagaaatccattcaccccaaaacttgttttacaggattacaattttaattcaaaatttccagatttgggctatttctgtatgatccaataacttattttgtcacagggcttaatttgccatttttggggatttgtcgactcattttgtctgaattttcacaactggtattatgtcactagctacctgatacggctatttcccttataactcaatagtaccttaacacaaagtataactctgtagagttggtgaatattttagggaaatattagcaaaatgcatgtagtaaagacatcttatgaaaactgtattcatggaa

SEQ ID NO: 14377 - DNA, 569 bp, Homo sapiens
  source 1..569: mol_type = unassigned DNA
ctcgagaaggcgcctggtccccgggaaggtcccgggccgcgtaagtctcgcctagcgggagtcaccatcttaacgtgcgaattgagttgaaagccggataaacctcgagtgctcagcgagaggagggtggaaatggtatctaggaaaagacaaaataactcttcagcagtgccaggtgctgctggtgagtagcagccggtacccagaccagtggattgtcccaggaggaggaatggaacccgaggaggaacctggcggtgctgccgtgagggaagtttatgaggaggctggagtcaaaggaaaactaggcagacttctgggcatatttgagaaccaagaccgaaagcacagaacatatgtttatgttctaacagtcactgaaatattagaagattgggaagattctgttaatattggaaggaagagagagtggttcaaagtagaagatgctatcaaagttctccagtgtcataaacctgtacatgcagagtatctggaaaagctaaagctgggttgttccccagccaatggaaattctacagtcccttcccttccggataataatgcct

SEQ ID NO: 14378 - DNA, 3561 bp, Homo sapiens
  source 1..3561: mol_type = unassigned DNA
aatcctcccgggagccgaggaggctcgcgcgcgtgcatcccgcaccatcccccggccccgggccctggccggcgtcagaccgagctgccgccgccaccaccgcagcagcagcagtcggggagccaggcccagccagggccgcgggaggcgggggcgcccgggccctggatgtcccgcagcgcggcggccagcggcggaccccggaggcctgagcggcacctgcccccagccccctgtggggccccggggcccccagaaacctgcaggacggagccagacggggcgggcaccatgaacaagttacggcagagcctgcggcggaggaagccagcctacgtgcccgaggcgtcgcgcccgcaccagtggcaggcagacgaggacgcggtgcggaagggcacgtgcagcttcccggtcaggtacctgggtcacgtggaggtagaggagtcccggggaatgcacgtgtgtgaagatgcggtgaagaagctgaaggcgatgggccgaaagtccgtgaagtctgtcctgtgggtgtcagccgatgggctccgagtggtggacgacaaaaccaaggatcttctggtcgaccagaccatcgaaaaggtctccttttgtgctcctgaccgcaacctggacaaggctttctcctatatctgtcgtgacgggactacccgccgctggatctgccactgttttctggcactgaaggactccggcgagaggctgagccacgctgtgggctgtgcttttgccgcctgcctggagcgaaaacagcgacgggagaaggaatgtggggtcacggccgccttcgatgccagccgcaccagcttcgcccgcgagggctccttccgcctgtctgggggtgggcggcctgctgagcgagaggccccggacaagaagaaagcagaggcagcagctgcccccactgtggctcctggccctgcccagcctgggcacgtgtccccgacaccagccaccacatcccctggtgagaagggtgaggcaggcacccctgtggctgcaggcaccactgcggccgccatcccccggcgccatgcacccctggagcagctggttcgccagggctccttccgtgggttcccagcactcagccagaagaactcgcctttcaaacggcagctgagcctacggctgaatgagctgccatccacgctgcagcgccgcactgacttccaggtgaagggcacagtgcctgagatggagcctcctggtgccggcgacagtgacagcatcaacgctctgtgcacacagatcagttcatcttttgccagtgctggagcgccagcaccagggccaccacctgccacaacagggacttctgcctggggtgagccctccgtgccccctgcagctgccttccagcctgggcacaagcggacaccttcagaggctgagcgatggctggaggaggtgtcacaggtggccaaggcccagcagcagcagcagcagcaacagcaacagcagcagcagcagcagcagcaacagcagcaagcagcctcagtggccccagtgcccaccatgcctcctgccctgcagcctttccccgcccccgtggggccctttgacgctgcacctgcccaagtggccgtgttcctgccacccccacacatgcagcccccttttgtgcccgcctacccgggcttgggctacccaccgatgccccgggtgcccgtggtgggcatcacaccctcacagatggtggcaaacgccttctgctcagccgcccagctccagcctcagcctgccactctgcttgggaaagctggggccttcccgccccctgccatacccagtgcccctgggagccaggcccgccctcgccccaatggggccccctggccccctgagccagcgcctgccccagctccagagttggacccctttgaggcccagtgggcggcattagaaggcaaagccactgtagagaaaccctccaaccccttttctggcgacctgcaaaagacattcgagattgaactgtagcccgagccgccccacccactccatcatctccaggtgccccacgcctgggggtggaggcacaacctctcccctaaccctgctccctggggctgcgcccctcaacaccctctcaacacccccctccctcaaccaccccgacaaccactacagaaccaacattgtgacgcccaggttgcaacaggatggaattcagggacggacccagcctggctaagggaaccatttcactgccggacttaggctggcaatgcccccttccccaaccccagacacaggggttggccacaatcccactgaatgcccttggttcacactccatttcccagtttctgttgacccccaccttccagtgttggacaggatggaggggggacacttgcttaggggctctcctgggccccacaccagtgcccaccccaaatctggtcgtctcctccccccatgcacagcacaagctaagggctgccctctgcccacacgctgcgttcactgccaatgctgtactcacctccatcaccctccaactttggggcccatgtcttccttgggccaaggtctcatgggggctagggccaagttgggggcccaggaggcggggagggaggaggaggagaagatgcgcagttacctcatgtcggtgcccgctggggaggggtccgggaagaaggggaaggggtgcctggcgggtacttttctatcttttatttccagattttttttgtatctaaacttgaagatttgtattatacaaggacagccaataaaggaagaatataatggtgcccctcgggaaacgagggtgtgtgtagggcgctggtgaggccctagaacctttcctcctgagtcatggactgaaacagagtcagaaggatgtccctgagtgataacctctgagtcatagcgtggtaacaggtaccactgactcagcacctgccaggcgggtattaaaggagccaaaattaatcaccccatttctattccttacagagttagaatcaaggaataaaaaacaaatattatgaactgctggctgggcacagtggctcacgcctgtaatcccagcactttgggaggtcgaggcaggcagatcacttaaggtcaggagttcgagaccagcctggccgccatggagaaacccagtctctaccaaaaattcaaaaattagccgggcgtggtggcaggcgcctgtaattccaggaggctgaggcacaagaatcgcttgaacccaggcagcagaggttgcagtgacctgaggtcacaccattgcactcctgcctgggcaacagaatgagactctgtctcaaaaaaaaaaaacaaaaaaaaaaaaactacttctaattagctcaatattaatattttaacaagttgggttggtaacagtatatctttgcccatgctggcaaattcttgttttgtcagcattttccataactctggccaaagtgtcacctgatgtggcaacgttttacagtcttgctattgtttcttgagtcctttaatctataagatgtatttttaaaaatatataacatataaattttgtttcgttatagctctttaaaa

SEQ ID NO: 14379 - DNA, 2249 bp, Homo sapiens
  source 1..2249: mol_type = unassigned DNA
accgcagcagcagcagtcggggagccaggcccagccagggccgcgggaggcgggggcgcccgggccctggatgtcccgcagcgcggcggccagcacggggcgggcaccatgaacaagttacggcagagcctgcggcggaggaagccagcctacgtgcccgaggcgtcgcgcccgcaccagtggcaggcagacgaggacgcggtgcggaagggcacgtgcagcttcccggtcaggtacctgggtcacgtggaggtagaggagtcccggggaatgcacgtgtgtgaagatgcggtgaagaagctgaaggcgatgggccgaaagtccgtgaagtctgtcctgtgggtgtcagccgatgggctccgagtggtggacgacaaaaccaaggatcttctggtcgaccagaccatcgaaaaggtctccttttgtgctcctgaccgcaacctggacaaggctttctcctatatctgtcgtgacgggactacccgccgctggatctgccactgttttctggcactgaaggactccggcgagaggctgagccacgctgtgggctgtgcttttgccgcctgcctggagcgaaaacagcgacgggagaaggaatgtggggtcacggccgccttcgatgccagccgcaccagcttcgcccgcgagggctccttccgcctgtctgggggtgggcggcctgctgagcgagaggccccggacaagaagaaagcagaggcagcagctgcccccactgtggctcctggccctgcccagcctgggcacgtgtccccgacaccagccaccacatcccctggtgagaagggtgaggcaggcacccctgtggctgcaggcaccactgcggccgccatcccccggcgccatgcacccctggagcagctggttcgccagggctccttccgtgggttcccagcactcagccagaagaactcgcctttcaaacggcagctgagcctacggctgaatgagctgccatccacgctgcagcgccgcactgacttccaggtgaagggcacagtgcctgagatggagcctcctggtgccggcgacagtgacagcatcaacgctctgtgcacacagatcagttcatcttttgccagtgctggagcgccagcaccagggccaccacctgccacaacagggacttctgcctggggtgagccctccgtgccccctgcagctgccttccagcctgggcacaagcggacaccttcagaggctgagcgatggctggaggaggtgtcacaggtggccaaggcccagcagcagcagcagcagcaacagcaacagcagcagcagcagcagcagcaacagcagcaagcagcctcagtggccccagtgcccaccatgcctcctgccctgcagcctttccccgcccccgtggggccctttgacgctgcacctgcccaagtggccgtgttcctgccacccccacacatgcagcccccttttgtgcccgcctacccgggcttgggctacccaccgatgccccgggtgcccgtggtgggcatcacaccctcacagatggtggcaaacgccttctgctcagccgcccagctccagcctcagcctgccactctgcttgggaaagctggggccttcccgccccctgccatacccagtgcccctgggagccaggcccgccctcgccccaatggggccccctggccccctgagccagcgcctgccccagctccagagttggacccctttgaggcccagtgggcggcattagaaggcaaagccactgtagagaaaccctccaaccccttttctggcgacctgcaaaagacattcgagattgaactgtagcccgagccgccccacccactccatcatctccaggtgccccacgcctgggggtggaggcacaacctctcccctaaccctgctccctggggctgcgcccctcaacaccctctcaacacccccctccctcaaccaccccgacaaccactacagaaccaacattgtgacgcccaggttgcaacaggatggaattcagggacggacccagcctggctaagggaaccatttcactgccggacttaggctggcaatgcccccttccccaaccccagacacaggggttggccacaatcccactgaatgcccttggttcacactccatttcccagtttctgttgacccccaccttccagtgttggacaggatggaggggggacacttgcttaggggctctcctgggccccacaccagtgcccaccccaaatctggtcgtctcc

SEQ ID NO: 14380 - DNA, 1931 bp, Homo sapiens
  source 1..1931: mol_type = unassigned DNA
aaaccaaggcctccaggacgcgattccagacacaatccctacctctccctgcctaagggggtctcagcacaacaactgcctagacggggcgggcaccatgaacaagttacggcagagcctgcggcggaggaagccagcctacgtgcccgaggcgtcgcgcccgcaccagtggcaggcagacgaggacgcggtgcggaagggcacgtgcagcttcccggtcaggtacctgggtcacgtggaggtagaggagtcccggggaatgcacgtgtgtgaagatgcggtgaagaagctgaaggcgatgggccgaaagtccgtgaagtctgtcctgtgggtgtcagccgatgggctccgagtggtggacgacaaaaccaaggatcttctggtcgaccagaccatcgaaaaggtctccttttgtgctcctgaccgcaacctggacaaggctttctcctatatctgtcgtgacgggactacccgccgctggatctgccactgttttctggcactgaaggactccggcgagaggctgagccacgctgtgggctgtgcttttgccgcctgcctggagcgaaaacagcgacgggagaaggaatgtggggtcacggccgccttcgatgccagccgcaccagcttcgcccgcgagggctccttccgcctgtctgggggtgggcggcctgctgagcgagaggccccggacaagaagaaagcagaggcagcagctgcccccactgtggctcctggccctgcccagcctgggcacgtgtccccgacaccagccaccacatcccctggtgagaagggtgaggcaggcacccctgtggctgcaggcaccactgcggccgccatcccccggcgccatgcacccctggagcagctggttcgccagggctccttccgtgggttcccagcactcagccagaagaactcgcctttcaaacggcagctgagcctacggctgaatgagctgccatccacgctgcagcgccgcactgacttccaggtgaagggcacagtgcctgagatggagcctcctggtgccggcgacagtgacagcatcaacgctctgtgcacacagatcagttcatcttttgccagtgctggagcgccagcaccagggccaccacctgccacaacagggacttctgcctggggtgagccctccgtgccccctgcagctgccttccagcctgggcacaagcggacaccttcagaggctgagcgatggctggaggaggtgtcacaggtggccaaggcccagcagcagcagcagcagcaacagcaacagcagcagcagcagcagcagcaacagcagcaagcagcctcagtggccccagtgcccaccatgcctcctgccctgcagcctttccccgcccccgtggggccctttgacgctgcacctgcccaagtggccgtgttcctgccacccccacacatgcagcccccttttgtgcccgcctacccgggcttgggctacccaccgatgccccgggtgcccgtggtgggcatcacaccctcacagatggtggcaaacgccttctgctcagccgcccagctccagcctcagcctgccactctgcttgggaaagctggggccttcccgccccctgccatacccagtgcccctgggagccaggcccgccctcgccccaatggggccccctggccccctgagccagcgcctgccccagctccagagttggacccctttgaggcccagtgggcggcattagaaggcaaagccactgtagagaaaccctccaaccccttttctggcgacctgcaaaagacattcgagattgaactgtagcccgagccgccccacccactccatcatctccaggtgccccacgcctgggggtggaggcacaacctctcccctaaccctgctccctggggctgcgcccctcaacaccctctcaacacccccctccctc

SEQ ID NO: 14381 - DNA, 640 bp, Homo sapiens
  source 1..640: mol_type = unassigned DNA
gtgtgaagatgcggtgaagaagctgaaggcgatgggccgaaagtccgtgaagtctgtcctgtgggtgtcagccgatgggctccgagtggtggacgacaaaaccaaggatcttctggtcgaccagaccatcgaaaaggtctccttttgtgctcctgaccgcaacctggacaaggctttctcctatatctgtcgtgacgggactacccgccgctggatctgccactgttttctggcactgaaggactccggcgagaggctgagccacgctgtgggctgtgcttttgccgcctgcctggagcgaaaacagcgacgggagaaggaatgtggggtcacggccgccttcgatgccagccgcaccagcttcgcccgcgagggctccttccgcctgtctgggggtgggcggcctgctgagcgagaggccccggacaagaagaaagaggcagcagctgcccccactgtggctcctggccctgcccagcctgggcacgtgtccccgacaccagccaccacatcccctggtgagaagggtgaggcaggcacccctgtggctgcaggcaccactgcggccgccatcccccggcgccatgcacccctggagcagctggttcgccagggctccttccgtgggttcccagcactc

SEQ ID NO: 14382 - DNA, 587 bp, Homo sapiens
  source 1..587: mol_type = unassigned DNA
agacagggagaggcaccctgacccggctcctttgtccccttgcctccctccagatgggccgaaagtccgtgaagtctgtcctgtgggtgtcagccgatgggctccgagtggtggacgacaaaaccaaggatcttctggtcgaccagaccatcgaaaaggtctccttttgtgctcctgaccgcaacctggacaaggctttctcctatatctgtcgtgacgggactacccgccgctggatctgccactgttttctggcactgaaggactccggcgagaggctgagccacgctgtgggctgtgcttttgccgcctgcctggagcgaaaacagcgacgggagaaggaatgtggggtcacggccgccttcgatgccagccgcaccagcttcgcccgcgagggctccttccgcctgtctgggggtgggcggcctgctgagcgagaggccccggacaagaagaaagcagaggcagcagctgcccccactgtggctcctggccctgcccagcctgggcacgtgtccccgacaccagccaccacatcccctggtgagaagggtgaggcaggcacccctgtggctgcaggcaccact

SEQ ID NO: 14383 - DNA, 834 bp, Homo sapiens
  source 1..834: mol_type = unassigned DNA
gcggtgacggtgacggcggctttgtgtgtgggcggaccccggaggcctgagcggcacctgcccccagccccctgtggggccccggggcccccagaaacctgcaggacggagccagacggggcgggcaccatgaacaagttacggcagagcctgcggcggaggaagccagcctacgtgcccgaggcgtcgcgcccgcaccagtggcaggcagacgaggacgcggtgcggaagggcacgtgcagcttcccggtcaggtacctgggtcacgtggaggtagaggagtcccggggaatgcacgtgtgtgaagatgcggtgaagaagctgaaggcgatgggccgaaagtccgtgaagtctgtcctgtgggtgtcagccgatgggctccgagtggtggacgacaaaaccaaggatcttctggtcgaccagaccatcgaaaaggtctccttttgtgctcctgaccgcaacctggacaaggctttctcctatatctgtcgtgacgggactacccgccgctggatctgccactgttttctggcactgaaggactccggcgagaggctgagccacgctgtgggctgtgcttttgccgcctgcctggagcgaaaacagcgacgggagaaggaatgtggggtcacggccgccttcgatgccagccgcaccagcttcgcccgcgagggctccttccgcctgtctgggggtgggcggcctgctgagcgagaggccccggacaagaagaaagcagaggcagcagctgcccccactgtggctcctggccctgcccagcctgggcacgtgtccccgacaccagccaccacatcccctggtgagaagggtgag

SEQ ID NO: 14384 - DNA, 559 bp, Homo sapiens
  source 1..559: mol_type = unassigned DNA
agaagcaactctttcggacgcggagctggaggggatctgaggtcaggtgtcacggagggaaagggagcccaggccaggacggaccgggggaaaggactcggcgatgttcatagggcggaccccggaggcctgagcggcacctgcccccagccccctgtggggccccggggcccccagaaacctgcaggacggagccagacggggcgggcaccatgaacaagttacggcagagcctgcggcggaggaagccagcctacgtgcccgaggcgtcgcgcccgcaccagtggcaggcagacgaggacgcggtgcggaagggcacgtgcagcttcccggtcaggtacctgggtcacgtggaggtagaggagtcccggggaatgcacgtgtgtgaagatgcggtgaagaagctgaaggcgatgggccgaaagtccgtgaagtctgtcctgtgggtgtcagccgatgggctccgagtggtggacgacaaaaccaaggatcttctggtcgaccagaccatcgaaaaggtctccttttgtgctcctgaccgcaacctggacaaggcttt

SEQ ID NO: 14385 - DNA, 749 bp, Homo sapiens
  source 1..749: mol_type = unassigned DNA
atgccctctagcccccatgccctcctacgtctgatttcccaccctttgtgtcctcacggccctgggaatgaggaagcatccaccacatggacaagaagccctccaatgccctgaagcctgtgccccataccccccaccccagacctccagccccttagccccatggttctgaatccccagtgcccaactttcgcactcccctggcttctgttggctcctttcctcactgtcccctgacttgagctgctgatcccatgtgcgctgccaactgaccctgtaaccccgcttccagttatcttgttatctgaccccatgctccctgagcactggtccctccccgttgagctccataccttctgacccccacccttgacccacatcactgtcctgtgtcaccagacggggcgggcaccatgaacaagttacggcagagcctgcggcggaggaagccagcctacgtgcccgaggcgtcgcgcccgcaccagtggcaggcagacgaggacgcggtgcggaagggcacgtgcagcttcccggtcaggtacctgggtcacgtggaggtagaggagtcccggggaatgcacgtgtgtgaagatgcggtgaagaagctgaaggcgatgggccgaaagtccgtgaagtctgtcctgtgggtgtcagccgatgggctccgagtggtggacgacaaaaccaaggatcttctggtcgaccagaccatcgaaaaggtctccttttgtgctcctgaccgcaacctg

SEQ ID NO: 14386 - DNA, 555 bp, Homo sapiens
  source 1..555: mol_type = unassigned DNA
agatggggatggagatggggtcggggacacagcccccgtatcaaaccaaggcctccaggacgcgattccagacacaatccctacctctccctgcctaagggggtctcagcacaacaactgcctagggcggaccccggaggcctgagcggcacctgcccccagccccctgtggggccccggggcccccagaaacctgcaggacggagccagacggggcgggcaccatgaacaagttacggcagagcctgcggcggaggaagccagcctacgtgcccgaggcgtcgcgcccgcaccagtggcaggcagacgaggacgcggtgcggaagggcacgtgcagcttcccggtcaggtacctgggtcacgtggaggtagaggagtcccggggaatgcacgtgtgtgaagatgcggtgaagaagctgaaggcgatgggccgaaagtccgtgaagtctgtcctgtgggtgtcagccgatgggctccgagtggtggacgacaaaaccaaggatcttctggtcgaccagaccatcgaaaaggtctccttttgtgctcctgaccgca

SEQ ID NO: 14387 - DNA, 393 bp, Homo sapiens
  source 1..393: mol_type = unassigned DNA
accatcccccggccccgggccctggccggcgtcagaccgagctgccgccgccaccaccgcagcagcagcagtcggggagccaggcccagccagggccgcgggaggcgggggcgcccgggccctggatgtcccgcagcgcggcggccagcggcggaccccggaggcctgagcggcacctgcccccagccccctgtggggccccggggcccccagaaacctgcaggacggagccagacggggcgggcaccatgaacaagttacggcagagcctgcggcggaggaagccagcctacgtgcccgaggcgtcgcgcccgcaccagtggcaggcagacgaggacgcggtgcggaagggcacgtgcagcttcccggtcaggatgctcagtggacactgag

SEQ ID NO: 14388 - DNA, 2062 bp, Homo sapiens
  source 1..2062: mol_type = unassigned DNA
cacactcttgcacagtctgacaacacacacagacccacatttctacagacgacagccacactttcacagacagcacccgcgggcccaggctctcacagggagctacggttgtgtacaaacatgcacacagtctcacaaagaacacccagcactctctcaggcaacagtcacacccttacaaataaccctcatgaaaacactctcaaagacaacctcatgttcccacacaccctaacggatgcaccactgcacacagatacaccctctgtgcaatacccacacacccacactctaaggcaacagccacagtcacacaggctcaccgccaacagctgcactcttggacacagacagtcttgtagatccctcagatgcactctccgaggcaatgtcatcacagacaatagccacaccttcacacagagacatagctacatggataacagccatggacacaccctttgaaagacgacagcctcatctcaaacacagacacaccctcacaggcaacaggcactgagccacaagttctcatagacaacaacggcactctcggatatagacagcagacacacactcacaaccactctcagacatcgatgcccttcagcaacaaccttcagggcctcagactcacagacaacaaccacacttttggatgcatccctcacggacagcattcacagatgcacactatcctacaccattctcagacatgcgttcttccagacagccttcagaaacacactcacagacattacttgcctgctcagatatagagcccctcatagacagcgttccagaacataccattgcacacttgcttacacacacacacacacacacatccccctctgctgttggtgctcccagtcctgggactgtcaggatggctgatcagtgaagactgtcctagtggctggccacctccacacccactccacacacccacagccctgcctctgacagtcatcagtgcaaggccccagaagccttgcctggggactagacacagttgtcacagaatggctgtgtctcagagttccagagacaagccaccatcccccataccccatgcacctgactcctgcacccctgacccatgcaattcccaactcctctgctgccctctgatcaccccactgcctgactctcatacccctaaaacccctgaccgtgcggcccctgacttctatgccctctagcccccatgccctcctacgtctgatttcccaccctttgtgtcctcacggccctgggaatgaggaagcatccaccacatggacaagaagccctccaatgccctgaagcctgtgccccataccccccaccccagacctccagccccttagccccatggttctgaatccccagtgcccaactttcgcactcccctggcttctgttggctcctttcctcactgtcccctgacttgagctgctgatcccatgtgcgctgccaactgaccctgtaaccccgcttccagttatcttgttatctgaccccatgctccctgagcactggtccctccccgttgagctccataccttctgacccccacccttgacccacatcactgtcctgtgtcaccagacggggcgggcaccatgaacaagttacggcagagcctgcggcggaggaagccagcctacgtgcccgaggcgtcgcgcccgcaccagtggcaggcagacgaggacgcggtgcggaagggcacgtgcagcttcccggtcagggtgagtgggcgcggcagggtgcggcggggcgagggggacgggggccgctgtgctgtgctgtgcgggtgcgcggcctggctgggacaccagcccaagtcgtttgaagttggtgttaaaaagcgtgaggccggcagtcctggctatcacggtgaaaccccggctctactagaaatacaacaaattagcctcgcgtggtggcgggcgcctgtagtcccagctactggggaggctgagacaggagaatcgcttgaacccgggaggcggagattgcagtgagccgagatagcgccattgcactccagcctgggcgacagagcagactctgtttc

SEQ ID NO: 14389 - DNA, 4332 bp, Homo sapiens
  source 1..4332: mol_type = unassigned DNA
actcacgtaccagggctcattgcgtgacggttacacttccggcgggctacgtgcgcgcggcgagcgccgggcgtacttttgcgtggttgctccaccccctcagccttgccttcgccgccgttggggctggaagttcccgccaggtccgtgccgggcgagagagatgctgcccggcccgcctcggctttgaggcgagagaagtgtcccagacccatttcgccttgctgacggcgtcgagccctggccagacatgtccacagggttctccttcgggtccgggactctgggctccaccaccgtggccgccggcgggaccagcacaggcggcgttttctccttcggaacgggagcgtctagcaacccttctgtggggctcaattttggaaatcttggaagtacttcaactccagcaactacatctgctccttcaagtggttttggaaccgggctctttggatctaaacctgccactgggttcactctaggaggaacaaatacaggaatagcaacaactataactacaggattaactctgggaacgccagccactacatctgcagctacaacaggcttcagtttaggattcaataaacctgcagcatctgccacaccatttgctctacctattacctctacctcagctagcggtctgactctttcgtctgctctgacatcaactccagcagcatccacaggatttactctaaataatttgggtgggacaacagccacaactacaactgcatcaacaggcctctctttagggggagccttagctggtttgggaggttcacttttccagagtacaaacacaggaacatcaggacttggacagaatgctttagggttgactttgggaactacagcagctacttcaactgcaggcaatgaaggccttggtggtatagatttcagtagctcctcagataaaaagagtgataaaacgggaacaagaccagaggatagtaaagctctgaaggatgaaaatctacctcctgtcatctgccaggatgttgaaaatctccagaaatttgtgaaggagcagaaacaagttcaagaagaaattagtagaatgtcttcaaaagcaatgcttaaggtacaagaagatattaaagctctgaagcagctcctgtcgttggctgccaatggaatacagagaaacactctcaacattgacaaattgaaaatagaaactgctcaggagttgaagaatgctgaaatagctttaagaacccagaagacaccacctggacttcaacatgaatatgcagctcctgctgactacttcagaatcttggttcagcaatttgaggtacagcttcagcagtacaggcagcagattgaagaactagaaaaccatcttgccactcaagcaaataattcacatataacccctcaagatttgtcaatggctatgcagaaaatttatcaaacatttgtagctttagcggcacaacttcagtctattcatgaaaatgtaaaggttctgaaagaacagtaccttggctacaggaaaatgttcttgggagatgctgttgatgtgtttgaaacaaggcgagcagaagccaagaagtggcagaacacacccagagttactactggacccactcctttcagcaccatgccaaacgcagcagccgttgccatggctgcaacacttacacagcagcaacagcctgctacagggccacagccatctctgggagttagttttggaacgccattcggctcaggtattggcactggcttgcaatcaagtggcttaggttcttcaaaccttggaggatttggaactagctctggttttggatgcagcaccacaggggcctccacatttggatttggaacaacaaataaaccctcaggaagtcttagtgcaggctttggcagctcaagtacatctgggtttaacttcagcaatcctggcatcacggcatcagctggtttgacttttggggtgtccaatcctgcctctgcaggttttggaacaggaggacaactccttcagttgaagaaacctccagctggaaacaaaagaggaaaaagataaacatgggttgatgtgttgagagaatccatagcagcaccgttcattctatgagtctatttttctaatgatgcagtaattaaattgcatcccaggagatttataaagttttgatatttttccctactctggaatttgaactttcttcatgtttgccatactgaacatcttttttcttgtggaatttaaagtccagctgtgttttctttttaatttgattctcagtgtaagaaatgttctgattacatcactgattggtaatggttagaaaccattaacctaaaacttactatttaacctagtgtttttgttgatgaggtttacattatgtgaatacatgcacatttgtttcttatacaggtggtgtgaactctagggcctatactagaatcaatttgttccttgttaaaggccttttgaattatactgcagggcatcttgtgaatatgtatgtaaatatatacagaataatacacacagttgtgtgtgcatataaaatacatatttacgccaggcgtggtggctcacgcctgtaatcccagcactttgggaggccgaggcaggcggatcacctgaggtcaggagtttgagaccagcctgacatggtgaaaccccatctctacgaaaaatacaaaaattagctgggcatagtggcgggtacctataatcccagctactcgggaggctgaggcacgagaatcacttgaagccgggaggtgggggttgcagtgagccgagatcacaccactgcactccagcctgggcaacaagagcaaaactccgtctcaaaaaagatgaaaataaaataaaatatatatttacaggcctacaacttttgcctcagactgttccccttttctaagggtattcaagttttcaccttttaagcttcatatcctcagtgcttgtagaatgatgagcttagaggtaccaggtcattgcagttgtttgcttaaagacttattgaaatggttactggcgtaaatacttggccaactcaactttattgcccctgatcttttccatttttgtttccaccttaacctatagcagctcctccaaatgaggaatgctgtaagtaagactcatcaaacagattttaaccattttattatcctgtgtgtccttacattgcttctgtgagatgtttttttcttatctgagatgaactttcaggagcctatttgaactccagactggtgttctggggcaaagagctattagccaaactgattctatgcaggtgaaggatgcactaaagttctcactttagtgagaacttttctagctattccaatacagagttctttcttatagggctattgatattgacaccaaatggagtggcttctcagcctcttaatgtcttaagtaagtgcttaatttggaatagagaaaccagtatattttaaaaaagaaaaatattctttgtagcaactgtaaattctcccattataacagtgaacagagctccaggtaataacgcataggcatgtcaggttgcatctgtatatttgactacattagtattagtgacatcaggtggatataaaagaaaacccttggaaagagaactgccttagccatgatttcgttagtagacctatttatgattcaattgcaattttcagataggatgtgaacatggaatttcattgaaaatagtttaattttttatataaaaggttttgtatataatgtgtgtcagtgactattttcaaaatcattttcatcaagacaccttttttctaaaataggcattgcatacacatatgcacacgtatgtgcatgtgccacacattttttgtataatgttgggtttgattataaaagtgttgtcaaatgttttatttatctgcatatagcagtggttggcttttttgaattgaaatttttgcgcattgatgcattgaaataaggaaaattatttatctctgagcactaaacttatttttgcatatttctgtaatattgcagtccccagatccagaacatgggaagttagggaaaatgtgtgattttgtgttttgaattactgtcagaattacatacacaattacaacaaactttttttaaaagacatttcattgtactgcaaaaatctgaatatttatatttcttgtttttttctttatatgttttgcattttaatatgttgagccactggaaatttgtaacagattaatttgttataggagtttaaatgtgttgtcattgtctccattgtctttgtccagagcctattattatggaaacaataaaatttattgtgtcagttgctttga

SEQ ID NO: 14390 - DNA, 605 bp, Homo sapiens
  source 1..605: mol_type = unassigned DNA
acacttccggcgggctacgtgcgcgcggcgagcgccgggcgtacttttgcgtggttgctccaccccctcagccttgccttcgccgccgttggggctggaagttcccgccaggtccgtgccgggcgagagagatgctgcccggcccgcctcggctttgaggcgagagaagtgtcccagacccatttcgccttgctgacggcgtcgagccctggccagacatgtccacagggttctccttcgggtccgggactctgggctccaccaccgtggccgccggcgggaccagcacaggcggcgttttctccttcggaacgggagcgtctagttccacaaccctgcttaggctattgtcattcgtggaacaaatatttattggacagattcccatgtgcaaggctctgttttagatgaaaactactccaatcaacttcttcaatctgttctgccacattttagccagacaacccttctgtggggctcaattttggaaatcttggaagtacttcaactccagcaactacatctgctccttcaagtggttttggaaccgggctctttggatctaaacctgccactgggttcactctaggaggaacaaatacagg

SEQ ID NO: 14391 - DNA, 588 bp, Homo sapiens
  source 1..588: mol_type = unassigned DNA
agccttgccttcgccgccgttggggctggaagttcccgccaggtccgtgccgggcgagagagatgctgcccggcccgcctcggctttgaggcgagagaagtgtcccagacccatttcgccttgctgacggcgtcgagccctggccagacatgtccacagggttctccttcgggtccgggactctgggctccaccaccgtggccgccggcgggaccagcacaggcggcgttttctccttcggaacgggagcgtctagcaacccttctgtggggctcaattttggaaatcttggaagtacttcaactccagcaactacatctgctccttcaagtggttttggaaccgggctctttggatctaaacctgccactgggttcactctaggaggaacaaatacaggtgaggaggatctgatcacattgtcagagagtaggcttgggatattctttcctaaattgtgtcctgtatctctctttacaaggatcatcactggtagtagaccttaaaaaatggtaaatgctaagatgaaaagaaatgcaaggaattggaattaagggctagtgataggcccaatcattgactgtcatc

SEQ ID NO: 14392 - DNA, 582 bp, Homo sapiens
  source 1..582: mol_type = unassigned DNA
agccttgccttcgccgccgttggggctggaagttcccgccaggtccgtgccgggcgagagagatgctgcccggcccgcctcggctttgaggcgagagaagtgtcccagacccatttcgccttgctgacggcgtcgagccctggccagacatgtccacagggttctccttcgggtccgggactctgggctccaccaccgtggccgccggcgggaccagcacaggcggcgttttctccttcggaacgggagcgtctagcaacccttctgtggggctcaattttggaaatcttggaagtacttcaactccagcaactacatctgctccttcaagtggttttggaaccgggctctttggatctaaacctgccactgggttcactctaggaggaacaaatacaggaatagcaacaactataactacaggattaactctgggtaagaatttttgaggaaagatcccagctctgtggtcttctaataattttaataaattgagtgatctttctactcttctctcttctaatatttcacagagctggagtatagaaaaaagtgtgtatcacagatggtgacttatcggag

SEQ ID NO: 14393 - DNA, 551 bp, Homo sapiens
  source 1..551: mol_type = unassigned DNA
agccttgccttcgccgccgttggggctggaagttcccgccaggtccgtgccgggcgagagagatgctgcccggcccgcctcggctttgaggcgagagaagtgtcccagacccatttcgccttgctgacggcgtcgagccctggccagacatgtccacagggttctccttcgggtccgggactctgggctccaccaccgtggccgccggcgggaccagcacaggcggcgttttctccttcggaacgggagcgtctagcaacccttctgtggggctcaattttggaaatcttggaagtacttcaactccagcaactacatctgctccttcaagtggttttggaaccgggctctttggatctaaacctgccactgggttcactctaggaggaacaaatacaggaatagcaacaactataactacaggattaactctggaaaacaacacatctgtttatcagcaaagttttggactggatcagctgcaaacacaagaacgccagccactacatctgcagctacaacaggcttcagtttaggattcaataaacctg

SEQ ID NO: 14394 - DNA, 563 bp, Homo sapiens
  source 1..563: mol_type = unassigned DNA
agccttgccttcgccgccgttggggctggaagttcccgccaggtccgtgccgggcgagagagatgctgcccggcccgcctcggctttgaggcgagagaagtgtcccagacccatttcgccttgctgacggcgtcgagccctggccagacatgtccacagggttctccttcgggtccgggactctgggctccaccaccgtggccgccggcgggaccagcacaggcggcgttttctccttcggaacgggagcgtctagatgaaaactactccaatcaacttcttcaatctgttctgccacattttagccagacaacccttctgtggggctcaattttggaaatcttggaagtacttcaactccagcaactacatctgctccttcaagtggttttggaaccgggctctttggatctaaacctgccactgggttcactctaggaggaacaaatacaggaatagcaacaactataactacaggattaactctgggaacgccagccactacatctgcagctacaacaggcttcagtttaggattcaataaacctgcagcatctgccaca

SEQ ID NO: 14395 - DNA, 6360 bp, Homo sapiens
  source 1..6360: mol_type = unassigned DNA
gccttcgccgccgttggggctggaagttcccgccaggtccgtgccgggcgagagagatgctgcccggcccgcctcggctttgaggcgagagaagtgtcccagacccatttcgccttgctgacggcgtcgagccctggccagacatgtccacagggttctccttcgggtccgggactctgggctccaccaccgtggccgccggcgggaccagcacaggcggcgttttctccttcggaacgggagcgtctagcaacccttctgtggggctcaattttggaaatcttggaagtacttcaactccagcaactacatctgctccttcaagtggttttggaaccgggctctttggatctaaacctgccactgggttcactctaggaggaacaaatacaggaatagcaacaactataactacaggattaactctgggaacgccagccactacatctgcagctacaacaggcttcagtttaggattcaataaacctgcagcatctgccacaccatttgctctacctattacctctacctcagctagcggtctgactctttcgtctgctctgacatcaactccagcagcatccacaggatttactctaaataatttgggtgggacaacagccacaactacaactgcatcaacaggcctctctttagggggagccttagctggtttgggaggttcacttttccagagtacaaacacaggaacatcaggacttggacagaatgctttagggttgactttgggaactacagcagctacttcaactgcaggcaatgaaggccttggtggtatagatttcagtagctcctcagataaaaagagtgataaaacgggaacaagaccagaggatagtaaagctctgaaggatgaaaatctacctcctgtcatctgccaggatgttgaaaatctccagaaatttgtgaaggagcagaaacaagttcaagaagaaattagtagaatgtcttcaaaagcaatgcttaaggtacaagaagatattaaagctctgaagcagctcctgtcgttggctgccaatggaatacagagaaacactctcaacattgacaaattgaaaatagaaactgctcaggagttgaagaatgctgaaatagctttaagaacccagaagacaccacctggacttcaacatgaatatgcagctcctgctgactacttcagaatcttggttcagcaatttgaggtacagcttcagcagtacaggcagcagattgaagaactagaaaaccatcttgccactcaagcaaataattcacatataacccctcaagatttgtcaatggctatgcagaaaatttatcaaacatttgtagctttagcggcacaacttcagtctattcatgaaaatgtaaaggttctgaaagaacagtaccttggctacaggaaaatgttcttgggagatgctgttgatgtgtttgaaacaaggcgagcagaagccaagaagtggcagaacacacccagagttactactggacccactcctttcagcaccatgccaaacgcagcagccgttgccatggctgcaacacttacacagcagcaacagcctgctacaggtctgaacgcattcaagttatagcttcttactgttccaatgcagaacatttatgtgcgtttttataagtcttccatttgtgtgagcactgaagaaatttctatgagtagctgttccaatacaatctaaaattgtgatggacacgattataaacatacctgataaaaaaggcagggtagtcttagcaataattatacatcaattagatattgaatattgtgaatctacttaatgttatttgctgtaatgctataaatgccctttagaacatggtgtttcactagtgaattacatttaagaataacattagattctgaaatcatgactgtaccatttattgttttaaagtcagagatcatccatccattctttgaatttttcatatatgatactgataggtggtgcattctcattttcctcatacatagtgattacaaagtacccacattcaggatgaagtatgcttttattgactgaaggtatgttgaagatcaataggcttgtttgtatgtatgttgactgtaaacagaatacaagccctctaaaccaaattttgaagatgatacatgctagaattgtacctttccaaggtgaacagaacagcaagagcaggaaaaagatgttttgagatgtggattgcacattaaggagcaactgggaagttgaacagatgaaaataattggtgacatggaaagcagattgttttatttcttggtttagttacacttctaattagagaaacattttttgtggtcattctacagtgttttatttggtcctgtgtctttcggaggttaatagttatcttaatcctgccatcccttttgtcaggtttgaagcttgacatggaaaaatagtcttaatcgatattgatttttttattttaatcattcataaatttcttagtaatgcttactattcaatagcatgtgtctttctgagagttccatatagtccagtagtacattataatacacacaaaaaaattaatacatatttagattgcattcaagctacctatactagggaagcattctctggttttcactattggcagtttaaaaaattgttcttcacatttggagatgacagaattgacttgccataagtaaagggttgatgatagatttatgccaaatcctccatatcccgtggctggacccatgtgaatagtggctcgcacgagcactgtctggtagctctctagctggctggagtgtaggattgcattgttaagttatggagggaaaaagtcattatgggattgattcctttgaggattgatatttcttcttaaaaggattcaatcccataattatgaccatcagctctcatgattacctaaccagttaatcaaaccaaccatagtactagtttactttttagagccagtattaatcctaaagtagataagtgtagatttggttaagtgttctttaaacatagtgaatttccattctattaaatagaacttgagaaatgtcagttatataaaaagttatgttgtaagtgaatatattctatgataaatacctaaacttgaagcaaaatctcctgtcaagggtttgtgtgtgtgtgtgtgtttaactttcttatctatagattattattttgagaaattcataggttttcacttatacattttgagcttgtggacatatggagatgtgtgttcattctctaaatgagtgcctactatgtgctgggctcgaggaatacaaaggtagacaatatagattttgtctttgccctctgtggtggttgacaatgttagcttaatctggagtattcttgaggagccttttgctcataggctttaattttgtctgtgacttttgccaggctttggggaaattgactgccttcactcttccctgaaactttgaagtccacataagggctttctcatcagatggcagaaattataatttattaacctaaacaaccttacagtgttttcgctttgaattgtatgaattcttagaactgagaagctaaacaacagtgataacaattttacattatcttttctttctccttttgtttctctaaaggtctcccaggccttcccagtcaaaattttcgttatttttagtcatgtcaccatgatgtgagatttctgagctctgttagatacatttagaaatgtccctatttatcaaatggtgttttgtaccccataagttatcccttatgccctgtgacttctgtgaaatctttgtttttaagtgccagtaacaaattttagaccatctagatgagggtagagagagcttatgcattgtttttatacatcactgttgatctatacaagatttgagttatcagaagggttttgcttttatttgcatatgaaatttttattaacatgaatatgggcacagagcaaatagcttcttagactgctgccttctgaaggtggcttctgtatctttctcagaggaggaggaatagacttaaacgacttctttgtcctccttcaattttttttttaatgaaaaagtatactagggcttaggcatgtgtgatttacagttatttgttctgaaggctgcagagaattgaaaatccagcaggctatttgtgtatgaaatcatgagcatcgataacgtggataacgtagttccatgttggcagaacttgacacttgtctataagtgcttcccaagcctcctgaaaaactgaagacatttacattaggcttttcagtataattttaatttaggataggttttttagcaatgtatctgggattgagttttgctattgtgttttgacactttaagagttcttgatgtttacataataagactttcttatgtgacttagctgctgttttaaggagagccaagacgttttgttaggaattcctaatttttagcttagtgtaggtttggacatttaaggtgtagtgttaaataggaaacattaagtatttcatcttagtttcttgtggttttgtgattttgttgtatttaataaccaaaggaacattccccattaaatcagtaagagtaaaatttttcaaactggggaaaacgcattttaggttttttaaagaaaaattattttaaaatgtgacttagaaataaccatactaattacattaggcatttggggtgatcatggaaaattataaaatatttttagcactttagtcctttttctgttaatgcagttttacttttaagaaagtaaaatttattctggaaaatatgaattacagcgctaaacctggttttgttgtgtgtgaatatattatatggtaacttttgtaaaatgttactctacatgaagatttcactttggccagtcattggtatatatcactacaaacttaattttatttatggaaataagaacctctcattggatgactattcaaatttcaaagcagacttcttgaattgtttacgtaacttttgcctgaaggatttagactgctttctaatagtgaaactaatatatatggtggccagagtgtaatatatgctaatactttggcatgggagatatttatcatgagtttttactattaaaaaatgttatacatttgcctacgagttttataaatgatgttgccttcagaatttgtgtgaaggtacaaaactaaaaatatcatgtatctgatgtgcaatggaaagtcttgtcatcattagatatgagttcttgattatattctgaatattgatgattagaaaaatcttatgttctgttgctcttaacaacagacccacacacaacaaaaagcatgctatttgagtaactcttacgacttacaaggctgagggctgtggtgtgcattattctttagggtcttccaccagcagtgcctcctattaacctgtgacaaacaagtctctcaatgttaaagaactggacatgtgttttttatgttttttgttaggaatcagaaagtataataatatgcttggtttctttttcctatagtaacattttacaaaagagctgctaggcaggtattttattctcaaagtgatctcaaactggatgtaaaattttaaattatttttttaatagtagtataagaattctggctgctattagttattgtttgttttctgggttagaagctattcgaaaagtccagtttctgtcccagtgtagcaaaatgtagttcctcggttgtttttctttaaatgctttataattttacactacctttttaatatacaaacctcattcttcattggataacttgaaggctttgatttctttaaaaatttaaattttagtgtgtatattactttgacagttccctcatctttgagatgcactgatcactgtgcttgaaaaagacaatactgaagattgtactatgaagtttattgaataattttcataaattatttatccaaatgagagatttttagatttttgtattctgcttagttttaaaaaaaaaaaatagtagtttaaaagagaggctagtaagtttgatgctattcttgccaaacaaactcagccaaaatctttaaagtaacaagagggaaaaggatgactaatcgttctgcttctgagtacattttccaaaacgttggaaagaaacttctgaattgaaatcttgaatgtattgaatctgtcaaggtacacagcggtgcctttgtaaatgttcattactttatttaatcaggtgataagtggtgtaatgtagcagagcttaagaatagaactcaattatcactttttgtgaacaagttggaattgtcatgttactgtgtaattgatttgctttacaatgaacaataaatttaataaaat

SEQ ID NO: 14396 - DNA, 1854 bp, Homo sapiens
  source 1..1854: mol_type = unassigned DNA
gccttcgccgccgttggggctggaagttcccgccaggtccgtgccgggcgagagagatgctgcccggcccgcctcggctttgaggcgagagaagtgtcccagacccatttcgccttgctgacggcgtcgagccctggccagacatgtccacagggttctccttcgggtccgggactctgggctccaccaccgtggccgccggcgggaccagcacaggcggcgttttctccttcggaacgggagcgtctagcaacccttctgtggggctcaattttggaaatcttggaagtacttcaactccagcaactacatctgctccttcaagtggttttggaaccgggctctttggatctaaacctgccactgggttcactctaggaggaacaaatacaggaatagcaacaactataactacaggattaactctgggaacgccagccactacatctgcagctacaacaggcttcagtttaggattcaataaacctgcagcatctgccacaccatttgctctacctattacctctacctcagctagcggtctgactctttcgtctgctctgacatcaactccagcagcatccacaggatttactctaaataatttgggtgggacaacagccacaactacaactgcatcaacaggcctctctttagggggagccttagctggtttgggaggttcacttttccagagtacaaacacaggaacatcaggacttggacagaatgctttagggttgactttgggaactacagcagctacttcaactgcaggcaatgaaggccttggtggtatagatttcagtagctcctcagataaaaagagtgataaaacgggaacaagaccagagaaatttgtgaaggagcagaaacaagttcaagaagaaattagtagaatgtcttcaaaagcaatgcttaaggtacaagaagatattaaagctctgaagcagctcctgtcgttggctgccaatggaatacagagaaacactctcaacattgacaaattgaaaatagaaactgctcaggagttgaagaatgctgaaatagctttaagaacccagaagacaccacctggacttcaacatgaatatgcagctcctgctgactacttcagaatcttggttcagcaatttgaggtacagcttcagcagtacaggcagcagattgaagaactagaaaaccatcttgccactcaagcaaataattcacatataacccctcaagatttgtcaatggctatgcagaaaatttatcaaacatttgtagctttagcggcacaacttcagtctattcatgaaaatgtaaaggttctgaaagaacagtaccttggctacaggaaaatgttcttgggagatgctgttgatgtgtttgaaacaaggcgagcagaagccaagaagtggcagaacacacccagagttactactggacccactcctttcagcaccatgccaaacgcagcagccgttgccatggctgcaacacttacacagcagcaacagcctgctacagggccacagccatctctgggagttagttttggaacgccattcggctcaggtattggcactggcttgcaatcaagtggcttaggttcttcaaaccttggaggatttggaactagctctggttttggatgcagcaccacaggggcctccacatttggatttggaacaacaaataaaccctcaggaagtcttagtgcaggtttgtgtgtttctgcctggatttcaggcaaatttaaaggtgtaaattatttaatttaaaagtatgtgttgttatttccagtaacccaaaaagttccctccctgattcagtttttactccctggatgaagtgtgcaagcctaactaa

SEQ ID NO: 14397 - DNA, 2489 bp, Homo sapiens
  source 1..2489: mol_type = unassigned DNA
cttcgccgccgttggggctggaagttcccgccaggtccgtgccgggcgagagagatgctgcccggcccgcctcggctttgaggcgagagaagtgtcccagacccatttcgccttgctgacggcgtcgagccctggccagacatgtccacagggttctccttcgggtccgggactctgggctccaccaccgtggccgccggcgggaccagcacaggcggcgttttctccttcggaacgggagcgtctagcaacccttctgtggggctcaattttggaaatcttggaagtacttcaactccagcaactacatctgctccttcaagtggttttggaaccgggctctttggatctaaacctgccactgggttcactctaggaggaacaaatacaggaacgccagccactacatctgcagctacaacaggcttcagtttaggattcaataaacctgcagcatctgccacaccatttgctctacctattacctctacctcagctagcggtctgactctttcgtctgctctgacatcaactccagcagcatccacaggatttactctaaataatttgggtgggacaacagccacaactacaactgcatcaacaggcctctctttagggggagccttagctggtttgggaggttcacttttccagagtacaaacacaggaacatcaggacttggacagaatgctttagggttgactttgggaactacagcagctacttcaactgcaggcaatgaaggccttggtggtatagatttcagtagctcctcagataaaaagagtgataaaacgggaacaagaccagaggatagtaaagctctgaaggatgaaaatctacctcctgtcatctgccaggatgttgaaaatctccagaaatttgtgaaggagcagaaacaagttcaagaagaaattagtagaatgtcttcaaaagcaatgcttaaggtacaagaagatattaaagctctgaagcagctcctgtcgttggctgccaatggaatacagagaaacactctcaacattgacaaattgaaaatagaaactgctcaggagttgaagaatgctgaaatagctttaagaacccagaagacaccacctggacttcaacatgaatatgcagctcctgctgactacttcagaatcttggttcagcaatttgaggtacagcttcagcagtacaggcagcagattgaagaactagaaaaccatcttgccactcaagcaaataattcacatataacccctcaagatttgtcaatggctatgcagaaaatttatcaaacatttgtagctttagcggcacaacttcagtctattcatgaaaatgtaaaggttctgaaagaacagtaccttggctacaggaaaatgttcttgggagatgctgttgatgtgtttgaaacaaggcgagcagaagccaagaagtggcagaacacacccagagttactactggacccactcctttcagcaccatgccaaacgcagcagccgttgccatggctgcaacacttacacagcagcaacagcctgctacagggccacagccatctctgggagttagttttggaacgccattcggctcaggtattggcactggcttgcaatcaagtggcttaggttcttcaaaccttggaggatttggaactagctctggttttggatgcagcaccacaggggcctccacatttggatttggaacaacaaataaaccctcaggaagtcttagtgcaggctttggcagctcaagtacatctgggtttaacttcagcaatcctggcatcacggcatcagctggtttgacttttggggtgtccaatcctgcctctgcaggttttggaacaggaggacaactccttcagttgaagaaacctccagctggaaacaaaagaggaaaaagataaacatgggttgatgtgttgagagaatccatagcagcaccgttcattctatgagtctatttttctaatgatgcagtaattaaattgcatcccaggagatttataaagttttgatatttttccctactctggaatttgaactttcttcatgtttgccatactgaacatcttttttcttgtggaatttaaagtccagctgtgttttctttttaatttgattctcagtgtaagaaatgttctgattacatcactgattggtaatggttagaaaccattaacctaaaacttactatttaacctagtgtttttgttgatgaggtttacattatgtgaatacatgcacatttgtttcttatacaggtggtgtgaactctagggcctatactagaatcaatttgttccttgttaaaggccttttgaattatactgcagggcatcttgtgaatatgtatgtaaatatatacagaataatacacacagttgtgtgtgcatataaaatacatatttacgccaggcgtggtggctcacgcctgtaatcccagcactttgggaggccgaggcaggcggatcacctgaggtcaggagtt

SEQ ID NO: 14398 - DNA, 947 bp, Homo sapiens
  source 1..947: mol_type = unassigned DNA
tggggctggaagttcccgccaggtccgtgccgggcgagagagatgctgcccggcccgcctcggctttgaggcgagagaagtgtcccagacccatttcgccttgctgacggcgtcgagccctggccagacatgtccacagggttctccttcgggtccgggactctgggctccaccaccgtggccgccggcgggaccagcacaggcggcgttttctccttcggaacgggagcgtctagcaacccttctgtggggctcaattttggaaatcttggaagtacttcaactccagcaactacatctgctccttcaagtggttttggaaccgggctctttggatctaaacctgccactgggttcactctaggaggaacaaatacaggaatagcaacaactataactacaggattaactctgggaacgccagccactacatctgcagctacaacaggcttcagtttaggattcaataaacctgcagcatctgccacaccatttgctctacctattacctctacctcagctagcggtctgactctttcgtctgctctgacatcaactccagcagcatccacaggatttactctaaataatttgggtgggacaacagccacaactacaactgcatcaacaggcctctctttagggggagccttagctggtttgggaggttcacttttccagagtacaaacacaggaacatcaggacttggacagaatgctttagggttgactttgggaactacagcagctacttcaactgcaggcaatgaaggccttggtggtatagatttcagtagctcctcagataaaaagagacgtctatagaagataggtggcaattttagagatactaaatatgaaagaaaaaaatcttaataaaatacaaaacatggaaacataaattacagttggatgaaagaggtaaaaaagtaaaaccccatgtgcag

SEQ ID NO: 14399 - DNA, 1659 bp, Homo sapiens
  source 1..1659: mol_type = unassigned DNA
gggctggaagttcccgccaggtccgtgccgggcgagagagatgctgcccggcccgcctcggctttgaggcgagagaagtgtcccagacccatttcgccttgctgacggcgtcgagccctggccagacatgtccacagggttctccttcgggtccgggactctgggctccaccaccgtggccgccggcgggaccagcacaggcggcgttttctccttcggaacgggagcgtctagcaacccttctgtggggctcaattttggaaatcttggaagtacttcaactccagcaactacatctgctccttcaagtggttttggaaccgggctctttggatctaaacctgccactgggttcactctaggaggaacaaatacaggaatagcaacaactataactacaggattaactctgggaacgccagccactacatctgcagctacaacaggcttcagtttaggattcaataaacctgcagcatctgccacaccatttgctctacctattacctctacctcagctagcggtctgactctttcgtctgctctgacatcaactccagcagcatccacaggatttactctaaataatttgggtgggacaacagccacaactacaactgcatcaacaggcctctctttagggggagccttagctggtttgggaggttcacttttccagagtacaaacacaggaacatcaggacttggacagaatgctttagggttgactttgggaactacagcagctacttcaactgcaggcaatgaaggccttggtggtatagatttcagtagctcctcagataaaaagagtgataaaacgggaacaagaccagaggatagtaaagctctgaaggatgaaaatctacctcctgtcatctgccaggatgttgaaaatctccagaaatttgtgaaggagcagaaacaagttcaagaagaaattagtagaatgtcttcaaaagcaatgcttaaggtacaagaagatattaaagctctgaagcagctcctgtcgttggctgccaatggaatacagagaaacactctcaacattgacaaattgaaaatagaaactgctcaggagttgaagaatgctgaaatagctttaagaacccagaagacaccacctggacttcaacatgaatatgcagctcctgctgactacttcagaatcttggttcagcaatttgaggtacagcttcagcagtacaggcagcagattgaagaactagaaaaccatcttgccactcaagcaaataattcacatataacccctcaagatttgtcaatggctatgcagaaaatttatcaaacatttgtagctttagcggcacaacttcagtctattcatgaaaatgtaaaggttctgaaagaacagtaccttggctacaggaaaatgttcttgggagatgctgttgatgtgtttgaaacaaggcgagcagaagccaagaagtggcagaacacacccagagttactactggacccactcctttcagcaccatgccaaacgcagcagccgttgccatggctgcaacacttacacagcagcaacagcctgctacaggtgataagtggtgtaatgtagcagagcttaagaatagaactcaattatcactttttgtgaacaagttggaattgtcatgttactgtgtaattgattt

SEQ ID NO: 14400 - DNA, 1408 bp, Homo sapiens
  source 1..1408: mol_type = unassigned DNA
ctcaattttggaaatcttggaagtacttcaactccagcaactacatctgctccttcaagtggttttggaaccgggctctttggatctaaacctgccactgggttcactctaggaggaacaaatacaggaacgccagccactacatctgcagctacaacaggcttcagtttaggattcaataaacctgcagcatctgccacaccatttgctctacctattacctctacctcagctagcggtctgactctttcgtctgctctgacatcaactccagcagcatccacaggatttactctaaataatttgggtgggacaacagccacaactacaactgcatcaacaggcctctctttagggggagccttagctggtttgggaggttcacttttccagagtacaaacacaggaacatcaggacttggacagaatgctttagggttgactttgggaactacagcagctacttcaactgcaggcaatgaaggccttggtggtatagatttcagtagctcctcagataaaaagagtgataaaacgggaacaagaccagaggatagtaaagctctgaaggatgaaaatctacctcctgtcatctgccaggatgttgaaaatctccagaaatttgtgaaggagcagaaacaagttcaagaagaaattagtagaatgtcttcaaaagcaatgcttaaggtacaagaagatattaaagctctgaagcagctcctgtcgttggctgccaatggaatacagagaaacactctcaacattgacaaattgaaaatagaaactgctcaggagttgaagaatgctgaaatagctttaagaacccagaagacaccacctggacttcaacatgaatatgcagctcctgctgactacttcagaatcttggttcagcaatttgaggtacagcttcagcagtacaggcagcagattgaagaactagaaaaccatcttgccactcaagcaaataattcacatataacccctcaagatttgtcaatggctatgcagaaaatttatcaaacatttgtagctttagcggcacaacttcagtctattcatgaaaatgtaaaggttctgaaagaacagtaccttggctacaggaaaatgttcttgggagatgctgttgatgtgtttgaaacaaggcgagcagaagccaagaagtggcagaacacacccagagttactactggacccactcctttcagcaccatgccaaacgcagcagccgttgccatggctgcaacacttacacagcagcaacagcctgctacaggtgataagtggtgtaatgtagcagagcttaagaatagaactcaattatcactttttgtgaacaagttggaattgtcatgttactgtgtaattgatttgctttacaatgaacaataaatttaataaaataaaa

SEQ ID NO: 14401 - DNA, 564 bp, Homo sapiens
  source 1..564: mol_type = unassigned DNA
ttaagtatgtttttaatagatgccaatcttcttagataagaaatcttcatgtcagatgaattgttaaaattattttatagatcctatttacaataaatttatgttttttataaagagctttgaaatcatccagagaagccatacgtgcttttttgctatattttcttgtgtcttaatactctaatactctattaaaactcagctgtcaactttttaaaatctcaatgaccttaatacatgttttgcatttttcttagggatagtaaagctctgaaggatgaaaatctacctcctgtcatctgccaggatgttgaaaatctccagaaatttgtgaaggagcagaaacaagttcaagaagaaattagtagaatgtcttcaaaagcaatgcttaaggtacaagaagatattaaagctctgaagcagctcctgtcgttggctgccaatggaatacagagaaacactctcaacattgacaaattgaaaatagaaactgctcaggagttgaagaatgctgaaatagctttaagaacccagaagacaccacctggacttcaacatgaatat

SEQ ID NO: 14402 - DNA, 560 bp, Homo sapiens
  source 1..560: mol_type = unassigned DNA
cagaagccaagaagtggcagaacacacccagagttactactggacccactcctttcagcaccatgccaaacgcagcagccgttgccatggctgcaacacttacacagcagcaacagcctgctacagggccacagccatctctgggagttagttttggaacgccattcggctcaggtattggcactggcttgcaatcaagtggcttaggttcttcaaaccttggaggatttggaactagctctggttttggatgcagcaccacaggggcctccacatttggatttggaacaacaaataaaccctcaggaagtcttagtgcaggcaacaaatcacaggttttaactgaatttcgaaaacccagtgttacagaaaccaatgaaataggaagaaaaatacagttctgagcagtccttgaatcaacaaatatctacctttaaggaacttctaattctcattttgtaaatcccattattcaagaaaagcacattaagcttagagtaggtttgatcaagatgtttagaattaaggaaataaaacttgcctttggtgtttaaggacaa

SEQ ID NO: 14403 - DNA, 1755 bp, Homo sapiens
  source 1..1755: mol_type = unassigned DNA
agtctcggttagcttcacttcagcgggaacctgcccactaaggaggccgattctttccggctcgagcaggtccggacccgcccctctggcgtctagcagtctcggaggcctgcccgtatagttcagggccggacagcgagcggcggcgacttgccagtaagggtttggagtcatcagcaggtttaattttggaggaactttacaggtttggctccagcagctgctgttgccaccaccactagttcaagcaccatgcagtttacctcaatatcaaattctttgacctccactgctgctattgggctctcatttacaacttcaacgactaccaccgccactttcaccaccaacactactaccacaatcaccagtggctttactgtgaaccaaaaccaactgttatcaagagggtttgaaaaccttgtaccttatacttcaactgttagtgtagtagcaactcctgtgatgacatatggtcatctggagggtcttataaatgagtggaaccttgagctggaagatcaagagaagtactttcttctccaggccactcaggtcaatgcttgggaccatacattgattgagaatggtgagatgattcgtattttacatggagaagtgaacaaagtgaaactggatcagaaaagattggaacaagaattggattttatcctgtcacagcagcaggaactagaatttctgttgacttatttagaggagtctacgcgtgaccagagtggacttcattatctgcaggatgcagatgaggagcatgtggagatctccaccagatctgcagaattctgaatgcccatatggactccctgcagtggattgatcggaattcaggcatgctgcgaaggaaggtagaagtggtaacacgggttttcgaggattatcgtcacgaggagcatgcacacaatgtcaacactgctttttagtgaatgaccatatcttcagcatgtcgtttctggattattacctacaaattctgatgttaaatagagtagtatttatacttaatatttcatcttgatcataatgaattgtgcatcctttttttcatttaagtattgtactgttgagaattataccttagttttgtttttagtattagaaaatcaaaattatactagcccctttgtccagacagcaacctcttagatgctgactctatatgtgtaatttatgtcttactctccctggcatcagtacacatcatccttctcactccagttgaatcatagggtgatgtctgccaaaagtacatgccaacctatatagtgctagatactgtaaagtctcttctcctcaaaggaacctactgtctagtttgagatataattaatgcttgtctgcataaaaacaatatagataatataaagaagtgcagtatgaattatagaaagtgtgttatagagattcagagcagggaggaaaagttagggtagattattattaaagggttaaggaaaggtaagtttcaaggaatttggttatttttaatgtatggatatactggcattttatttggttttagcatatgatttatagttggtgatttccgtatatttgtttgtttttctttttttttgtttgtttgttttgttttgttttaaataagccttgttcttaggtttggaacagtctggtctcctgtgtttcatgtttcacctaagtcataaataaaggtaatgtcctaaaaaaaaacatgtaatactgaaattaactattaaaagtttttaagtgactaga

SEQ ID NO: 14404 - DNA, 1515 bp, Homo sapiens
  source 1..1515: mol_type = unassigned DNA
agtctcggttagcttcacttcagcgggaacctgcccactaaggaggccgattctttccggctcgagcaggtccggacccgcccctctggcgtctagcagtctcggaggcctgcccgtatagttcagggccggacagcgagcggcggcgacttgccagtaaggtttggctccagcagctgctgttgccaccaccactagttcaagcaccatgcagtttacctcaatatcaaattctttgacctccactgctgctattgggctctcatttacaacttcaacgactaccaccgccactttcaccaccaacactactaccacaatcaccagtggctttactgtgaaccaaaaccaactgttatcaagagggtttgaaaaccttgtaccttatacttcaactgttagattcgtattttacatggagaagtgaacaaagtgaaactggatcagaaaagattggaacaagaattggattttatcctgtcacagcagcaggaactagaatttctgttgacttatttagaggagtctacgcgtgaccagagtggacttcattatctgcaggatgcagatgaggagcatgtggagatctccaccagatctgcagaattctgaatgcccatatggactccctgcagtggattgatcggaattcaggcatgctgcgaaggaaggtagaagtggtaacacgggttttcgaggattatcgtcacgaggagcatgcacacaatgtcaacactgctttttagtgaatgaccatatcttcagcatgtcgtttctggattattacctacaaattctgatgttaaatagagtagtatttatacttaatatttcatcttgatcataatgaattgtgcatcctttttttcatttaagtattgtactgttgagaattataccttagttttgtttttagtattagaaaatcaaaattatactagcccctttgtccagacagcaacctcttagatgctgactctatatgtgtaatttatgtcttactctccctggcatcagtacacatcatccttctcactccagttgaatcatagggtgatgtctgccaaaagtacatgccaacctatatagtgctagatactgtaaagtctcttctcctcaaaggaacctactgtctagtttgagatataattaatgcttgtctgcataaaaacaatatagataatataaagaagtgcagtatgaattatagaaagtgtgttatagagattcagagcagggaggaaaagttagggtagattattattaaagggttaaggaaaggtaagtttcaaggaatttggttatttttaatgtatggatatactggcattttatttggttttagcatatgatttatagttggtgatttccgtatatttgtttgtttttctttttttttgtttgtttgttttgttttgttttaaataagccttgttcttaggtttggaacagtctggtctcctgtgtttcatgtttcacctaagtcataaataaaggtaatgtcctaaaaaaaaa

SEQ ID NO: 14405 - DNA, 688 bp, Homo sapiens
  source 1..688: mol_type = unassigned DNA
tcctgtgatgacatatggtcatctggagggtcttataaatgagtggaaccttgagctggaagatcaagagaagtactttcttctccaggccactcaggtcaatgcttgggaccatacattgattgagaatggtgagatgattcgtattttacatggagaagtgaacaaagtgaaactggatcagaaaagattggaacaagaattggattttatcctgtcacagcagcaggaactagaatttctgttgacttatttagaggagtctacgcgtgaccagagtggacttcattatctgcaggatgcagatgaggagcatgtggagatttacagattagcagaaagtatagatgctcagctgaaacaaatggcccaagatctcaaggacgttgttaatcacctgaatacatttgaaagttcttctgacactactgatccgctccaccagatctgcagaattctgaatgcccatatggactccctgcagtggattgatcggaattcaggcatgctgcgaaggaaggtagaagtggtaacacgggttttcgaggattatcgtcacgaggagcatgcacacaatgtcaacactgctttttagtgaatgaccatatcttcagcatgtcgtttctggattattacctacaaattctgatgttaaatagagtagtatttatacttaatatttcatctt

SEQ ID NO: 14406 - DNA, 618 bp, Homo sapiens
  source 1..618: mol_type = unassigned DNA
agtctcggttagcttcacttcagcgggaacctgcccactaaggaggccgattctttccggctcgagcaggtccggacccgcccctctggcgtctagcagtctcggaggcctgcccgtatagttcagggccggacagcgagcggcggcgacttgccagtaaggtttggctccagcagctgctgttgccaccaccactagttcaagcaccatgcagtttacctcaatatcaaattctttgacctccactgctgctattgggctctcatttacaacttcaacgactaccaccgccactttcaccaccaacactactaccacaatcaccagtggctttactgtgaaccaaaaccaactgttatcaagagggtttgaaaaccttgtaccttatacttcaactgttagtgtagtagcaactcctgtgatgacatatggtcatctggagggtcttataaatgagtggaaccttgagctggaagatcaagagaagtactttcttctccaggccactcaggtcaatgcttgggaccatacattgattgagaatggtgagatgattcgtattttacatggagaagtgaacaaagtgaaactggatcagaaaagattggaacaagaatt

SEQ ID NO: 14407 - DNA, 2741 bp, Homo sapiens
  source 1..2741: mol_type = unassigned DNA
gggagcggccagccttggccaatcaggaagcgggggagagcggcgcgagaagcggcggccgcgtcctcaagccggcacctgagcggcggagacggctgtagcacaaggatctgcatctccaatggatactgaggggtttggtgagctccttcagcaagctgaacagcttgctgctgagactgagggcatctcagagcttccccatgtggaacggaacttacaggagatccagcaggcgggagagcgcctgcgttcccgtaccctaacacgcacgtcccaggagacggcagatgtcaaggcgtcagttctcctcgggtctcggggacttgacatatcccacatctcccagcgattggagagtctgagtgcagccaccacctttgagcctcttgagcctgtgaaggacactgacattcagggcttcctgaagaatgagaaggacaatgccctgctgtctgccatcgaagagtcccggaagaggaccttcggcatggctgaggagtaccatcgggagtcaatgttggttgagtgggagcaagtgaaacagcgaattctgcacacactgctggcatcaggagaagacgcccttgactttactcaagaaagcgagccaagctacatcagtgatgtgggaccccctggtcgaagctctctggataacatcgagatggcctatgcgcggcaaatttatatctataatgagaaaattgtaaatggacacctgcagcctaacctggtggacctttgtgcttccgtcgcagagctcgatgataagagcatttccgacatgtggaccatggtaaaacaaatgacagacgtgttgttgacaccggcaacggatgccctgaagaaccgcagcagcgtggaagtgcgcatggagtttgtcaggcaggccttggcgtaccttgagcagagttataagaattacacccttgtgactgtctttggaaatttgcatcaggcccagctgggcggggtgcctgggacttaccaattggttcgaagtttcctgaacattaaactgccagctcccttgcctggactacaggatggagaggtggaaggccatcctgtgtgggcgctaatttactactgcatgcgctgtggagacctgcttgccgcttcacaggtagttaatcgagcccagcaccagctgggagagtttaaaacctggttccaggagtacatgaacagcaaggacagaagattgtccccagctacggaaaacaagctccggctgcattaccgtagggccctcaggaacaatacagatccctacaagcgggccgtgtactgtatcattggcagatgtgacgtcaccgacaaccagagtgaagtggcggacaaaactgaggattacctgtggctgaagttgaaccaagtgtgttttgacgacgatggcaccagctccccacaagacaggctcactctctcacagttccagaagcagttgttggaagactatggcgagtcccactttacggtgaaccagcaacccttcctctacttccaagtcctgttcctgacagcgcagtttgaagcagcagttgcctttcttttccgcatggagcggctgcgctgccatgctgtccatgtagcactggtgctgtttgagctgaagctgcttttaaagtcctctggacagagtgctcagctcctcagccacgagcctggtgaccctccttgcttgcggcggctgaacttcgtgcggctcctcatgctgtacacccggaagtttgagtccacggacccaagggaggccctccagtacttctatttcctcagggatgagaaagatagtcaaggagaaaacatgtttctgcgctgtgtgagtgagcttgtgattgaaagccgagagttcgatatgattcttgggaaactagagaatgacggaagtagaaagcctggagtcatagataagtttactagtgacacaaagcctattatcaacaaagttgcttctgtggcagaaaataaaggactgtttgaagaggcagcaaagctgtatgaccttgccaagaatgctgacaaggtactggagctgatgaacaaactgctgagccctgtcgtcccccagatcagtgccccgcaatccaacaaggagaggctgaagaacatggcactctccattgccgaacggtatagggctcaaggaataagcgcaaataaatttgtggactccacgttctatcttcttttggacttgatcaccttttttgacgagtatcatagtggtcatattgatagagcttttgatatcattgagcgcttgaagctggtgcccctgaatcaggaaagtgtggaagagagagtggctgccttcagaaatttcagtgatgaaatcaggcacaacctctcagaagtgcttcttgccaccatgaacatcttgttcacacagtttaagaggctcaaggggacaagtccatcctcgtcatccaggccccagcgagtcatcgaggaccgcgactctcaactccgaagtcaagcccgcactctgattacctttgctggaatgataccataccgaacgtctggggacaccaatgcgaggctggtgcagatggaggtcctcatgaattaagtgccatgctttgtgggagtctgggtcggcacactgtcagtacatcaggcacatgggcccactaggctggggtttctggttttgtttctgttgtgttttgttttggtttctgtattatgtatttttgtcaacgccaataaatttctttgatttgtatttc

SEQ ID NO: 14408 - DNA, 797 bp, Homo sapiens
  source 1..797: mol_type = unassigned DNA
cttggccaatcaggaagcgggggagagcggcgcgagaagcggcggccgcgtcctcaagccggcacctgagcggcggagacggctgtagcacaaggatctgcatctccaatggatactgaggggtttgagctcgatgataagagcatttccgacatgtggaccatggtaaaacaaatgacagacgtgttgttgacaccggcaacggatgccctgaagaaccgcagcagcgtggaagtgcgcatggagtttgtcaggcaggccttggcgtaccttgagcagagttataagaattacacccttgtgactgtctttggaaatttgcatcaggcccagctgggcggggtgcctgggacttaccaattggttcgaagtttcctgaacattaaactgccagctcccttgcctggactacaggatggagaggtggaaggccatcctgtgtgggcgctaatttactactgcatgcgctgtggagacctgcttgccgcttcacaggtagttaatcgagcccagcaccagctgggagagtttaaaacctggttccaggagtacatgaacagcaaggacagaagattgtccccagctacggaaaacaagctccggctgcattaccgtagggccctcaggaacaatacagatccctacaagcgggccgtgtactgtatcattggcagatgtgacgtcaccgacaaccagagtgaagtggcggacaaaactgaggattacctgtggctgaagttgaaccaagtgtgttttgacgacgatggcaccagctccccacaagacaggctcactct

SEQ ID NO: 14409 - DNA, 589 bp, Homo sapiens
  source 1..589: mol_type = unassigned DNA
aggaagcgggggagagcggcgcgagaagcggcggccgcgtcctcaagccggcacctgagcggcggagacggctgtagcacaaggttgcatgatctttgaagttgaaagagacaatatttgggatctgcatctccaatggatactgaggggtttggtgagctccttcagcaagctgaacagcttgctgctgagactgagggcatctcagagcttccccatgtggaacggaacttacaggagatccagcaggcgggagagcgcctgcgttcccgtaccctaacacgcacgtcccaggagacggcagatgtcaaggcgtcagttctcctcgggtctcggggacttgacatatcccacatctcccagcgattggagagtctgagtgcagccaccacctttgagcctcttgagcctgtgaaggacactgacattcagggcttcctgaagaatgagaaggacaatgccctgctgtctgccatcgaagagtcccggaagaggaccttcggcatggctgaggagtaccatcgggagtcaatgttggttgagtgggagcaagtgaaacagcgaattctgcacacactgctggcatcag

SEQ ID NO: 14410 - DNA, 2834 bp, Homo sapiens
  source 1..2834: mol_type = unassigned DNA
ggaagcgggggagagcggcgcgagaagcggcggccgcgtcctcaagccggcacctgagcggcggagacggctgtagcacaaggatctgcatctccaatggatactgaggggtttggtgagctccttcagcaagctgaacagcttgctgctgagactgagggcatctcagagcttccccatgtggaacggaacttacaggagatccagcaggcgggagagcgcctgcgttcccgtaccctaacacgcacgtcccaggagacggcagatgtcaaggcgtcagttctcctcgggtctcggggacttgacatatcccacatctcccagcgattggagagtctgagtgcagccaccacctttgagcctcttgagcctgtgaaggacactgacattcagggcttcctgaagaatgagaaggacaatgccctgctgtctgccatcgaagagtcccggaagaggaccttcggcatggctgaggagtaccatcgggagtcaatgttggttgagtgggagcaagtgaaacagcgaattctgcacacactgctggcatcaggagaagacgcccttgactttactcaagaaagcgagccaagctacatcagtgatgtgggaccccctggtcgaagctctctggataacatcgagatggcctatgcgcggcaaatttatatctataatgagaaaattgtaaatggacacctgcagcctaacctggtggacctttgtgcttccgtcgcagagctcgatgataagagcatttccgacatgtggaccatggtaaaacaaatgacagacgtgttgttgacaccggcaacggatgccctgaagaaccgcagcagcgtggaagtgcgcatggagtttgtcaggcaggccttggcgtaccttgagcagagttataagaattacacccttgtgactgtctttggaaatttgcatcaggcccagctgggcggggtgcctgggacttaccaattggttcgaagtttcctgaacattaaactgccagctcccttgcctggactacaggatggagaggtggaaggccatcctgtgtgggcgctaatttactactgcatgcgctgtggagacctgcttgccgcttcacaggtagttaatcgagcccagcaccagctgggagagtttaaaacctggttccaggagtacatgaacagcaaggacagaagattgtccccagctacggaaaacaagctccggctgcattaccgtagggccctcaggaacaatacagatccctacaagcgggccgtgtactgtatcattggcagatgtgacgtcaccgacaaccagagtgaagtggcggacaaaactgaggattacctgtggctgaagttgaaccaagtgtgttttgacgacgatggcaccagctccccacaagacaggctcactctctcacagttccagaagcagttgttggaagactatggcgagtcccactttacggtgaaccagcaacccttcctctacttccaagtcctgttcctgacagcgcagtttgaagcagcagttgcctttcttttccgcatggagcggctgcgctgccatgctgtccatgtagcactggtgctgtttgagctgaagctgcttttaaagtcctctggacagagtgctcagctcctcagccacgagcctggtgaccctccttgcttgcggcggctgaacttcgtgcggctcctcatgctgtacacccggaagtttgagtccacggacccaagggaggccctccagtacttctatttcctcagggatgagaaagatagtcaaggagaaaacatgtttctgcgctgtgtgagtgagcttgtgattgaaagccgagagttcgatatgattcttgggaaactagagaatgacggaagtagaaagcctggagtcatagataagtttactagtgacacaaagcctattatcaacaaagttgcttctgtggcagaaaataaaggactgtttgaagaggcagcaaagctgtatgaccttgccaagaatgctgacaaggtactggagctgatgaacaaactgctgagccctgtcgtcccccagatcagtgccccgcaatccaacaaggagaggctgaagaacatggcactctccattgccgaacggtatagggctcaaggaataagcgcaaataaatttgtggactccacgttctatcttcttttggacttgatcaccttttttgacgagtatcatagtggtcatattgatagagcttttgatatcattgagcgcttgaagctggtgcccctgaatcaggaaagtgtggaagagagagtggctgccttcagaaatttcagtgatgaaatcaggcacaacctctcagaagtgcttcttgccaccatgaacatcttgttcacacagtttaagaggctcaaggggacaagtccatcctcgtcatccaggccccagcgagtcatcgaggaccgcgactctggcctggctctgttgcccaggctggaatgcaatgacacgatctcagctcactgcaacctctacctcttgggctcaagccaccctcccacctcaccctcccaagtagctgggactacagcaactccgaagtcaagcccgcactctgattacctttgctggaatgataccataccgaacgtctggggacaccaatgcgaggctggtgcagatggaggtcctcatgaattaagtgccatgctttgtgggagtctgggtcggcacactgtcagtacatcaggcacatgggcccactaggctggggtttctggttttgtttctgttgtgttttgttttggtttctgtattatgtatttttgtcaacgccaataaatttctttgatttgtatttc

SEQ ID NO: 14411 - DNA, 630 bp, Homo sapiens
  source 1..630: mol_type = unassigned DNA
gcgagaagcggcggccgcgtcctcaagccggcacctgagcggcggagacggctgtagcacaaggtcagttctcctcgggtctcggggacttgacatatcccacatctcccagcgattggagagtctgagtgcagccaccacctttgagcctcttgagcctgtgaaggacactgacattcagggcttcctgaagaatgagaaggacaatgccctgctgtctgccatcgaagagtcccggaagaggaccttcggcatggctgaggagtaccatcgggagtcaatgttggttgagtgggagcaagtgaaacagcgaattctgcacacactgctggcatcaggagaagacgcccttgactttactcaagaaagcgagccaagctacatcagtgatgtgggaccccctggtcgaagctctctggataacatcgagatggcctatgcgcggcaaatttatatctataatgagaaaattgtaaatggacacctgcagcctaacctggtggacctttgtgcttccgtcgcagagctcgatgataagagcatttccgacatgtggaccatggtaaaacaaatgacagacgtgttgttgacaccggcaacggatgccctgaagaaccgcagcagcgtgga

SEQ ID NO: 14412 - DNA, 583 bp, Homo sapiens
  source 1..583: mol_type = unassigned DNA
actgcactccagcctgggcaccattgagcactgagtgaacgagactccgtctgcagtcccggcacctcgggaggccgaggttggcggatcactcgcggttaggggctggagaccggcccggccaacacagcgaaaccccgtctccaccaaaaccagtcaggatctgcatctccaatggatactgaggggtttggtgagctccttcagcaagctgaacagcttgctgctgagactgagggcatctcagagcttccccatgtggaacggaacttacaggagatccagcaggcgggagagcgcctgcgttcccgtaccctaacacgcacgtcccaggagacggcagatgtcaaggcgtcagttctcctcgggtctcggggacttgacatatcccacatctcccagcgattggagagtctgagtgcagccaccacctttgagcctcttgagcctgtgaaggacactgacattcagggcttcctgaagaatgagaaggacaatgccctgctgtctgccatcgaagagtcccggaagaggaccttcggcatggctgaggagtaccatcgggagtcaatgttggttgagt

SEQ ID NO: 14413 - DNA, 592 bp, Homo sapiens
  source 1..592: mol_type = unassigned DNA
ttccttacctgctttgagtctgtggaaggagacaggaattctggatctgcatctccaatggatactgaggggtttggtgagctccttcagcaagctgaacagcttgctgctgagactgagggcatctcagagcttccccatgtggaacggaacttacaggagatccagcaggcgggagagcgcctgcgttcccgtaccctaacacgcacgtcccaggagacggcagatgtcaaggcgtcagttctcctcgggtctcggggacttgacatatcccacatctcccagcgattggagagtctgagtgcagccaccacctttgagcctcttgagcctgtgaaggacactgacattcagggcttcctgaagaatgagaaggacaatgccctgctgtctgccatcgaagagtcccggaagaggaccttcggcatggctgaggagtaccatcgggagtcaatgttggttgagtgggagcaagtgaaacagcgaattctgcacacactgctggcatcaggagaagacgcccttgactttactcaagaaagcgagccaagctacatcagtgatgtgggaccccctggtcgaagctctctgg

SEQ ID NO: 14414 - DNA, 442 bp, Homo sapiens
  source 1..442: mol_type = unassigned DNA
ggagatccagcaggcgggagagcgcctgcgttcccgtaccctaacacgcacgtcccaggagacggcagatgtcaaggcgtcagttctcctcgggtctcggggacttgacatatcccacatctcccagcgattggagagtctgagtgcagccaccacctttgagcctcttgagcctgtgaaggacactgacattcagggcttcctgaagaatgagaaggacaatgccctgctgtctgccatcgaagagtcccggaagaggaccttcggcatggctgaggagtaccatcgggagtcaatgttggttgagtgggagcaagtgaaacagcgaattctgcacacactgctggcatcaggagaagacgcccttgactttactcaagaaagcgaggtagcttgaatgcaaaagataaactactgttaataaaaacatgaagtcaaagaa

SEQ ID NO: 14415 - DNA, 2875 bp, Homo sapiens
  source 1..2875: mol_type = unassigned DNA
atgcaagatgtcggaagtcatcaaagattcacatcagagtaattgcagtggtttgggttggggaaaaaaagtatcatagcattccttgcctacatgttgtctctccccctcttaaatcttaacttggtacagtccgttaacaataaaatacccttctgtaacctataaactgttactcccatcagtttgtgctttcaaactgatggctgacttctctgaatttgtgtagcgcacaacgaatggtgatgctgtgctccgggggctgcagtgcaccctttttaaagggaccctgcaatctcattgtttaatttgactctttagtgcttcagtcacatcagcacttgcagaggggttgttcttttcctttttcttctttctctctttttctcttctctctgtccttctccccacccccatccctcaattcaggcagtttggggtgggaaaaacttgagcactggttccgacagagctcatctcatataagaaggtttggaagagctgcagtgatcgacagcatcgaccgttctgtaactccttaaatttaagagctgcagggcttcctgaagaatgagaaggacaatgccctgctgtctgccatcgaagagtcccggaagaggaccttcggcatggctgaggagtaccatcgggagtcaatgttggttgagtgggagcaagtgaaacagcgaattctgcacacactgctggcatcaggagaagacgcccttgactttactcaagaaagcgagccaagctacatcagtgatgtgggaccccctggtcgaagctctctggataacatcgagatggcctatgcgcggcaaatttatatctataatgagaaaattgtaaatggacacctgcagcctaacctggtggacctttgtgcttccgtcgcagagctcgatgataagagcatttccgacatgtggaccatggtaaaacaaatgacagacgtgttgttgacaccggcaacggatgccctgaagaaccgcagcagcgtggaagtgcgcatggagtttgtcaggcaggccttggcgtaccttgagcagagttataagaattacacccttgtgactgtctttggaaatttgcatcaggcccagctgggcggggtgcctgggacttaccaattggttcgaagtttcctgaacattaaactgccagctcccttgcctggactacaggatggagaggtggaaggccatcctgtgtgggcgctaatttactactgcatgcgctgtggagacctgcttgccgcttcacaggtagttaatcgagcccagcaccagctgggagagtttaaaacctggttccaggagtacatgaacagcaaggacagaagattgtccccagctacggaaaacaagctccggctgcattaccgtagggccctcaggaacaatacagatccctacaagcgggccgtgtactgtatcattggcagatgtgacgtcaccgacaaccagagtgaagtggcggacaaaactgaggattacctgtggctgaagttgaaccaagtgtgttttgacgacgatggcaccagctccccacaagacaggctcactctctcacagttccagaagcagttgttggaagactatggcgagtcccactttacggtgaaccagcaacccttcctctacttccaagtcctgttcctgacagcgcagtttgaagcagcagttgcctttcttttccgcatggagcggctgcgctgccatgctgtccatgtagcactggtgctgtttgagctgaagctgcttttaaagtcctctggacagagtgctcagctcctcagccacgagcctggtgaccctccttgcttgcggcggctgaacttcgtgcggctcctcatgctgtacacccggaagtttgagtccacggacccaagggaggccctccagtacttctatttcctcagggatgagaaagatagtcaaggagaaaacatgtttctgcgctgtgtgagtgagcttgtgattgaaagccgagagttcgatatgattcttgggaaactagagaatgacggaagtagaaagcctggagtcatagataagtttactagtgacacaaagcctattatcaacaaagttgcttctgtggcagaaaataaaggactgtttgaagaggcagcaaagctgtatgaccttgccaagaatgctgacaaggtactggagctgatgaacaaactgctgagccctgtcgtcccccagatcagtgccccgcaatccaacaaggagaggctgaagaacatggcactctccattgccgaacggtatagggctcaaggaataagcgcaaataaatttgtggactccacgttctatcttcttttggacttgatcaccttttttgacgagtatcatagtggtcatattgatagagcttttgatatcattgagcgcttgaagctggtgcccctgaatcaggaaagtgtggaagagagagtggctgccttcagaaatttcagtgatgaaatcaggcacaacctctcagaagtgcttcttgccaccatgaacatcttgttcacacagtttaagaggctcaaggggacaagtccatcctcgtcatccaggccccagcgagtcatcgaggaccgcgactctcaactccgaagtcaagcccgcactctgattacctttgctggaatgataccataccgaacgtctggggacaccaatgcgaggctggtgcagatggaggtcctcatgaattaagtgccatgctttgtgggagtctgggtcggcacactgtcagtacatcaggcacatgggcccactaggctggggtttctggttttgtttctgttgtgttttgttttggtttctgtattatgtatttttgtcaacgccaataaatttctttgatttgt

SEQ ID NO: 14416 - DNA, 590 bp, Homo sapiens
  source 1..590: mol_type = unassigned DNA
gttactcccatcagtttgtgctttcaaactgatggctgacttctctgaatttgtgtagcgcacaacgaatggtgatgctgtgctccgggggctgcagtgcaccctttttaaagggaccctgcaatctcattgtttaatttgactctttagtgcttcagtcacatcagcacttgcagaggggttgttcttttcctttttcttctttctctctttttctcttctctctgtccttctccccacccccatccctcaattcaggcagtttggggtgggaaaaacttgagcactggttccgacagagctcatctcatataagaaggtttggaagagctgcagtgatcgacagcatcgaccgttctgtaactccttaaatttaagagctgcagggcttcctgaagaatgagaaggacaatgccctgctgtctgccatcgaagagtcccggaagaggggtcattgttctctgttcctttctggcagaccttcggcatggctgaggagtaccatcgggagtcaatgttggttgagtgggagcaagtgaaacagcgaattctgcacacactgctggcatcaggagaagacgcccttgact

SEQ ID NO: 14417 - DNA, 563 bp, Homo sapiens
  source 1..563: mol_type = unassigned DNA
gttactcccatcagtttgtgctttcaaactgatggctgacttctctgaatttgtgtagcgcacaacgaatggtgatgctgtgctccgggggctgcagtgcaccctttttaaagggaccctgcaatctcattgtttaatttgactctttagtgcttcagtcacatcagcacttgcagaggggttgttcttttcctttttcttctttctctctttttctcttctctctgtccttctccccacccccatccctcaattcaggcagtttggggtgggaaaaacttgagcactggttccgacagagctcatctcatataagaaggtttggaagagctgcagtgatcgacagcatcgaccgttctgtaactccttaaatttaagagctgcagggcttcctgaagaatgagaaggacaatgccctgctgtctgccatcgaagagtcccggaagaggccaagctacatcagtgatgtgggaccccctggtcgaagctctctggataacatcgagatggcctatgcgcggcaaatttatatctataatgagaaaattgtaaatggacacctg

SEQ ID NO: 14418 - DNA, 604 bp, Homo sapiens
  source 1..604: mol_type = unassigned DNA
agacaaatgcaccctggtaaatagagtggcagcatgttgttgcagtgcctctgaaagacaagggcttcctgaagaatgagaaggacaatgccctgctgtctgccatcgaagagtcccggaagaggaccttcggcatggctgaggagtaccatcgggagtcaatgttggttgagtgggagcaagtgaaacagcgaattctgcacacactgctggcatcaggagaagacgcccttgactttactcaagaaagcgagccaagctacatcagtgatgtgggaccccctggtcgaagctctctggataacatcgagatggcctatgcgcggcaaatttatatctataatgagaaaattgtaaatggacacctgcagcctaacctggtggacctttgtgcttccgtcgcagagctcgatgataagagcatttccgacatgtggaccatggtaaaacaaatgacagacgtgttgttgacaccggcaacggatgccctgaagaaccgcagcagcgtggaagtgcgcatggagtttgtcaggcaggccttggcgtaccttgagcagagttataagaattacacccttgtgactgtctttggaaatttgcatca

SEQ ID NO: 14419 - DNA, 584 bp, Homo sapiens
  source 1..584: mol_type = unassigned DNA
aaatgcaccctggtaaatagagtggcagcatgttgttgcagtgcctctgaaagacaaggtcttggtttgtttgaaaatttgagataaatttggaagcagttaactcatttgatagaagaagtacttgattcttctgagaattgttcagatttgtatcttgccattctaatattttttcttttaaaaatgtattgggtggggcagaatttgcttaaatatttaaatagttggttattgggatttttgtgaacttcttctttaagtagcaagtagtgtggtctttaggatttttaaaggagatacatgtgaagtgcaaaattcttgtatgaggtggaatatgaaaatagaatttattttatttactaaaaccagatccttctttgggattgcagggcttcctgaagaatgagaaggacaatgccctgctgtctgccatcgaagagtcccggaagaggaccttcggcatggctgaggagtaccatcgggagtcaatgttggttgagtgggagcaagtgaaacagcgaattctgcacacactgctggcatcaggagaagacgcccttgactttactcaagaaagcgag

SEQ ID NO: 14420 - DNA, 315 bp, Homo sapiens
  source 1..315: mol_type = unassigned DNA
attcggctcctcttggcattggagttctggatttacccatgactaagattcctttgaaactctgacccagtgcagcattgcaaagaatcgatttctgagatgagacaatgagatgtggtttgcattttgtaaagatggaggaaacctctaacactgaccctgtatgggagatgactcaattatccacgccttgggcttcctgaagaatgagaaggacaatgccctgctgtctgccatcgaagagtcccggaagaggaccttcggcatggctgaggagtaccatcgggagtcaatgttggttgagtgggagcaagt

SEQ ID NO: 14421 - DNA, 8257 bp, Homo sapiens
  source 1..8257: mol_type = unassigned DNA
attgcaaagaatcgatttctgagatgagacaatgagatgtggtttgcattttgtaaagatggaggaaacctctaacactgaccctgtatgggagatgactcaattatccacgccttggtacagttgcaaattatttccctttgtctgaagtgggtggatgccagcgccttcatcagagctccttaatttaatgtatggaaaatgtctcagccaccatttttaacaattagctgtatcatggtcgaggtgagctgtattctgaaggcagctgcaaggccatttcatttacattaggttccatggcacaggagctttgttactgtaaaactaagaaaatgaatttgcacattgtatagaagagttctttaggaaggtggagaatattcccagaaagaaaatggaattcttttgtctacaggcttcctgaagaatgagaaggacaatgccctgctgtctgccatcgaagagtcccggaagaggaccttcggcatggctgaggagtaccatcgggagtcaatgttggttgagtgggagcaagtgaaacagcgaattctgcacacactgctggcatcaggagaagacgcccttgactttactcaagaaagcgagccaagctacatcagtgatgtgggaccccctggtcgaagctctctggataacatcgagatggcctatgcgcggcaaatttatatctataatgagaaaattgtaaatggacacctgcagcctaacctggtggacctttgtgcttccgtcgcagagctcgatgataagagcatttccgacatgtggaccatggtaaaacaaatgacagacgtgttgttgacaccggcaacggatgccctgaagaaccgcagcagcgtggaagtgcgcatggagtttgtcaggcaggccttggcgtaccttgagcagagttataagaattacacccttgtgactgtctttggaaatttgcatcaggcccagctgggcggggtgcctgggacttaccaattggttcgaagtttcctgaacattaaactgccagctcccttgcctggactacaggatggagaggtggaaggccatcctgtgtgggcgctaatttactactgcatgcgctgtggagacctgcttgccgcttcacaggtagttaatcgagcccagcaccagctgggagagtttaaaacctggttccaggagtacatgaacagcaaggacagaagattgtccccagctacggaaaacaagctccggctgcattaccgtagggccctcaggaacaatacagatccctacaagcgggccgtgtactgtatcattggcagatgtgacgtcaccgacaaccagagtgaagtggcggacaaaactgaggattacctgtggctgaagttgaaccaagtgtgttttgacgacgatggcaccagctccccacaagacaggctcactctctcacagttccagaagcagttgttggaagactatggcgagtcccactttacggtgaaccagcaacccttcctctacttccaagtcctgttcctgacagcgcagtttgaagcagcagttgcctttcttttccgcatggagcggctgcgctgccatgctgtccatgtagcactggtgctgtttgagctgaagctgcttttaaagtcctctggacagagtgctcagctcctcagccacgagcctggtgaccctccttgcttgcggcggctgaacttcgtgcggctcctcatgctgtacacccggaagtttgagtccacggacccaagggaggccctccagtacttctatttcctcagggatgagaaagatagtcaaggagaaaacatgtttctgcgctgtgtgagtgagcttgtgattgaaagccgagagttcgatatgattcttgggaaactagagaatgacggaagtagaaagcctggagtcatagataagtttactagtgacacaaagcctattatcaacaaagttgcttctgtggcagaaaataaaggactgtttgaagaggcagcaaagctgtatgaccttgccaagaatgctgacaaggtactggagctgatgaacaaactgctgagccctgtcgtcccccagatcagtgccccgcaatccaacaaggagaggctgaagaacatggcactctccattgccgaacggtatagggctcaaggaataagcgcaaataaatttgtggactccacgttctatcttcttttggacttgatcaccttttttgacgagtatcatagtggtcatattgatagagcttttgatatcattgagcgcttgaagctggtgcccctgaatcaggaaagtgtggaagagagagtggctgccttcagaaatttcagtgatgaaatcaggcacaacctctcagaagtgcttcttgccaccatgaacatcttgttcacacagtttaagaggctcaaggggacaagtccatcctcgtcatccaggccccagcgagtcatcgaggaccgcgactctcaactccgaagtcaagcccgcactctgattacctttgctggaatgataccataccgaacgtctggggacaccaatgcgaggctggtgcagatggaggtcctcatgaattaagtgccatgctttgtgggagtctgggtcggcacactgtcagtacatcaggcacatgggcccactaggctggggtttctggttttgtttctgttgtgttttgttttggtttctgtattatgtatttttgtcaacgccaataaatttctttgatttgtatttcttttcaacattcttttattttctttttttttttctttgaaattttgtttacatttttatttgtgtaatgggaaataccgtcactagctcttgggccagggaatgagaggctatgtagatattcattatttggttaaattgaccttaattaattaaaaatctacccaaaatgagccaggaaacaaagcctttgggagttacttttatttagatataatattccatatagcagagtcacgattcattttcacatttttatttgaatgtgaaagtcaacctcagccttagaagatgtaagatttgtgtgtgaaatatcaagcactccatgtcctcctctagagagtgtgacttaagtccagatggtccaagaccatcccccaaatcatcagctctgattgcaggattcatcagtttgccgttctgttgcaatcccagtggagataaaagcatagacctagaaaaagccttaagaaggaaggttgcaagtgcccccagcttgcacttgaggaaggggtaaaccttgccactgcactcctctgtagctgctccactgtgagttgactgctcggccttgtacacacccctcctagaaagacgtttaagcccctatttcccttctctggtggtcagttcctctgctcagacgacccccttccccactcattaaggtaattggccaggcaggctcatgggtcacgtgctgagtctgcaatgtacagaatccagaccaccacatggcatcagcaccatgggtgtttgctccctgagcagtagttgtcacccatcatttgctctgtttcccccaccatcagtcccaaagccctagactaaaccagagagcaaattaggtcgtgtttgttcctgaatgggccaactggagccttgagacagtgggcagtggtctgctctgctggtttgatggacggctccctgaggtagactctttcccagcagaatgttaagatccccaaagggtccccaaaggtgcctttgcttgtagggagaagtttctgtcttgtcacagggtgtggtcatccccactgtctcccagttgttaaaataattgttaccttttcttttgggaagaaataatctgtagataatggaaccaactgctgcttatcggtaggattccatgttccaggaaggatgcggcctgagggtcagtggagctgtgttctgccttcctcctctagtcccatcttgtcaccctggaggactgtcttcaattgagctttactagaaagtcttgaaacatgagccctgcagaggccttgatttagcaagttgtgccctgcttatatgtgctgatttaagctaatcaaatgatttaatagtgctttttaaaaaagagtactcctggccgggtggggtggctcacacctgtaatcctagcactttgggaggccaaggcaggtgatcacctgagatcaggagttcaagaccagcctggccaacattgtgacaccccgtctatactaaaaatacaaaaattagccgggcatggtggcaggcacctgtaatcccagctacacaggaagctgagacagaattgcttgaacccgggaggcgaaggttgcagtgatctgagatcatgccactgcactccagcctgggtgaaagagcgatactccgtctcaaaaaaataaagagtactctggccgagtgcagtggctcacgcctgtaaccccagcactttgggaggccaaggcaggcagttcgcttgaggtaaggggtttgagaccagtctggccaacatggggaaaccccgtttctactaaaaatacaaaaatcagctgggcatggtggcaggcgcctgtaatcccagctactcgggaggctgaggcaggagaatcacttgaacccaagaggcggaggttgcagtgagccgagcttatgccactgcactccagcctaggcgatggagtgaggctctgattcaaaaataaaaataagagtactctgtggacttttcataaagtgcaacttagtgctttgtttttctaatactagattttacttgcagatagaaatataacaatgccacaaatgagaaggctcaagttgtttaaatacatgtttgctcctggcttacctcttcttcactatcccatgagaatcgtggatttgcctttccttgcatcctgcagttctacttgtctcagagagaactgcacaccagccctgcatccaggggatgaggttctttgacctgtagatgggtcctaaaatgagaagggagagaagcagccagaccttgagctgctctgctaggggagctgtgagttgggagaaaagtggtcactggttggcagttaaggacttgctgagagagacatttgtaggagaaagaagataagtaggttcataccagaagggccaggactcggatggagcaaatcccagttcttgtcctacaagctgattgtgcgattgagcacaggcctctggaattgtgcagagatgagaaacaggctgaatttgcaaggccacaacatcaggttgtcatgtacccatcattacagcttatgcccagaagtcctgaccctgtgacaggttattatcttaaaaactcatcttcagcccactttttcagagaactaactctttccttagatgttgggccaggatttcactatttacccagagaaactaagagaaagtggcactaggcgtcttgtcttccagatgtgagatttcgatctttctaatgaaattgggggcactttgagactgtcagggtttgttcctgtctcagaatggctcataataaactcactgaaacactcaaaggaaagtactgacttgatctggatccttttcagaggcctggagatttaatttcacagattctcttcttttggctcaacaacaacagcaacaaaaaactctttgactccccaacttcagagggaaaactgaagcgaaactggtgagctctgccacggcagatgccttcctttttcactcacgagctgggcgggctcatcaaagagcaggaagtgcccattttacactggggccaggatgcagacccagctcctgtcctccgcgaacttacagtctaattagagcctcttaaggacaatttggcagccactgttaactcttgatgcatcatttaaatcctagaacaggcagctttaaagcaaagaactacagacttttccgcagtgtccagcatttgctgaccaaaaaaaacctgagggtgatttttctctctttgaatttttacccttgcctgcacctagccagaacccttaatactaaatttgcagttatatgcagctctgccaacgccttcctgctttagactggatctctactatcctttttctctactaggcaccagaacctttgtctagttcattaggtggttcacatcacttgccaaatttccagcatgccactcaggaagtgacttgagcatgctgaatgctgagtcagaaaatgaacccctgggctggcgggttgacccaggcctgacaaagtcttggcagtccccacactgactgcgaactctcccttagcctcagtcagctgggaaaggaattgagccctgtgtcagcaaattgggagaaagtgttacatataaaattcttgatggaaatgtgtgttttatatcagaattgagcttttgttcctgcatctcagaaataccaggaagaagtcagcatctcattaaacaggagttgtctaaactgtggaagaaaatatcccccattctttatcctacgctgaatccacaagtcttcccatcttccaccatcttctgacagttccataatatattggtatccctcacagggcagggacaggaaggaaataaatctttctgccacttgtttccaaccgaaaaggaaaaaagttaaaaattactaaagtgttctgaaaagagatttcaagtggtctgtgctgcttttttgccttgttacgcacataacttgtgactggctagataggccacgtgtatttatcagccaagattccattgcagcagatgatttcaaaacctctttgtgtgctgggccgtgctaggtagctggaatatctgaggtaaattaagcactgatttgttcccagagttgtgcataattctttaaaagtaggctcgtttttttcgtttttttgtccaggatcacctaagtgaagtactcgtggttctaagttgctaacccagggaaagaggatattttcctgtcctaaccttggtttttgaaatatgcttctcctgtgtgccctctctggggtatctggcccacagtagattgctcagcagatatttgaatgagcagatgctttgctttgtcctcctgtgccaggctcctccccacatcctctggatcagctccacgtgcctagattcagactccgtgattcaccgtgggggcccttaataggcattcagtctgaaagaaggtggaggagaataatgtctcccaggatcaaatgagactcagggctgttccttcaaagacagaaacttgcagagctgcacagcagcagggaaacattgagaagggggtggaaatttgatgtactgtgaataatgaaggccggatctttaaaaagaaaaagggacggggtgctggcagaaacccagctctgcgctagcacaatctgtacacctggctgcctttgcccttgagcttctatttcttggggatggggagggcaaaaaagtttgccccagacactggcttctgtttgaacaggaagtggggagtcagtgatcccagaggggacttcagcatcaggacatatgctttggtggcctcagcagacctggcctaggcaggctttcaggtggcacccaggggctttatggcctgcaggtaaggccccttcatccgggtcagacttagcaaataaaaatataggacactcaattaagtttgcattttggataaacagtgaagaagttcctagtgtaagtatgtcccagttctatgtggctgccctacctgggcttgcctctgctggtactagctgcccagagaccttcaggcctgccacgggctgccgggagctctctagtggaattggattaccctgattttgtgcattgtttgtgcttttgtgggcatcggaaatgactgagatacgcagttttgaagagctaggcaggcagctgagcgggataatgtgggccccagttgacctcagtggctgtcatctactgtgtttttcaaccaggaatttcaaatactgtgtattttagaaagaaaggaaagagccaaagtacagccttttctcacttgatcagtaacttgtgttagaaactcagtgggggagaattctttgcgtttttcagttgactgattattttcctttttttcttttttgcttttctcgagtcactctgtgtggtgcttgtgggagaagggagagggtgggagagcgttggtggatgtgttctgcatgttcctttctgtacagtaacttctgcatttactctgtttaggatggttccttcaccactatccctgtctgtagccagtaaatttctggaatattc

SEQ ID NO: 14422 - DNA, 762 bp, Homo sapiens
  source 1..762: mol_type = unassigned DNA
gttaagggaaggattcactcctgtccatcactgcttgagtgctgctgggttgtgcaatggagttctaattccctggcatttctcacctgcccatgaaggcctcagcaaatagaaaaccggcaggccaatagatacaggtgcaggtagttgcaagtcaggttaaagcgatggtaccgaggggaggggatggggcagagacagtgtctcttaccccggatgaaggaaggcttccctgcttttatgtgtttgggacctgggacgctttcagatgcccttgaggatttttattgagtatgtatctatctgtctgttcccttatgtctgtagattgtccccagctacggaaaacaagctccggctgcattaccgtagggccctcaggaacaatacagatccctacaagcgggccgtgtactgtatcattggcagatgtgacgtcaccgacaaccagagtgaagtggcggacaaaactgaggattacctgtggctgaagttgaaccaagtgtgttttgacgacgatggcaccagctccccacaagacaggctcactctctcacagttccagaagcagttgttggaagactatggcgagtcccactttacggtgaaccagcaacccttcctctacttccaagtcctgttcctgacagcgcagtttgaagcagcagttgcctttcttttccgcatggagcggctgcgctgccatgctgtccatgtagcactggtgctgtttgagctgaagctgcttttaaagtcctctgg

SEQ ID NO: 14423 - DNA, 477 bp, Homo sapiens
  source 1..477: mol_type = unassigned DNA
agtgacacaaagcctattatcaacaaagttgcttctgtggcagaaaataaaggactgtttgaagaggcagcaaagctgtatgaccttgccaagaatgctgacaaggtactggagctgatgaacaaactgctgagccctgtcgtcccccagatcagtgccccgcaatccaacaaggagaggctgaagaacatggcactctccattgccgaacggtatagggctcaaggaataagcgcaaataaatttgtggactccacgttctatcttcttttggacttgatcaccttttttgacgagtatcatagtggtcatattgatagagcttttgatgtaagtttcaggaaaggtgtttgaagtgcaggttaatgtacaccctcgaaaattcaaaacacttcatggaatttacttaaaacaaaggagctgttgccagtatgtttgttgtataaagaaagacaagtacaatcctgggacttaaaa

SEQ ID NO: 14424 - DNA, 635 bp, Homo sapiens
  source 1..635: mol_type = unassigned DNA
ggagctgatgaacaaactgctgagccctgtcgtcccccagatcagtgccccgcaatccaacaaggagaggctgaagaacatggcactctccattgccgaacggtatagggctcaaggaataagcgcaaataaatttgtggactccacgttctatcttcttttggacttgatcaccttttttgacgagtatcatagtggtcatattgatagagcttttgatatcattgagcgcttgaagctggtgcccctgaatcaggaaagtgtggaagagagagtggctgccttcagaaatttcagtgatgaagtaagttccttcttcctgagttgtggaattcctttttccccacttccaccaaaagctttttcttttcctgtacctaacagctttaagaattctagttacagtaactatccagactgagttttccagagtggttccctttcagataccttggcctggcttttctgtgagtgcatacatccccatcagattattgtctgaattcctaattgagaaaatacagtcacttcagtgattgacatgttcttgggagaaacaggtttctggttgatctgtgaagtctggtttaattcttctattatccgcttgtgctagagggtattttagtgcttaa

SEQ ID NO: 14425 - DNA, 410 bp, Homo sapiens
  source 1..410: mol_type = unassigned DNA
ttggacttgatcaccttttttgacgagtatcatagtggtcatattgatagagcttttgatatcattgagcgcttgaagctggtgcccctgaatcaggaaagtgtggaagagagagtggctgccttcagaaatttcagtgatgaacaactccgaagtcaagcccgcactctgattacctttgctggaatgataccataccgaacgtctggggacaccaatgcgaggctggtgcagatggaggtcctcatgaattaagtgccatgctttgtgggagtctgggtcggcacactgtcagtacatcaggcacatgggcccactaggctggggtttctggttttgtttctgttgtgttttgttttggtttctgtattatgtatttttgtcaacgccaataaatttctttgatttgt

SEQ ID NO: 14426 - DNA, 588 bp, Homo sapiens
  source 1..588: mol_type = unassigned DNA
ggaggaatggcgttttctatgaagaagccctttggagtatgtgaggtgctgactttacatgtagagagatgaaatgactgtgatggttgtgttacatggggccggtggttgttttaaacagatcattgagcgcttgaagctggtgcccctgaatcaggaaagtgtggaagagagagtggctgccttcagaaatttcagtgatgaaatcaggcacaacctctcagaagtgcttcttgccaccatgaacatcttgttcacacagtttaagaggctcaaggggacaagtccatcctcgtcatccaggccccagcgagtcatcgaggaccgcgactctcaactccgaagtcaagcccgcactctgattacctttgctggaatgataccataccgaacgtctggggacaccaatgcgaggctggtgcagatggaggtcctcatgaattaagtgccatgctttgtgggagtctgggtcggcacactgtcagtacatcaggcacatgggcccactaggctggggtttctggttttgtttctgttgtgttttgttttggtttctgtattatgtatttttgtcaacgccaataaatt

SEQ ID NO: 14427 - DNA, 458 bp, Homo sapiens
  source 1..458: mol_type = unassigned DNA
tccatctgtggttggccccaaaggcttggttctttttctttactctgtttttctctctatgtagatcaggcacaacctctcagaagtgcttcttgccaccatgaacatcttgttcacacagtttaagaggctcaaggggacaagtccatcctcgtcatccaggccccagcgagtcatcgaggaccgcgactctcaactccgaagtcaagcccgcactctgattacctttgctggaatgataccataccgaacgtctggggacaccaatgcgaggctggtgcagatggaggtcctcatgaattaagtgccatgctttgtgggagtctgggtcggcacactgtcagtacatcaggcacatgggcccactaggctggggtttctggttttgtttctgttgtgttttgttttggtttctgtattatgtatttttgtcaacgccaataaatttctttgatttg

SEQ ID NO: 14428 - DNA, 8393 bp, Homo sapiens
  source 1..8393: mol_type = unassigned DNA
gaggagtctaaattggtcgttcaactaccagcaaaggctaaagagaggctggagcccccaggacagccagaacgctgacactgcaaagggcctctgtccttactggggaagcccagtcctgctcagctgtcttcttcagcaacaaacagaagtccagaaagagaaacagttgtggaggaagctgttgtgatgataatttactgagcacctactatgtgccaggcacgccagccttaccagacaagatccttgggctcatggaattcactttctcgtgggacagacaaacaataacatgtagaaacatatcagctgttgcaggcagtaaccaagggagcgtggccaggcgctgaagtgaattcgggtccaaggagcctgctgggacccaggaaaacgagagaaggaacagaaattgtggtggaggcaaattcaagatcagaagattggggaggaggtgctaagagaggtctggagagatgctgggacccagaactggggcctcagtgagatcagcaggctgcagctaaactgtggtatccagaccatgcggccgatgccctgggagggagaccacttgcttaagtcctccaggagggcgatggaggagccggcattccaaccaggctcacggatgccaagatatggatgcagagagggaagccctgcagagcactgcctaccctgaagtgccagaccttctgccagaggcacggcttgatgtttgaggtcgttgatctgaggtggggtattcggaacattgaagccactgaccacttgaccacagaactctgcttggaggaggttgaccggtgttggaaaacatccatagggccagcttttgttgccctcatcggtgatcagtacggcccctgtctgattccctcgcggatcgatgagaaggagtgggaggtattgagggaccatctgactgccaggccaagtgacctggagctggtggcacgatacttccagagggacgagaatgcgtttcctcccacctacgtcctgcaggcaccaggtactggggaggcctgtgaaccagaggaggccaccttaacttctgtcctacgctctggagcccaggaggcccggaggctggggctcatcacccaggagcagtggcagcactaccaccggtcaggtgaggccgcagggactcccctctggagacccacaagaaactgaccacgtgttcagaatatccatcccctgttggcaaaaatgcaacagtctgcatttcttgcaaatgccaaaccagtcaacctctggtccctcggctctgagaaaggctgttttactgatccaagatagttcagccatgttcctgatcaatcttggtctcaggatcttcctctcctcgctggctctttcttcttgtctcccagggaggttcctggcacaggggccgtattagtctgttctcatgccactaataaaggcatacttgaggctgggtaatttacaaaggaaagaggtttaatggactcacaattccacatggctggggaggcctcacaatcatggctgaaggcaaaggagaagcaaagaggcacatcttacatggtggcagtcattgagtgggagatagagcggagcctgctgagctcagaggaccgggaacagggagccaccgtcttccttagagagatccaagacctccacaaacacatccttgaagactgcgcccttaggatggtggaccggctcgcggatggctgcctggacgctgatgcccagaaccttctcagcagcctcaaaagtcacatcactgacatgcacccaggggtcctcaagacccaccgcctgccgtggagccgcgacttggtgaaccccaagaacaagactcacgcctgctacctgaaggagctgggtgagcagtttgtggtgagggccaatcaccaggtcctcacacgcctccgtgagctggatacggccggacaggagttggcgtggctctaccaagagatccgccaccacctttggcagagctcggaggtcattcagaccttctgcggacgccaggaactcctggcccggcttgggcagcagctcaggcacgatgacagcaagcagcacacccccctggtactctttgggcccccaggcattggaaagacagccctgatgtgcaagctggctgagcagatgccaaggctgctggggcacaagacagtgaccgtcctgcggctgctggggacgtcacaaatgagctcagatgcccgtggcctgctgaagagcatctgcttccaggtgtgcctggcctatgggctgcccttgccccctgcccaggttctggacgcccacaccagggtggtccagtttttccataccctcctccacactgtctcttgcagaaacttcgagtctctcgtgctcctgctggatgctatggatgacctggactctgtccgccatgctcggagggttccctggctgcctctcaactgccccccgagggtgcacctcatcctctcagcttgctcgggggcactgggggttttggacaccttgcagcgggtgctcctggacccggaggcctactgggaggtgaagcccctttccggaaaccaaggccagcagatgatccaactcctgctggcagctgcaaggaggacgctgagcccggtgcacacagatttgctctgggccagcctcccagagtgtgggaacccagggcggctgaggctggcgtttgaggaagcccggaaatgggcctctttcaccgtgcctgtcccgctggccaccaccgcagaggaagccacgcaccaactctgcacccgcctggagcagacacacgggcagctcctcgtggcccacgtgctgggctacattgtgtcttcccgacacggtctctcggaggcggagctgaaggatgttttgtccctggacgacgaggtcctgcaggatgtgtaccgagattggaccccgcccagcaaggagctgctgcgcttcccgcccctgctgtgggtgcggcttcgtcgggatctgggatactacttggcccggcggcccgtggatggcttcaccctcctggccattgcccacagacagctggtcgaggtggtccgtgagcgctacctgtcaggatccgagagagccaagaggcatggcgtcctggccgacttcttctcagggacctggagccagggtaccaagaagctcatcactctgccacttgtggggaaaccactgaacttggaccgaaaggtggccccgcagcctctgtggttctcacatacggttgcaaacctgcggaagctgaaggagttgccctatcacctgcttcactcgggccgcctggaggagctgaaacaggaggttctgggcagcatgagctggatttcctgccggggcatctctgggggcattgaagacctgctggatgactttgacctgtgtgcccctcacctggactcccctgaggttggcctggtccgtgaagccctccagctctgccgccctgctgtggagctccgaggcatggagaggagcctcctgtacacagaactgctggccagactccatttcttcgccacctcacatccagcactggtgggacagctatgccaacaggcccagagctggttccagttgtgcgcacaccctgtgctggtgcccctcggaggattcctccagcccccgggaggacccctccgggcaactctcagcggctgtcacaaaggcatcaccgccatggcatggggtgtggaggagaagctgctggtgattggcacccaggatggcatcatggctgtgtgggacatggaagagcagcatgtgatccacatgctaactggacacacaggagaggtgaggtgtgtgaaaatatttgccaaagggaccctcgccaactctgcttcaaaggattacacgctgcacttgtggaacttactctctggccaggagaaatttaccatttgggatggaggctcaaaaaatcccgctgaacctcagatctggaaccttcatgtggatgaggcacacaaagttgtgtattcagcatctggctcaaagatcaatgcttggaatctggaaactgcagagccggtattccatatcctgggagatgcctctgatccttggatgtgcatggccgtgctggcctcccaggccacactgctgacagtgtccagggatggtgtggtcagtctgtggagctcagctacgggaaaacttcaggggaagcaacatatgtccagcatcaaagaagaaacacctacctgtgccgtctcagtccagaagcaaggaaagcttgttaccgggtttagcaatggctccatctctttggtttcctccaaaggggacagattgctggagaagcttccagatgctgtgaggttcctggtggtctctgaagatgagtccctcctcgccgcaggctttggaagatcggtgcggatattcttggcggactcgaggggctttcgccgattcatggccatggatctggaacatgaagacatggtggagacggctgtttttggtactgagaacaacctgatcatcacggggtcccttgatgcgctcattcaggtgtggagtctgtcagaacaggggacccttctggacatcctggaaggcgtcggggcccccgtgagcctgctggcccgcggcggggctttggtggcatctgcttccccacagtcctcatctttcaaggtctgggatctcagcgatgctcataggtcccgggtgcctgcaccatttctggaccgcaccggcctcaccgcagtgtcccacaatggaagctacgtctacttccccaaaattggggacaaaaacaaagtcactatttgggacttggcagaaggcgaggaacaagattccctggacacctccagtgagatcaggtgtctggaggttgctgagcagcgcaagctcctatttacgggcctcgtgtcgggggtcgtccttgtgttccccctgaattccaggcaggacgtgatatgcattccccctcccgaggcccggaaagcaatcaactgcatgtccctgagcaagtgcgaggaccgcctggccatcgcctatgacaacatcgtcctggtgctggacatcacctccggggacccctgcccggtcatcgatgggccaagatacaccttttacactcagctgcccgagaccctctccagcgtggccattctgacggactaccgcgtggtctacagcatgaccaatggggacctctttctttacgagtgtgcaacttccaaagcgtttcccttggagacccacaggagccgagttgcctgtgtggaggtcagccacaaggagcagctggtggtcagcgggtctgaggatgccctgctgtgtctctgggacctgcaggcacgcaagtggaaattcgagatgagctacacgagttcttactgcagaggggtccaatgtgcttgcttctccaaggatgacaagtatgtgtacgtgggcttaaaggatcgctctatacttgtttggagtgtgctggatggcaccctgctgacagtccagtttgtccatgctgtggtaaacagaatcatcccaaccaccagtggcttcattgcccccaccaggcatggttatctgatccgagagaatttccagtgcctttcagcaaaagcctcaccgcaggaccctcttaagaacttcaagaaggcaatgtggatggtcaaatccaggcagagagaggagctagttgcagctgcaggagctccccaggacttggagtcagaaagtgcccagggaaatgaaaccaaatcaaacaaatgctcacaagtgtgcctgatagtgtaaaaaaataaaaataaaaaaaccctgtgggggtatggggctccagtgagttagccccatttaatctagttaaagcaaaaagaatacgtttgctggtgtatatctggacccatggcttcagattatggcttcagaccttgtctcttctcatctttccattattctttcctctttttcattttcattctcagacttgccacccccaggttagcaacatggtggccaatatgctgctgtctccaatttcaatagaaaagagagcttctctttcccaacagtcctagcctcaactctactggtcccaattggcccatacgcctagccctaaaccaattattatatctgggagaatgcagagctctaatcggctagactgatccaatgtccaccactgggactgagaatagaagagattactcctgagatgcaaactggagttctggtaccagatgaagggggaacggatgaatgtgagatacagcaaatcactgatgtggaccacagaacctcacagtttataaagctgtaggtgctgtcatctgatcctcatcacaactcatactttagggagggcaggagtttctgtatctattttacagatgaggaaactgagccttgcggaagtagttataatttgattcaggtcacaagtccaaggtgcaagagctctgagagtgagccttctgtcccattcctgttagacctcactccaatttcagtctgcagagcacaaccatctcttccacaggcaccacactcaaatgctcacaggagctagtgactaatctagacacttccatgcacctgggtgagcagcagggagagacagagactggacatgtggaaggcagagattgtgtctagggtgggtatgagcagcctgactgtagcccagaatcaccatggccaaacaagcccactgctgtcagtgcttccagttgtaataagcaaagccagaaatccagacttttatgcaaaaatgttctgacttttaaagttggcgattggttgaatttatatctatagtgcatttggcatgtgcgtctttggttaatgagctgacttcaggactcacgctggcagtaaaacaatcaacatgttatagttcatccctctctattccttggctcccaaacttttgggataaagatgtgggtttttaatcttaaaaactggaggctcttggaagtagaaagagctgctgatctctccctgctttgcttttgaactgtctgccttgtgcaagttcaacagtcaaactgttttcattccacttaagtggatctttcttctttgcccacagccttctaaaagcccttctcagtcttctcaggcttttactttaatgctaggatagtctaaatcttcaaggtggctatcccttctcccctccgtggaattcctgatagagtctcaataaaagcaaccttagaaacagaggcttttgagctgaacaagaccctactgctgtcttattcatccattttccaaaccagttttccaaggcaggttttggtagttctgcaaatgttagtgtcaaatttcatttaaaaatattttaaactgtaattttaagatgtatgcttggatgtattgggcagcagcttctaaggtgttgaagattactaaggttggtgcaaaaagtaactgtggttttcgccattaaaaatattaaaaataatggcaaaaactggctgggcacagtggctcacacctgtggtcccagctctttggaaggccgaggcaggtggatcacctgaggtcaggagtttgagaccagcctggacaacatggtgaaacccttctctactaaaaatacaaaaatcagccaggcatggtggtgagtgcctgtaatctcagttactcaggaggctgagtcaggagaatcacttgaacccgggaggcggaggttgcagtgagctgagattgtgccactgcactccagcctgggtgacagagcaagactccatctcataataataataataatggcaaaagcctcggtggctcacgcctgtaatcccagcactttgggaggctgaggcgggtggatcacttgaggccaggtgttcaagagcagcctggtcaacatggtgaaactctgtctctactcaaaaatacaaaaattagcctggtgtggtgacgtacacctgtaattccagctacttgggaggctgaggcaggagaatggcttgaacccgggaggcggaggttgcagtgagccgagatcgcaccactgcactccagcatgagtgacagagactctgtctccaaaaaaaaaaaaaaaaaaaagtaatggcaaaaaccacaattaattttgcatcaacctaataatttaggattcttctgccattttcatttaactgatttaactgaagagcccaattaaattgtgaagggagccctgaaaaaattagctactctttgccactgcttctctgtgaatcaagggcttacccaatgcagaaataaagtagatgttgagaccaattaagatttcacctacaaattctgattttaaatgcctgtgtccatctccacagcctcagtgagaattgattgttttgtagataaatcctaatttaaacattggaaatgcctttttactaataaaatgctacaacaaa

SEQ ID NO: 14429 - DNA, 7641 bp, Homo sapiens
  source 1..7641: mol_type = unassigned DNA
agtctaaattggtcgttcaactaccagcaaaggctaaagagaggctggagcccccaggacagccagaacgctgacactgcaaagggcctctgtccttactggggaagcccagtcctgctcagctgtcttcttcagcaacaaacagaagtccagaaagagaaacagttgtggaggaagctgttgtgatgataatttactgagcacctactatgtgccaggcacgccagccttaccagacaagatccttgggctcatggaattcactttctcgtgggacagacaaacaataacatgtagaaacatatcagctgttgaccatgcggccgatgccctgggagggagaccacttgcttaagtcctccaggagggcgatggaggagccggcattccaaccaggctcacggatgccaagatatggatgcagagagggaagccctgcagagcactgcctaccctgaagtgccagaccttctgccagaggcacggcttgatgtttgaggtcgttgatctgaggtggggtattcggaacattgaagccactgaccacttgaccacagaactctgcttggaggaggttgaccggtgttggaaaacatccatagggccagcttttgttgccctcatcggtgatcagtacggcccctgtctgattccctcgcggatcgatgagaaggagtgggaggtattgagggaccatctgactgccaggccaagtgacctggagctggtggcacgatacttccagagggacgagaatgcgtttcctcccacctacgtcctgcaggcaccaggtactggggaggcctgtgaaccagaggaggccaccttaacttctgtcctacgctctggagcccaggaggcccggaggctggggctcatcacccaggagcagtggcagcactaccaccggtcagtcattgagtgggagatagagcggagcctgctgagctcagaggaccgggaacagggagccaccgtcttccttagagagatccaagacctccacaaacacatccttgaagactgcgcccttaggatggtggaccggctcgcggatggctgcctggacgctgatgcccagaaccttctcagcagcctcaaaagtcacatcactgacatgcacccaggggtcctcaagacccaccgcctgccgtggagccgcgacttggtgaaccccaagaacaagactcacgcctgctacctgaaggagctgggtgagcagtttgtggtgagggccaatcaccaggtcctcacacgcctccgtgagctggatacggccggacaggagttggcgtggctctaccaagagatccgccaccacctttggcagagctcggaggtcattcagaccttctgcggacgccaggaactcctggcccggcttgggcagcagctcaggcacgatgacagcaagcagcacacccccctggtactctttgggcccccaggcattggaaagacagccctgatgtgcaagctggctgagcagatgccaaggctgctggggcacaagacagtgaccgtcctgcggctgctggggacgtcacaaatgagctcagatgcccgtggcctgctgaagagcatctgcttccaggtgtgcctggcctatgggctgcccttgccccctgcccaggttctggacgcccacaccagggtggtccagtttttccataccctcctccacactgtctcttgcagaaacttcgagtctctcgtgctcctgctggatgctatggatgacctggactctgtccgccatgctcggagggttccctggctgcctctcaactgccccccgagggtgcacctcatcctctcagcttgctcgggggcactgggggttttggacaccttgcagcgggtgctcctggacccggaggcctactgggaggtgaagcccctttccggaaaccaaggccagcagatgatccaactcctgctggcagctgcaaggaggacgctgagcccggtgcacacagatttgctctgggccagcctcccagagtgtgggaacccagggcggctgaggctggcgtttgaggaagcccggaaatgggcctctttcaccgtgcctgtcccgctggccaccaccgcagaggaagccacgcaccaactctgcacccgcctggagcagacacacgggcagctcctcgtggcccacgtgctgggctacattgtgtcttcccgacacggtctctcggaggcggagctgaaggatgttttgtccctggacgacgaggtcctgcaggatgtgtaccgagattggaccccgcccagcaaggagctgctgcgcttcccgcccctgctgtgggtgcggcttcgtcgggatctgggatactacttggcccggcggcccgtggatggcttcaccctcctggccattgcccacagacagctggtcgaggtggtccgtgagcgctacctgtcaggatccgagagagccaagaggcatggcgtcctggccgacttcttctcagggacctggagccagggtaccaagaagctcatcactctgccacttgtggggaaaccactgaacttggaccgaaaggtggccccgcagcctctgtggttctcacatacggttgcaaacctgcggaagctgaaggagttgccctatcacctgcttcactcgggccgcctggaggagctgaaacaggaggttctgggcagcatgagctggatttcctgccggggcatctctgggggcattgaagacctgctggatgactttgacctgtgtgcccctcacctggactcccctgaggttggcctggtccgtgaagccctccagctctgccgccctgctgtggagctccgaggcatggagaggagcctcctgtacacagaactgctggccagactccatttcttcgccacctcacatccagcactggtgggacagctatgccaacaggcccagagctggttccagttgtgcgcacaccctgtgctggtgcccctcggaggattcctccagcccccgggaggacccctccgggcaactctcagcggctgtcacaaaggcatcaccgccatggcatggggtgtggaggagaagctgctggtgattggcacccaggatggcatcatggctgtgtgggacatggaagagcagcatgtgatccacatgctaactggacacacaggagaggtgaggtgtgtgaaaatatttgccaaagggaccctcgccaactctgcttcaaaggattacacgctgcacttgtggaacttactctctggccaggagaaatttaccatttgggatggaggctcaaaaaatcccgctgaacctcagatctggaaccttcatgtggatgaggcacacaaagttgtgtattcagcatctggctcaaagatcaatgcttggaatctggaaactgcagagccggtattccatatcctgggagatgcctctgatccttggatgtgcatggccgtgctggcctcccaggccacactgctgacagtgtccagggatggtgtggtcagtctgtggagctcagctacgggaaaacttcaggggaagcaacatatgtccagcatcaaagaagaaacacctacctgtgccgtctcagtccagaagcaaggaaagcttgttaccgggtttagcaatggctccatctctttggtttcctccaaaggggacagattgctggagaagcttccagatgctgtgaggttcctggtggtctctgaagatgagtccctcctcgccgcaggctttggaagatcggtgcggatattcttggcggactcgaggggctttcgccgattcatggccatggatctggaacatgaagacatggtggagacggctgtttttggtactgagaacaacctgatcatcacggggtcccttgatgcgctcattcaggtgtggagtctgtcagaacaggggacccttctggacatcctggaaggcgtcggggcccccgtgagcctgctggcccgcggcggggctttggtggcatctgcttccccacagtcctcatctttcaaggtctgggatctcagcgatgctcataggtcccgggtgcctgcaccatttctggaccgcaccggcctcaccgcagtgtcccacaatggaagctacgtctacttccccaaaattggggacaaaaacaaagtcactatttgggacttggcagaaggcgaggaacaagattccctggacacctccagtgagatcaggtgtctggaggttgctgagcagcgcaagctcctatttacgggcctcgtgtcgggggtcgtccttgtgttccccctgaattccaggcaggacgtgatatgcattccccctcccgaggcccggaaagcaatcaactgcatgtccctgagcaagtgcgaggaccgcctggccatcgcctatgacaacatcgtcctggtgctggacatcacctccggggacccctgcccggtcatcgatgggccaagatacaccttttacactcagctgcccgagaccctctccagcgtggccattctgacggactaccgcgtggtctacagcatgaccaatggggacctctttctttacgagtgtgcaacttccaaagcgtttcccttggagacccacaggagccgagttgcctgtgtggaggtcagccacaaggagcagctggtggtcagcgggtctgaggatgccctgctgtgtctctgggacctgcaggcacgcaagtggaaattcgagatgagctacacggcaccctgctgacagtccagtttgtccatgctgtggtaaacagaatcatcccaaccaccagtggcttcattgcccccaccaggcatggttatctgatccgagagaatttccagtgcctttcagcaaaagcctcaccgcaggaccctcttaagaacttcaagaaggcaatgtggatggtcaaatccaggcagagagaggagctagttgcagctgcaggagctccccaggacttggagtcagaaagtgcccagggaaatgaaaccaaatcaaacaaatgctcacaagtgtgcctgatagtgtaaaaaaataaaaataaaaaaaccctgtgggggtatggggctccagtgagttagccccatttaatctagttaaagcaaaaagaatacgtttgctggtgtatatctggacccatggcttcagattatggcttcagaccttgtctcttctcatctttccattattctttcctctttttcattttcattctcagacttgccacccccaggttagcaacatggtggccaatatgctgctgtctccaatttcaatagaaaagagagcttctctttcccaacagtcctagcctcaactctactggtcccaattggcccatacgcctagccctaaaccaattattatatctgggagaatgcagagctctaatcggctagactgatccaatgtccaccactgggactgagaatagaagagattactcctgagatgcaaactggagttctggtaccagatgaagggggaacggatgaatgtgagatacagcaaatcactgatgtggaccacagaacctcacagtttataaagctgtaggtgctgtcatctgatcctcatcacaactcatactttagggagggcaggagtttctgtatctattttacagatgaggaaactgagccttgcggaagtagttataatttgattcaggtcacaagtccaaggtgcaagagctctgagagtgagccttctgtcccattcctgttagacctcactccaatttcagtctgcagagcacaaccatctcttccacaggcaccacactcaaatgctcacaggagctagtgactaatctagacacttccatgcacctgggtgagcagcagggagagacagagactggacatgtggaaggcagagattgtgtctagggtgggtatgagcagcctgactgtagcccagaatcaccatggccaaacaagcccactgctgtcagtgcttccagttgtaataagcaaagccagaaatccagacttttatgcaaaaatgttctgacttttaaagttggcgattggttgaatttatatctatagtgcatttggcatgtgcgtctttggttaatgagctgacttcaggactcacgctggcagtaaaacaatcaacatgttatagttcatccctctctattccttggctcccaaacttttgggataaagatgtgggtttttaatcttaaaaactggaggctcttggaagtagaaagagctgctgatctctccctgctttgcttttgaactgtctgccttgtgcaagttcaacagtcaaactgttttcattccacttaagtggatctttcttctttgcccacagccttctaaaagcccttctcagtcttctcaggcttttactttaatgctaggatagtctaaatcttcaaggtggctatcccttctcccctccgtggaattcctgatagagtctcaataaaagcaaccttagaaacagaggcttttgagctgaacaagaccctactgctgtcttattcatccattttccaaaccagttttccaaggcaggttttggtagttctgcaaatgttagtgtcaaatttcatttaaaaatattttaaactgtaattttaagatgtatgcttggatgtattgggcagcagcttctaaggtgttgaagattactaaggttggtgcaaaaagtaactgtggttttcgccattaaaaatattaaaaataatggcaaaaactggctgggcacagtggctcacacctgtggtcccagctctttggaaggccgaggcaggtggatcacctgaggtcaggagtttgagaccagcctggacaacatggtgaaacccttctctactaaaaatacaaaaatcagccaggcatggtggtgagtgcctgtaatctcagttactcaggaggctgagtcaggagaatcacttgaacccgggaggcggaggttgcagtgagctgagattgtgccactgcactccagcctgggtgacagagcaagactccatctcataataataataataatggcaaaagcctcggtggctcacgcctgtaatcccagcactttgggaggctgaggcgggtggatcacttgaggccaggtgttcaagagcagcctggtcaacatggtgaaactctgtctctactcaaaaatacaaaaattagcctggtgtggtgacgtacacctgtaattccagctacttgggaggctgaggcaggagaatggcttgaacccgggaggcggaggttgcagtgagccgagatcgcaccactgcactccagcatgagtgacagagactctgtctccaaaaaaaaaaaaaaaaaaaagtaatggcaaaaaccacaattaattttgcatcaacctaataatttaggattcttctgccattttcatttaactgatttaactgaagagcccaattaaattgtgaagggagccctgaaaaaattagctactctttgccactgcttctctgtgaatcaagggcttacccaatgcagaaataaagtagatgttgagaccaattaagatttcacctacaaattctgattttaaatgcctgtgtccatctccacagcctcagtgagaattgattgttttgtagataaatcctaatttaaacattggaaatgcctttttactaataaaatgctacaacaaattattgctta

SEQ ID NO: 14430 - DNA, 6614 bp, Homo sapiens
  source 1..6614: mol_type = unassigned DNA
gctgacactgcaaagggcctctgtccttactggggaagcccagtcctgctcagctgtcttcttcagcaacaaacagaagtccagaaagagaaacagttgtggaggaagctgttgtgatgataatttactgagcacctactatgtgccaggcacgccagccttaccagacaagatccttgggctcatggaattcactttctcgtgggacagacaaacaataacatgtagaaacatatcagctgttgatatggatgcagagagggaagccctgcagagcactgcctaccctgaagtgccagaccttctgccagaggcacggcttgatgtttgaggtcgttgatctgaggtggggtattcggaacattgaagccactgaccacttgaccacagaactctgcttggaggaggttgaccggtgttggaaaacatccatagggccagcttttgttgccctcatcggtgatcagtacggcccctgtctgattccctcgcggatcgatgagaaggagtgggaggtattgagggaccatctgactgccaggccaagtgacctggagctggtggcacgatacttccagagggacgagaatgcgtttcctcccacctacgtcctgcaggcaccaggtactggggaggcctgtgaaccagaggaggccaccttaacttctgtcctacgctctggagcccaggaggcccggaggctggggctcatcacccaggagcagtggcagcactaccaccggtcagtcattgagtgggagatagagcggagcctgctgagctcagaggaccgggaacagggagccaccgtcttccttagagagatccaagacctccacaaacacatccttgaagactgcgcccttaggatggtggaccggctcgcggatggctgcctggacgctgatgcccagaaccttctcagcagcctcaaaagtcacatcactgacatgcacccaggggtcctcaagacccaccgcctgccgtggagccgcgacttggtgaaccccaagaacaagactcacgcctgctacctgaaggagctgggtgagcagtttgtggtgagggccaatcaccaggtcctcacacgcctccgtgagctggatacggccggacaggagttggcgtggctctaccaagagatccgccaccacctttggcagagctcggaggtcattcagaccttctgcggacgccaggaactcctggcccggcttgggcagcagctcaggcacgatgacagcaagcagcacacccccctggtactctttgggcccccaggcattggaaagacagccctgatgtgcaagctggctgagcagatgccaaggctgctggggcacaagacagtgaccgtcctgcggctgctggggacgtcacaaatgagctcagatgcccgtggcctgctgaagagcatctgcttccaggtgtgcctggcctatgggctgcccttgccccctgcccaggttctggacgcccacaccagggtggtccagtttttccataccctcctccacactgtctcttgcagaaacttcgagtctctcgtgctcctgctggatgctatggatgacctggactctgtccgccatgctcggagggttccctggctgcctctcaactgccccccgagggtgcacctcatcctctcagcttgctcgggggcactgggggttttggacaccttgcagcgggtgctcctggacccggaggcctactgggaggtgaagcccctttccggaaaccaaggccagcagatgatccaactcctgctggcagctgcaaggaggacgctgagcccggtgcacacagatttgctctgggccagcctcccagagtgtgggaacccagggcggctgaggctggcgtttgaggaagcccggaaatgggcctctttcaccgtgcctgtcccgctggccaccaccgcagaggaagccacgcaccaactctgcacccgcctggagcagacacacgggcagctcctcgtggcccacgtgctgggctacattgtgtcttcccgacacggtctctcggaggcggagctgaaggatgttttgtccctggacgacgaggtcctgcaggatgtgtaccgagattggaccccgcccagcaaggagctgctgcgcttcccgcccctgctgtgggtgcggcttcgtcgggatctgggatactacttggcccggcggcccgtggatggcttcaccctcctggccattgcccacagacagctggtcgaggtggtccgtgagcgctacctgtcaggatccgagagagccaagaggcatggcgtcctggccgacttcttctcagggacctggagccagggtaccaagaagctcatcactctgccacttgtggggaaaccactgaacttggaccgaaaggtggccccgcagcctctgtggttctcacatacggttgcaaacctgcggaagctgaaggagttgccctatcacctgcttcactcgggccgcctggaggagctgaaacaggaggttctgggcagcatgagctggatttcctgccggggcatctctgggggcattgaagacctgctggatgactttgacctgtgtgcccctcacctggactcccctgaggttggcctggtccgtgaagccctccagctctgccgccctgctgtggagctccgaggcatggagaggagcctcctgtacacagaactgctggccagactccatttcttcgccacctcacatccagcactggtgggacagctatgccaacaggcccagagctggttccagttgtgcgcacaccctgtgctggtgcccctcggaggattcctccagcccccgggaggacccctccgggcaactctcagcggctgtcacaaaggcatcaccgccatggcatggggtgtggaggagaagctgctggtgattggcacccaggatggcatcatggctgtgtgggacatggaagagcagcatgtgatccacatgctaactggacacacaggagaggtgaggtgtgtgaaaatatttgccaaagggaccctcgccaactctgcttcaaaggattacacgctgcacttgtggaacttactctctggccaggagaaatttaccatttgggatggaggctcaaaaaatcccgctgaacctcagatctggaaccttcatgtggatgaggcacacaaagttgtgtattcagcatctggctcaaagatcaatgcttggaatctggaaactgcagagccggtattccatatcctgggagatgcctctgatccttggatgtgcatggccgtgctggcctcccaggccacactgctgacagtgtccagggatggtgtggtcagtctgtggagctcagctacgggaaaacttcaggggaagcaacatatgtccagcatcaaagaagaaacacctacctgtgccgtctcagtccagaagcaaggaaagcttgttaccgggtttagcaatggctccatctctttggtttcctccaaaggggacagattgctggagaagcttccagatgctgtgaggttcctggtggtctctgaagatgagtccctcctcgccgcaggctttggaagatcggtgcggatattcttggcggactcgaggggctttcgccgattcatggccatggatctggaacatgaagacatggtggagacggctgtttttggtactgagaacaacctgatcatcacggggtcccttgatgcgctcattcaggtctgggatctcagcgatgctcataggtcccgggtgcctgcaccatttctggaccgcaccggcctcaccgcagtgtcccacaatggaagctacgtctacttccccaaaattggggacaaaaacaaagtcactatttgggacttggcagaaggcgaggaacaagattccctggacacctccagtgagatcaggtgtctggaggttgctgagcagcgcaagctcctatttacgggcctcgtgtcgggggtcgtccttgtgttccccctgaattccaggcaggacgtgatatgcattccccctcccgaggcccggaaagcaatcaactgcatgtccctgagcaagtgcgaggaccgcctggccatcgcctatgacaacatcgtcctggtgctggacatcacctccggggacccctgcccggtcatcgatgggccaagatacaccttttacactcagctgcccgagaccctctccagcgtggccattctgacggactaccgcgtggtctacagcatgaccaatggggacctctttctttacgagtgtgcaacttccaaagcgtttcccttggagacccacaggagccgagttgcctgtgtggaggtcagccacaaggagcagctggtggtcagcgggtctgaggatgccctgctgtgtctctgggacctgcaggcacgcaagtggaaattcgagatgagctacacgagttcttactgcagaggggtccaatgtgcttgcttctccaaggatgacaagtatgtgtacgtgggcttaaaggatcgctctatacttgtttggagtgtgctggatggcaccctgctgacagtccagtttgtccatgctgtggtaaacagaatcatcccaaccaccagtggcttcattgcccccaccaggcatggttatctgatccgagagaatttccagtgcctttcagcaaaagcctcaccgcaggaccctcttaagaacttcaagaaggcaatgtggatggtcaaatccaggcagagagaggagctagttgcagctgcaggagctccccaggacttggagtcagaaagtgcccagggaaatgaaaccaaatcaaacaaatgctcacaagtgtgcctgatagtgtaaaaaaataaaaataaaaaaaccctgtgggggtatggggctccagtgagttagccccatttaatctagttaaagcaaaaagaatacgtttgctggtgtatatctggacccatggcttcagattatggcttcagaccttgtctcttctcatctttccattattctttcctctttttcattttcattctcagacttgccacccccaggttagcaacatggtggccaatatgctgctgtctccaatttcaatagaaaagagagcttctctttcccaacagtcctagcctcaactctactggtcccaattggcccatacgcctagccctaaaccaattattatatctgggagaatgcagagctctaatcggctagactgatccaatgtccaccactgggactgagaatagaagagattactcctgagatgcaaactggagttctggtaccagatgaagggggaacggatgaatgtgagatacagcaaatcactgatgtggaccacagaacctcacagtttataaagctgtaggtgctgtcatctgatcctcatcacaactcatactttagggagggcaggagtttctgtatctattttacagatgaggaaactgagccttgcggaagtagttataatttgattcaggtcacaagtccaaggtgcaagagctctgagagtgagccttctgtcccattcctgttagacctcactccaatttcagtctgcagagcacaaccatctcttccacaggcaccacactcaaatgctcacaggagctagtgactaatctagacacttccatgcacctgggtgagcagcagggagagacagagactggacatgtggaaggcagagattgtgtctagggtgggtatgagcagcctgactgtagcccagaatcaccatggccaaacaagcccactgctgtcagtgcttccagttgtaataagcaaagccagaaatccagacttttatgcaaaaatgttctgacttttaaagttggcgattggttgaatttatatctatagtgcatttggcatgtgcgtctttggttaatgagctgacttcaggactcacgctggcagtaaaacaatcaacatgttatagttcatccctctctattccttggctcccaaacttttgggataaagatgtgggtttttaatcttaaaaactggaggctcttggaagtagaaagagctgctgatctctccctgctttgcttttgaactgtctgccttgtgcaagttcaacagtcaaactgttttcattccacttaagtggatctttcttctttgcccacagccttctaaaagcccttctcagtcttctcaggcttttactttaatgctaggatagtctaaatcttcaaggtggctatcccttctcccctccgtggaattcctgatagagtctcaataaaagcaaccttagaaacagaggcttttgagctgaacaagaccctactgctgtcttattcatccattttccaaaccagttttccaaggcaggttttggtagttctgcaaatgttagtgtcaaatttcatttaaaaatattttaaactgtaattttaagatgtatgcttggatgtattgggcagcagcttctaaggtgttgaagattactaaggttggtgcaaaaagtaactgtggttttcgccattaaaaatattaaaaataatggcaaaaactggctgggcacagtggctcacacctgtggtcccagctctttggaaggccgaggcaggtggatcacctgaggtcaggagtttgagaccagcctggacaacatggtga

SEQ ID NO: 14431 - DNA, 6162 bp, Homo sapiens
  source 1..6162: mol_type = unassigned DNA
tggatgcagagagggaagccctgcagagcactgcctaccctgaagtgccagaccttctgccagaggcacggcttgatgtttgaggtcgttgatctgaggtggggtattcggaacattgaagccactgaccacttgaccacagaactctgcttggaggaggttgaccggtgttggaaaacatccatagggccagcttttgttgagaaatgtgctgatccctgtcctggacagtaaagagggaaaaagtaaagaaaagtaccatggccaggccctcatcggtgatcagtacggcccctgtctgattccctcgcggatcgatgagaaggagtgggaggtattgagggaccatctgactgccaggccaagtgacctggagctggtggcacgatacttccagagggacgagaatgcgtttcctcccacctacgtcctgcaggcaccaggtactggggaggcctgtgaaccagaggaggccaccttaacttctgtcctacgctctggagcccaggaggcccggaggctggggctcatcacccaggagcagtggcagcactaccaccggtcagtcattgagtgggagatagagcggagcctgctgagctcagaggaccgggaacagggagccaccgtcttccttagagagatccaagacctccacaaacacatccttgaagactgcgcccttaggatggtggaccggctcgcggatggctgcctggacgctgatgcccagaaccttctcagcagcctcaaaagtcacatcactgacatgcacccaggggtcctcaagacccaccgcctgccgtggagccgcgacttggtgaaccccaagaacaagactcacgcctgctacctgaaggagctgggtgagcagtttgtggtgagggccaatcaccaggtcctcacacgcctccgtgagctggatacggccggacaggagttggcgtggctctaccaagagatccgccaccacctttggcagagctcggaggtcattcagaccttctgcggacgccaggaactcctggcccggcttgggcagcagctcaggcacgatgacagcaagcagcacacccccctggtactctttgggcccccaggcattggaaagacagccctgatgtgcaagctggctgagcagatgccaaggctgctggggcacaagacagtgaccgtcctgcggctgctggggacgtcacaaatgagctcagatgcccgtggcctgctgaagagcatctgcttccaggtgtgcctggcctatgggctgcccttgccccctgcccaggttctggacgcccacaccagggtggtccagtttttccataccctcctccacactgtctcttgcagaaacttcgagtctctcgtgctcctgctggatgctatggatgacctggactctgtccgccatgctcggagggttccctggctgcctctcaactgccccccgagggtgcacctcatcctctcagcttgctcgggggcactgggggttttggacaccttgcagcgggtgctcctggacccggaggcctactgggaggtgaagcccctttccggaaaccaaggccagcagatgatccaactcctgctggcagctgcaaggaggacgctgagcccggtgcacacagatttgctctgggccagcctcccagagtgtgggaacccagggcggctgaggctggcgtttgaggaagcccggaaatgggcctctttcaccgtgcctgtcccgctggccaccaccgcagaggaagccacgcaccaactctgcacccgcctggagcagacacacgggcagctcctcgtggcccacgtgctgggctacattgtgtcttcccgacacggtctctcggaggcggagctgaaggatgttttgtccctggacgacgaggtcctgcaggatgtgtaccgagattggaccccgcccagcaaggagctgctgcgcttcccgcccctgctgtgggtgcggcttcgtcgggatctgggatactacttggcccggcggcccgtggatggcttcaccctcctggccattgcccacagacagctggtcgaggtggtccgtgagcgctacctgtcaggatccgagagagccaagaggcatggcgtcctggccgacttcttctcagggacctggagccagggtaccaagaagctcatcactctgccacttgtggggaaaccactgaacttggaccgaaaggtggccccgcagcctctgtggttctcacatacggttgcaaacctgcggaagctgaaggagttgccctatcacctgcttcactcgggccgcctggaggagctgaaacaggaggttctgggcagcatgagctggatttcctgccggggcatctctgggggcattgaagacctgctggatgactttgacctgtgtgcccctcacctggactcccctgaggttggcctggtccgtgaagccctccagctctgccgccctgctgtggagctccgaggcatggagaggagcctcctgtacacagaactgctggccagactccatttcttcgccacctcacatccagcactggtgggacagctatgccaacaggcccagagctggttccagttgtgcgcacaccctgtgctggtgcccctcggaggattcctccagcccccgggaggacccctccgggcaactctcagcggctgtcacaaaggcatcaccgccatggcatggggtgtggaggagaagctgctggtgattggcacccaggatggcatcatggctgtgtgggacatggaagagcagcatgtgatccacatgctaactggacacacaggagaggtgaggtgtgtgaaaatatttgccaaagggaccctcgccaactctgcttcaaaggattacacgctgcacttgtggaacttactctctggccaggagaaatttaccatttgggatggaggctcaaaaaatcccgctgaacctcagatctggaaccttcatgtggatgaggcacacaaagttgtgtattcagcatctggctcaaagatcaatgcttggaatctggaaactgcagagccggtattccatatcctgggagatgcctctgatccttggatgtgcatggccgtgctggcctcccaggccacactgctgacagtgtccagggatggtgtggtcagtctgtggagctcagctacgggaaaacttcaggggaagcaacatatgtccagcatcaaagaagaaacacctacctgtgccgtctcagtccagaagcaaggaaagcttgttaccgggtttagcaatggctccatctctttggtttcctccaaaggggacagattgctggagaagcttccagatgctgtgaggttcctggtggtctctgaagatgagtccctcctcgccgcaggctttggaagatcggtgcggatattcttggcggactcgaggggctttcgccgattcatggccatggatctggaacatgaagacatggtggagacggctgtttttggtactgagaacaacctgatcatcacggggtcccttgatgcgctcattcaggtgtggagtctgtcagaacaggggacccttctggacatcctggaaggcgtcggggcccccgtgagcctgctggcccgcggcggggctttggtggcatctgcttccccacagtcctcatctttcaaggtctgggatctcagcgatgctcataggtcccgggtgcctgcaccatttctggaccgcaccggcctcaccgcagtgtcccacaatggaagctacgtctacttccccaaaattggggacaaaaacaaagtcactatttgggacttggcagaaggcgaggaacaagattccctggacacctccagtgagatcaggtgtctggaggttgctgagcagcgcaagctcctatttacgggcctcgtgtcgggggtcgtccttgtgttccccctgaattccaggcaggacgtgatatgcattccccctcccgaggcccggaaagcaatcaactgcatgtccctgagcaagtgcgaggaccgcctggccatcgcctatgacaacatcgtcctggtgctggacatcacctccggggacccctgcccggtcatcgatgggccaagatacaccttttacactcagctgcccgagaccctctccagcgtggccattctgacggactaccgcgtggtctacagcatgaccaatggggacctctttctttacgagtgtgcaacttccaaagcgtttcccttggagacccacaggagccgagttgcctgtgtggaggtcagccacaaggagcagctggtggtcagcgggtctgaggatgccctgctgtgtctctgggacctgcaggcacgcaagtggaaattcgagatgagctacacgagttcttactgcagaggggtccaatgtgcttgcttctccaaggatgacaagtatgtgtacgtgggcttaaaggatcgctctatacttgtttggagtgtgctggatggcaccctgctgacagtccagtttgtccatgctgtggtaaacagaatcatcccaaccaccagtggcttcattgcccccaccaggcatggttatctgatccgagagaatttccagtgcctttcagcaaaagcctcaccgcaggaccctcttaagaacttcaagaaggcaatgtggatggtcaaatccaggcagagagaggagctagttgcagctgcaggagctccccaggacttggagtcagaaagtgcccagggaaatgaaaccaaatcaaacaaatgctcacaagtgtgcctgatagtgtaaaaaaataaaaataaaaaaaccctgtgggggtatggggctccagtgagttagccccatttaatctagttaaagcaaaaagaatacgtttgctggtgtatatctggacccatggcttcagattatggcttcagaccttgtctcttctcatctttccattattctttcctctttttcattttcattctcagacttgccacccccaggttagcaacatggtggccaatatgctgctgtctccaatttcaatagaaaagagagcttctctttcccaacagtcctagcctcaactctactggtcccaattggcccatacgcctagccctaaaccaattattatatctgggagaatgcagagctctaatcggctagactgatccaatgtccaccactgggactgagaatagaagagattactcctgagatgcaaactggagttctggtaccagatgaagggggaacggatgaatgtgagatacagcaaatcactgatgtggaccacagaacctcacagtttataaagctgtaggtgctgtcatctgatcctcatcacaactcatactttagggagggcaggagtttctgtatctattttacagatgaggaaactgagccttgcggaagtagttataatttgattcaggtcacaagtccaaggtgcaagagctctgagagtgagccttctgtcccattcctgttagacctcactccaatttcagtctgcagagcacaaccatctcttccacaggcaccacactcaaatgctcacaggagctagtgactaatctagacacttccatgcacctgggtgagcagcagggagagacagagactggacatgtggaaggcagagattgtgtctagggtgggtatgagcagcctgactgtagcccagaatcaccatggccaaacaagcccactgctgtcagtgcttccagttgtaataagcaaagccagaaatccagacttttatgcaaaaatgttctgacttttaaagttggcgattggttgaatttatatctatagtgcatttggcatgtgcgtctttggttaatgagctgacttcaggactcacgctggcagtaaaacaatcaacatgttatagttcatccctctctattccttggctcccaaacttttgggataaagatgtgggtttttaatcttaaaaactggaggctcttggaagtagaaagagctgctgatctctccctgctttgcttttgaactgtctgccttgtgcaagttcaacagtcaaactgttttcattccacttaagtggatctttcttctttgcccacagccttctaaaagcccttctcagtcttctcaggcttttactttaatgctaggatagtctaaatcttcaaggtggctatcccttctcccctccgtggaat

SEQ ID NO: 14432 - DNA, 6964 bp, Homo sapiens
  source 1..6964: mol_type = unassigned DNA
atgcagagagggaagccctgcagagcactgcctaccctgaagtgccagaccttctgccagaggcacggcttgatgtttgaggtcgttgatctgaggtggggtattcggaacattgaagccactgaccacttgaccacagaactctgcttggaggaggttgaccggtgttggaaaacatccatagggccagcttttgttgccctcatcggtgatcagtacggcccctgtctgattccctcgcggatcgatgagaaggagtgggaggtattgagggaccatctgactgccaggccaagtgacctggagctggtggcacgatacttccagagggacgagaatgcgtttcctcccacctacgtcctgcaggcaccaggtactggggaggcctgtgaaccagaggaggccaccttaacttctgtcctacgctctggagcccaggaggcccggaggctggggctcatcacccaggagcagtggcagcactaccaccggtcagtcattgagtgggagatagagcggagcctgctgagctcagaggaccgggaacagggagccaccgtcttccttagagagatccaagacctccacaaacacatccttgaagactgcgcccttaggatggtggaccggctcgcggatggctgcctggacgctgatgcccagaaccttctcagcagcctcaaaagtcacatcactgacatgcacccaggggtcctcaagacccaccgcctgccgtggagccgcgacttggtgaaccccaagaacaagactcacgcctgctacctgaaggagctgggtgagcagtttgtggtgagggccaatcaccaggtcctcacacgcctccgtgagctggatacggccggacaggagttggcgtggctctaccaagagatccgccaccacctttggcagagctcggaggtcattcagaccttctgcggacgccaggaactcctggcccggcttgggcagcagctcaggcacgatgacagcaagcagcacacccccctggtactctttgggcccccaggcattggaaagacagccctgatgtgcaagctggctgagcagatgccaaggctgctggggcacaagacagtgaccgtcctgcggctgctggggacgtcacaaatgagctcagatgcccgtggcctgctgaagagcatctgcttccaggtgtgcctggcctatgggctgcccttgccccctgcccaggttctggacgcccacaccagggtggtccagtttttccataccctcctccacactgtctcttgcagaaacttcgagtctctcgtgctcctgctggatgctatggatgacctggactctgtccgccatgctcggagggttccctggctgcctctcaactgccccccgagggtgcacctcatcctctcagcttgctcgggggcactgggggttttggacaccttgcagcgggtgctcctggacccggaggcctactgggaggtgaagcccctttccggaaaccaaggccagcagatgatccaactcctgctggcagctgcaaggaggacgctgagcccggtgcacacagatttgctctgggccagcctcccagagtgtgggaacccagggcggctgaggctggcgtttgaggaagcccggaaatgggcctctttcaccgtgcctgtcccgctggccaccaccgcagaggaagccacgcaccaactctgcacccgcctggagcagacacacgggcagctcctcgtggcccacgtgctgggctacattgtgtcttcccgacacggtctctcggaggcggagctgaaggatgttttgtccctggacgacgaggtcctgcaggatgtgtaccgagattggaccccgcccagcaaggagctgctgcgcttcccgcccctgctgtgggtgcggcttcgtcgggatctgggatactacttggcccggcggcccgtggatggcttcaccctcctggccattgcccacagacagctggtcgaggtggtccgtgagcgctacctgtcaggatccgagagagccaagaggcatggcgtcctggccgacttcttctcagggacctggagccagggtaccaagaagctcatcactctgccacttgtggggaaaccactgaacttggaccgaaaggtggccccgcagcctctgtggttctcacatacggttgcaaacctgcggaagctgaaggagttgccctatcacctgcttcactcgggccgcctggaggagctgaaacaggaggttctgggcagcatgagctggatttcctgccggggcatctctgggggcattgaagacctgctggatgactttgacctgtgtgcccctcacctggactcccctgaggttggcctggtccgtgaagccctccagctctgccgccctgctgtggagctccgaggcatggagaggagcctcctgtacacagaactgctggccagactccatttcttcgccacctcacatccagcactggtgggacagctatgccaacaggcccagagctggttccagttgtgcgcacaccctgtgctggtgcccctcggaggattcctccagcccccgggaggacccctccgggcaactctcagcggctgtcacaaaggcatcaccgccatggcatggggtgtggaggagaagctgctggtgattggcacccaggatggcatcatggctgtgtgggacatggaagagcagcatgtgatccacatgctaactggacacacaggagaggtgaggtgtgtgaaaatatttgccaaagggaccctcgccaactctgcttcaaaggattacacgctgcacttgtggaacttactctctggccaggagaaatttaccatttgggatggaggctcaaaaaatcccgctgaacctcagatctggaaccttcatgtggatgaggcacacaaagttgtgtattcagcatctggctcaaagatcaatgcttggaatctggaaactgcagagccggtattccatatcctgggagatgcctctgatccttggatgtgcatggccgtgctggcctcccaggccacactgctgacagtgtccagggatggtgtggtcagtctgtggagctcagctacgggaaaacttcaggggaagcaacatatgtccagcatcaaagaagaaacacctacctgtgccgtctcagtccagaagcaaggaaagcttgttaccgggtttagcaatggctccatctctttggtttcctccaaaggggacagattgctggagaagcttccagatgctgtgaggttcctggtggtctctgaagatgagtccctcctcgccgcaggctttggaagatcggtgcggatattcttggcggactcgaggggctttcgccgattcatggccatggatctggaacatgaagacatggtggagacggctgtttttggtactgagaacaacctgatcatcacggggtcccttgatgcgctcattcaggtgtggagtctgtcagaacaggggacccttctggacatcctggaaggcgtcggggcccccgtgagcctgctggcccgcggcggggctttggtggcatctgcttccccacagtcctcatctttcaaggtctgggatctcagcgatgctcataggtcccgggtgcctgcaccatttctggaccgcaccggcctcaccgcagtgtcccacaatggaagctacgtctacttccccaaaattggggacaaaaacaaagtcactatttgggacttggcagaaggcgaggaacaagattccctggacacctccagtgagatcaggtgtctggaggttgctgagcagcgcaagctcctatttacgggcctcgtgtcgggggtcgtccttgtgttccccctgaattccaggcaggacgtgatatgcattccccctcccgaggcccggaaagcaatcaactgcatgtccctgagcaagtgcgaggaccgcctggccatcgcctatgacaacatcgtcctggtgctggacatcacctccggggacccctgcccggtcatcgatgggccaagatacaccttttacactcagctgcccgagaccctctccagcgtggccattctgacggactaccgcgtggtctacagcatgaccaatggggacctctttctttacgagtgtgcaacttccaaagcgtttcccttggagacccacaggagccgagttgcctgtgtggaggtcagccacaaggagcagctggtggtcagcgggtctgaggatgccctgctgtgtctctgggacctgcaggcacgcaagtggaaattcgagatgagctacacgagttcttactgcagaggggtccaatgtgcttgcttctccaaggatgacaagtatgtgtacgtgggcttaaaggatcgctctatacttgtttggagtgtgctggatggcaccctgctgacagtccagtttgtccatgctgtggtaaacagaatcatcccaaccaccagtggcttcattgcccccaccaggcatggttatctgatccgagagaatttccagtgcctttcagcaaaagcctcaccgcaggaccctcttaagaacttcaagaaggcaatgtggatggtcaaatccaggcagagagaggagctagttgcagctgcaggagctccccaggacttggagtcagaaagtgcccagggaaatgaaaccaaatcaaacaaatgctcacaagtgtgcctgatagtgtaaaaaaataaaaataaaaaaaccctgtgggggtatggggctccagtgagttagccccatttaatctagttaaagcaaaaagaatacgtttgctggtgtatatctggacccatggcttcagattatggcttcagaccttgtctcttctcatctttccattattctttcctctttttcattttcattctcagacttgccacccccaggttagcaacatggtggccaatatgctgctgtctccaatttcaatagaaaagagagcttctctttcccaacagtcctagcctcaactctactggtcccaattggcccatacgcctagccctaaaccaattattatatctgggagaatgcagagctctaatcggctagactgatccaatgtccaccactgggactgagaatagaagagattactcctgagatgcaaactggagttctggtaccagatgaagggggaacggatgaatgtgagatacagcaaatcactgatgtggaccacagaacctcacagtttataaagctgtaggtgctgtcatctgatcctcatcacaactcatactttagggagggcaggagtttctgtatctattttacagatgaggaaactgagccttgcggaagtagttataatttgattcaggtcacaagtccaaggtgcaagagctctgagagtgagccttctgtcccattcctgttagacctcactccaatttcagtctgcagagcacaaccatctcttccacaggcaccacactcaaatgctcacaggagctagtgactaatctagacacttccatgcacctgggtgagcagcagggagagacagagactggacatgtggaaggcagagattgtgtctagggtgggtatgagcagcctgactgtagcccagaatcaccatggccaaacaagcccactgctgtcagtgcttccagttgtaataagcaaagccagaaatccagacttttatgcaaaaatgttctgacttttaaagttggcgattggttgaatttatatctatagtgcatttggcatgtgcgtctttggttaatgagctgacttcaggactcacgctggcagtaaaacaatcaacatgttatagttcatccctctctattccttggctcccaaacttttgggataaagatgtgggtttttaatcttaaaaactggaggctcttggaagtagaaagagctgctgatctctccctgctttgcttttgaactgtctgccttgtgcaagttcaacagtcaaactgttttcattccacttaagtggatctttcttctttgcccacagccttctaaaagcccttctcagtcttctcaggcttttactttaatgctaggatagtctaaatcttcaaggtggctatcccttctcccctccgtggaattcctgatagagtctcaataaaagcaaccttagaaacagaggcttttgagctgaacaagaccctactgctgtcttattcatccattttccaaaccagttttccaaggcaggttttggtagttctgcaaatgttagtgtcaaatttcatttaaaaatattttaaactgtaattttaagatgtatgcttggatgtattgggcagcagcttctaaggtgttgaagattactaaggttggtgcaaaaagtaactgtggttttcgccattaaaaatattaaaaataatggcaaaaactggctgggcacagtggctcacacctgtggtcccagctctttggaaggccgaggcaggtggatcacctgaggtcaggagtttgagaccagcctggacaacatggtgaaacccttctctactaaaaatacaaaaatcagccaggcatggtggtgagtgcctgtaatctcagttactcaggaggctgagtcaggagaatcacttgaacccgggaggcggaggttgcagtgagctgagattgtgccactgcactccagcctgggtgacagagcaagactccatctcataataataataataatggcaaaagcctcggtggctcacgcctgtaatcccagcactttgggaggctgaggcgggtggatcacttgaggccaggtgttcaagagcagcctggtcaacatggtgaaactctgtctctactcaaaaatacaaaaattagcctggtgtggtgacgtacacctgtaattccagctacttgggaggctgaggcaggagaatggcttgaacccgggaggcggaggttgcagtgagccgagatcgcaccactgcactccagcatgagtgacagagactctgtctcc

SEQ ID NO: 14433 - DNA, 7254 bp, Homo sapiens
  source 1..7254: mol_type = unassigned DNA
ataccctccatgcccttccttgcagatatggatgcagagagggaagccctgcagagcactgcctaccctgaagtgccagaccttctgccagaggcacggcttgatgtttgaggtcgttgatctgaggtggggtattcggaacattgaagccactgaccacttgaccacagaactctgcttggaggaggttgaccggtgttggaaaacatccatagggccagcttttgttgccctcatcggtgatcagtacggcccctgtctgattccctcgcggatcgatgagaaggagtgggaggtattgagggaccatctgactgccaggccaagtgacctggagctggtggcacgatacttccagagggacgagaatgcgtttcctcccacctacgtcctgcaggcaccaggtactggggaggcctgtgaaccagaggaggccaccttaacttctgtcctacgctctggagcccaggaggcccggaggctggggctcatcacccaggagcagtggcagcactaccaccggtcagtcattgagtgggagatagagcggagcctgctgagctcagaggaccgggaacagggagccaccgtcttccttagagagatccaagacctccacaaacacatccttgaagactgcgcccttaggatggtggaccggctcgcggatggctgcctggacgctgatgcccagaaccttctcagcagcctcaaaagtcacatcactgacatgcacccaggggtcctcaagacccaccgcctgccgtggagccgcgacttggtgaaccccaagaacaagactcacgcctgctacctgaaggagctgggtgagcagtttgtggtgagggccaatcaccaggtcctcacacgcctccgtgagctggatacggccggacaggagttggcgtggctctaccaagagatccgccaccacctttggcagagctcggaggtcattcagaccttctgcggacgccaggaactcctggcccggcttgggcagcagctcaggcacgatgacagcaagcagcacacccccctggtactctttgggcccccaggcattggaaagacagccctgatgtgcaagctggctgagcagatgccaaggctgctggggcacaagacagtgaccgtcctgcggctgctggggacgtcacaaatgagctcagatgcccgtggcctgctgaagagcatctgcttccaggtgtgcctggcctatgggctgcccttgccccctgcccaggttctggacgcccacaccagggtggtccagtttttccataccctcctccacactgtctcttgcagaaacttcgagtctctcgtgctcctgctggatgctatggatgacctggactctgtccgccatgctcggagggttccctggctgcctctcaactgccccccgagggtgcacctcatcctctcagcttgctcgggggcactgggggttttggacaccttgcagcgggtgctcctggacccggaggcctactgggaggtgaagcccctttccggaaaccaaggccagcagatgatccaactcctgctggcagctgcaaggaggacgctgagcccggtgcacacagatttgctctgggccagcctcccagagtgtgggaacccagggcggctgaggctggcgtttgaggaagcccggaaatgggcctctttcaccgtgcctgtcccgctggccaccaccgcagaggaagccacgcaccaactctgcacccgcctggagcagacacacgggcagctcctcgtggcccacgtgctgggctacattgtgtcttcccgacacggtctctcggaggcggagctgaaggatgttttgtccctggacgacgaggtcctgcaggatgtgtaccgagattggaccccgcccagcaaggagctgctgcgcttcccgcccctgctgtgggtgcggcttcgtcgggatctgggatactacttggcccggcggcccgtggatggcttcaccctcctggccattgcccacagacagctggtcgaggtggtccgtgagcgctacctgtcaggatccgagagagccaagaggcatggcgtcctggccgacttcttctcagggacctggagccagggtaccaagaagctcatcactctgccacttgtggggaaaccactgaacttggaccgaaaggtggccccgcagcctctgtggttctcacatacggttgcaaacctgcggaagctgaaggagttgccctatcacctgcttcactcgggccgcctggaggagctgaaacaggaggttctgggcagcatgagctggatttcctgccggggcatctctgggggcattgaagacctgctggatgactttgacctgtgtgcccctcacctggactcccctgaggttggcctggtccgtgaagccctccagctctgccgccctgctgtggagctccgaggcatggagaggagcctcctgtacacagaactgctggccagactccatttcttcgccacctcacatccagcactggtgggacagctatgccaacaggcccagagctggttccagttgtgcgcacaccctgtgctggtgcccctcggaggattcctccagcccccgggaggacccctccgggcaactctcagcggctgtcacaaaggcatcaccgccatggcatggggtgtggaggagaagctgctggtgattggcacccaggatggcatcatggctgtgtgggacatggaagagcagcatgtgatccacatgctaactggacacacaggagaggtgaggtgtgtgaaaatatttgccaaagggaccctcgccaactctgcttcaaaggattacacgctgcacttgtggaacttactctctggccaggagaaatttaccatttgggatggaggctcaaaaaatcccgctgaacctcagatctggaaccttcatgtggatgaggcacacaaagttgtgtattcagcatctggctcaaagatcaatgcttggaatctggaaactgcagagccggtattccatatcctgggagatgcctctgatccttggatgtgcatggccgtgctggcctcccaggccacactgctgacagtgtccagggatggtgtggtcagtctgtggagctcagctacgggaaaacttcaggggaagcaacatatgtccagcatcaaagaagaaacacctacctgtgccgtctcagtccagaagcaaggaaagcttgttaccgggtttagcaatggctccatctctttggtttcctccaaaggggacagattgctggagaagcttccagatgctgtgaggttcctggtggtctctgaagatgagtccctcctcgccgcaggctttggaagatcggtgcggatattcttggcggactcgaggggctttcgccgattcatggccatggatctggaacatgaagacatggtggagacggctgtttttggtactgagaacaacctgatcatcacggggtcccttgatgcgctcattcaggtgtggagtctgtcagaacaggggacccttctggacatcctggaaggcgtcggggcccccgtgagcctgctggcccgcggcggggctttggtggcatctgcttccccacagtcctcatctttcaaggtctgggatctcagcgatgctcataggtcccgggtgcctgcaccatttctggaccgcaccggcctcaccgcagtgtcccacaatggaagctacgtctacttccccaaaattggggacaaaaacaaagtcactatttgggacttggcagaaggcgaggaacaagattccctggacacctccagtgagatcaggtgtctggaggttgctgagcagcgcaagctcctatttacgggcctcgtgtcgggggtcgtccttgtgttccccctgaattccaggcaggacgtgatatgcattccccctcccgaggcccggaaagcaatcaactgcatgtccctgagcaagtgcgaggaccgcctggccatcgcctatgacaacatcgtcctggtgctggacatcacctccggggacccctgcccggtcatcgatgggccaagatacaccttttacactcagctgcccgagaccctctccagcgtggccattctgacggactaccgcgtggtctacagcatgaccaatggggacctctttctttacgagtgtgcaacttccaaagcgtttcccttggagacccacaggagccgagttgcctgtgtggaggtcagccacaaggagcagctggtggtcagcgggtctgaggatgccctgctgtgtctctgggacctgcaggcacgcaagtggaaattcgagatgagctacacggcaccctgctgacagtccagtttgtccatgctgtggtaaacagaatcatcccaaccaccagtggcttcattgcccccaccaggcatggttatctgatccgagagaatttccagtgcctttcagcaaaagcctcaccgcaggaccctcttaagaacttcaagaaggcaatgtggatggtcaaatccaggcagagagaggagctagttgcagctgcaggagctccccaggacttggagtcagaaagtgcccagggaaatgaaaccaaatcaaacaaatgctcacaagtgtgcctgatagtgtaaaaaaataaaaataaaaaaaccctgtgggggtatggggctccagtgagttagccccatttaatctagttaaagcaaaaagaatacgtttgctggtgtatatctggacccatggcttcagattatggcttcagaccttgtctcttctcatctttccattattctttcctctttttcattttcattctcagacttgccacccccaggttagcaacatggtggccaatatgctgctgtctccaatttcaatagaaaagagagcttctctttcccaacagtcctagcctcaactctactggtcccaattggcccatacgcctagccctaaaccaattattatatctgggagaatgcagagctctaatcggctagactgatccaatgtccaccactgggactgagaatagaagagattactcctgagatgcaaactggagttctggtaccagatgaagggggaacggatgaatgtgagatacagcaaatcactgatgtggaccacagaacctcacagtttataaagctgtaggtgctgtcatctgatcctcatcacaactcatactttagggagggcaggagtttctgtatctattttacagatgaggaaactgagccttgcggaagtagttataatttgattcaggtcacaagtccaaggtgcaagagctctgagagtgagccttctgtcccattcctgttagacctcactccaatttcagtctgcagagcacaaccatctcttccacaggcaccacactcaaatgctcacaggagctagtgactaatctagacacttccatgcacctgggtgagcagcagggagagacagagactggacatgtggaaggcagagattgtgtctagggtgggtatgagcagcctgactgtagcccagaatcaccatggccaaacaagcccactgctgtcagtgcttccagttgtaataagcaaagccagaaatccagacttttatgcaaaaatgttctgacttttaaagttggcgattggttgaatttatatctatagtgcatttggcatgtgcgtctttggttaatgagctgacttcaggactcacgctggcagtaaaacaatcaacatgttatagttcatccctctctattccttggctcccaaacttttgggataaagatgtgggtttttaatcttaaaaactggaggctcttggaagtagaaagagctgctgatctctccctgctttgcttttgaactgtctgccttgtgcaagttcaacagtcaaactgttttcattccacttaagtggatctttcttctttgcccacagccttctaaaagcccttctcagtcttctcaggcttttactttaatgctaggatagtctaaatcttcaaggtggctatcccttctcccctccgtggaattcctgatagagtctcaataaaagcaaccttagaaacagaggcttttgagctgaacaagaccctactgctgtcttattcatccattttccaaaccagttttccaaggcaggttttggtagttctgcaaatgttagtgtcaaatttcatttaaaaatattttaaactgtaattttaagatgtatgcttggatgtattgggcagcagcttctaaggtgttgaagattactaaggttggtgcaaaaagtaactgtggttttcgccattaaaaatattaaaaataatggcaaaaactggctgggcacagtggctcacacctgtggtcccagctctttggaaggccgaggcaggtggatcacctgaggtcaggagtttgagaccagcctggacaacatggtgaaacccttctctactaaaaatacaaaaatcagccaggcatggtggtgagtgcctgtaatctcagttactcaggaggctgagtcaggagaatcacttgaacccgggaggcggaggttgcagtgagctgagattgtgccactgcactccagcctgggtgacagagcaagactccatctcataataataataataatggcaaaagcctcggtggctcacgcctgtaatcccagcactttgggaggctgaggcgggtggatcacttgaggccaggtgttcaagagcagcctggtcaacatggtgaaactctgtctctactcaaaaatacaaaaattagcctggtgtggtgacgtacacctgtaattccagctacttgggaggctgaggcaggagaatggcttgaacccgggaggcggaggttgcagtgagccgagatcgcaccactgcactccagcatgagtgacagagactctgtctccaaaaaaaaaaaaaaaaaaaagtaatggcaaaaaccacaattaattttgcatcaacctaataatttaggattcttctgccattttcatttaactgatttaactgaagagcccaattaaattgtgaagggagccctgaaaaaattagctactctttgccactgcttctctgtgaatcaagggcttacccaatgcagaaataaagtagatgttgagaccaattaagatttcacctacaaattctgattttaaatgcctgtgtccatctccacagcctcagtgagaattgattgttttgtagataaatcctaatttaaacattggaaatgcctttttactaataaaatgctacaacaaattattgctta

SEQ ID NO: 14434 - DNA, 476 bp, Homo sapiens
  source 1..476: mol_type = unassigned DNA
ggggccggggcggcggcggagcccgagccgcggcggcgcctggagatcgtcttcgtgtcctcggaccaggaccagcggcagtggcaggacttcgtgcgggacatgccgtggctggcgctgccctacaaggagaagcacaggaaggctgagttcgcggccaccggggagctttgcattgtctggccgtccagcctcctccccagacgcctcccgggcgcgggaacagcccgggctgtgcagagctcagctgcgtggtggcccctgtggtcccggggtcttcgagttaagggctgagctgaccccatcgatgcacattgactggaagaaggaggatttggggaaatggatactttgctgtcaacttctcgtgtctcccagtttgctgccgagttgagtttgggtttctgagtgtgtcccttgggtgaggatgtctgtctctgtgataataaagcacatccaggacattttgtaatgaa

SEQ ID NO: 14435 - DNA, 31 bp, Homo sapiens
  source 1..31: mol_type = unassigned DNA
ggcgctgccctacaaggagaagcacaggaag

SEQ ID NO: 14436 - DNA, 452 bp, Homo sapiens
  source 1..452: mol_type = unassigned DNA
cccagcgcctgccgccgacgccgccgcctcctcccgccgcgcggaccgtggagcggggtcgcagccgcctgcccgccctgcggtgggccaggatgtcgggcttcctggaggagctgctcggcgagaagctggtgacgggcggcggcgaggaggtggacgtgcactcgctgggcgcccgcggcatctcgctgctgggtctctacttcggctgcagcctcagcgccccctgcgcgcagctcagcgccagcctggccgccttctacgggcgcctgcggggggacgcggcggccgggccggggccgggagcgggggccggggcggcggcggagcccgagccgcggcggcgcctggagatcgtcttcgtgtcctcggaccaggaccagcggcagtggcaggacttcgtgcgggacatgccgtggctggcgctgccctacaaggagaagcacaggaag

SEQ ID NO: 14437 - DNA, 2681 bp, Homo sapiens
  source 1..2681: mol_type = unassigned DNA
aaacgtgccccttcaccggaaccgagcaacggtaactgtgccccttcaccggaaccgagcaatggcagacgtgtcccttcaccggaacccagcaacgctcaaactttggaacaaataccgaatttccaacattccatcactaatattcctcgacgccaccactgggaaggttgtgtgcaggaacgggctgctggtgatccgagatgacccagaaggtctggagttcccctggggaccgaaacccttcagggaagtcattgcagggcccttgcttagaaacaatgggcagtctctggagagcagcagcctggaggggtctcacgtgggcgtctatttctccgcacattggtgtccgccctgccgaagcctcacccgggtcctggtggaatcctaccggaagatcaaggaggcaggccagaacttcgagatcatcttcgttagtgcagacaggtcggaggagtccttcaaacagtacttcagtgagatgccctggctcgccgtcccctacacggatgaggcccggcggtcgcgcctcaaccggctgtacggaatccaaggcatccccacgctcatcatgctggacccgcagggcgaggtgatcacgcggcaggggcgggtggaggtgctgaacgacgaggactgccgggagttcccctggcaccccaagcccgtgctggagctctccgactccaacgccgcgcagcttaacgagggcccctgcctcgtcctttttgtagattctgaggatgacggagagtccgaggcggccaagcagctgattcagccgatagctgagaaaatcattgccaagtacaaagccaaagaggaggaggcaccccttctgttcttcgtagccggggaggatgacatgactgactccctgcgagattacaccaacctgcctgaggctgcccctttgctcaccatcctggacatgtcagcccgggccaagtacgtgatggacgtggaggagatcacccccgccatcgtggaggcctttgtgaatgacttcctagcagagaagctcaaaccggagcccatctagcgtggctccggcctcctgagacgttatttaaaactcagccttctcctcctccccctccttccttccgcccttggacttacccagcgtgccccgaatcccaccacccaagtgtccagcctctctgtggtgccttgtttctgcagtaaactcctcagccagcaccctggggtgtggaatcagcagcggcagagtccaccgtgtttggagactctgtttgggagcacgggatggccgggggcccggccagagcggggctgcatggctttcgcaaagtcactagcttttggtgaaggatctgccagggtgtcctgggcagagtgagcgtggagggccggtgggtcccgctcgggctctgactctgacgtcggcacacacggccccggacggccagaggggaaccgccgggtgacacctgcgtggaggctgagctgagaaagggcctccgcttagagctgcgggtgaggacgtccttttctaagcaacacagtcttcctcggtctgagagaaaagcagcccactcttgtgttctcaggcaggggatctccaaatgcaaaaggaagcttgtagaggttttttgggtgagaagaaaaatgtagctaaggtaatggttcatatcatacaaacagctcccacgatcctgaaattctgttaacgaatccttctctttggacatcttcccaagaaacttagccctgagtcctaggaggagcacctctgcaccagcacggacctctcgctccacccagctctgtgcccaaggcccctgatctctgctgaggtgcccacacccacgttcgatcacccctgccattcccttttattttcttttttttgagatggagtcttgctctgtcgcccaggctggagtgcagtggcaccatcttggctcacttcaacctccgcccccaaggttcaagtgattctcctgcctcagcctcccgagtagctgggattacaggcacccgccaccgtacctggctaatttttgtatttttagtagagatggggtttcaccatgttggccaggctggtctcgaactcctgacctcaggtgatccacccgcctcggcctcccaaagtgctgggattacaggcgtgagccgccgtgcccggcccccttttcttttcaaagcagaactacaaagatgagaaattaccagaagcctcgccttttcctaagcaccagcggaaggagctgtgccccgggatggagtgagggtggagggcgcgtcagccacgggtgggccttgtgtcgccttgtatcggcccaggtaggttgttggcctcttacttgggctgacctgacccccgaaagagaaacagacaactctgttctcaggattggggatggacggcttcggccaagcgttttagcctcattcactcaggccccactcagcactctgccagccaagaccattgatttggaaaatccggtccccacccgctaatgagctgttgacactgttgttccttgctgaattggattgttgacttgtagttcagaggcgtacaactagttggcgattagacttgttatgtgatgttaccagcctgaaatgcgatcaccccgtaggaaataaagcaggcatctctggacctcatccaccctgggcctctgctgtccttgatcaca

SEQ ID NO: 14438 - DNA, 3036 bp, Homo sapiens
  source 1..3036: mol_type = unassigned DNA
cccagcgcctgccgccgacgccgccgcctcctcccgccgcgcggaccgtggagcggggtcgcagccgcctgcccgccctgcggtgggccaggatgtcgggcttcctggaggagctgctcggcgagaagctggtgacgggcggcggcgaggaggtggacgtgcactcgctgggcgcccgcggcatctcgctgctgggtctctacttcggctgcagcctcagcgccccctgcgcgcagctcagcgccagcctggccgccttctacgggcgcctgcggggggacgcggcggccgggccggggccgggagcgggggccggggcggcggcggagcccgagccgcggcggcgcctggagatcgtcttcgtgtcctcggaccaggaccagcggcagtggcaggacttcgtgcgggacatgccgtggctggcgctgccctacaaggagaagcacaggaagctcaaactttggaacaaataccgaatttccaacattccatcactaatattcctcgacgccaccactgggaaggttgtgtgcaggaacgggctgctggtgatccgagatgacccagaaggtctggagttcccctggggaccgaaacccttcagggaagtcattgcagggcccttgcttagaaacaatgggcagtctctggagagcagcagcctggaggggtctcacgtgggcgtctatttctccgcacattggtgtccgccctgccgaagcctcacccgggtcctggtggaatcctaccggaagatcaaggaggcaggccagaacttcgagatcatcttcgttagtgcagacaggtcggaggagtccttcaaacagtacttcagtgagatgccctggctcgccgtcccctacacggatgaggcccggcggtcgcgcctcaaccggctgtacggaatccaaggcatccccacgctcatcatgctggacccgcagggcgaggtgatcacgcggcaggggcgggtggaggtgctgaacgacgaggactgccgggagttcccctggcaccccaagcccgtgctggagctctccgactccaacgccgcgcagcttaacgagggcccctgcctcgtcctttttgtagattctgaggatgacggagagtccgaggcggccaagcagctgattcagccgatagctgagaaaatcattgccaagtacaaagccaaagaggaggaggcaccccttctgttcttcgtagccggggaggatgacatgactgactccctgcgagattacaccaacctgcctgaggctgcccctttgctcaccatcctggacatgtcagcccgggccaagtacgtgatggacgtggaggagatcacccccgccatcgtggaggcctttgtgaatgacttcctagcagagaagctcaaaccggagcccatctagcgtggctccggcctcctgagacgttatttaaaactcagccttctcctcctccccctccttccttccgcccttggacttacccagcgtgccccgaatcccaccacccaagtgtccagcctctctgtggtgccttgtttctgcagtaaactcctcagccagcaccctggggtgtggaatcagcagcggcagagtccaccgtgtttggagactctgtttgggagcacgggatggccgggggcccggccagagcggggctgcatggctttcgcaaagtcactagcttttggtgaaggatctgccagggtgtcctgggcagagtgagcgtggagggccggtgggtcccgctcgggctctgactctgacgtcggcacacacggccccggacggccagaggggaaccgccgggtgacacctgcgtggaggctgagctgagaaagggcctccgcttagagctgcgggtgaggacgtccttttctaagcaacacagtcttcctcggtctgagagaaaagcagcccactcttgtgttctcaggcaggggatctccaaatgcaaaaggaagcttgtagaggttttttgggtgagaagaaaaatgtagctaaggtaatggttcatatcatacaaacagctcccacgatcctgaaattctgttaacgaatccttctctttggacatcttcccaagaaacttagccctgagtcctaggaggagcacctctgcaccagcacggacctctcgctccacccagctctgtgcccaaggcccctgatctctgctgaggtgcccacacccacgttcgatcacccctgccattcccttttattttcttttttttgagatggagtcttgctctgtcgcccaggctggagtgcagtggcaccatcttggctcacttcaacctccgcccccaaggttcaagtgattctcctgcctcagcctcccgagtagctgggattacaggcacccgccaccgtacctggctaatttttgtatttttagtagagatggggtttcaccatgttggccaggctggtctcgaactcctgacctcaggtgatccacccgcctcggcctcccaaagtgctgggattacaggcgtgagccgccgtgcccggcccccttttcttttcaaagcagaactacaaagatgagaaattaccagaagcctcgccttttcctaagcaccagcggaaggagctgtgccccgggatggagtgagggtggagggcgcgtcagccacgggtgggccttgtgtcgccttgtatcggcccaggtaggttgttggcctcttacttgggctgacctgacccccgaaagagaaacagacaactctgttctcaggattggggatggacggcttcggccaagcgttttagcctcattcactcaggccccactcagcactctgccagccaagaccattgatttggaaaatccggtccccacccgctaatgagctgttgacactgttgttccttgctgaattggattgttgacttgtagttcagaggcgtacaactagttggcgattagacttgttatgtgatgttaccagcctgaaatgcgatcaccccgtaggaaataaagcaggcatctctggacctcatccaccctgggcctctgctgtccttgatcaca

SEQ ID NO: 14439 - DNA, 1047 bp, Homo sapiens
  source 1..1047: mol_type = unassigned DNA
gtgcacacacacccatgcatgcggggagcaagacctgcatccaaggggaagttcatttccgttcaggggccgctcaggcgggcgtttctgcagctcaggccccctcggcgggtgccgctctgtttgacaagccagtgctttttctccccgtctttttctacccccgacccaatcacagattctgaggatgacggagagtccgaggcggccaagcagctgattcagccgatagctgagaaaatcattgccaagtacaaagccaaagaggaggaggcaccccttctgttcttcgtagccggggaggatgacatgactgactccctgcgagattacaccaacctgcctgaggctgcccctttgctcaccatcctggacatgtcagcccgggccaagtacgtgatggacgtggaggagatcacccccgccatcgtggaggcctttgtgaatgacttcctagcagagaagctcaaaccggagcccatctagcgtggctccggcctcctgagacgttatttaaaactcagccttctcctcctccccctccttccttccgcccttggacttacccagcgtgccccgaatcccaccacccaagtgtccagcctctctgtggtgccttgtttctgcagtaaactcctcagccagcaccctggggtgtggaatcagcagcggcagagtccaccgtgtttggagactctgtttgggagcacgggatggccgggggcccggccagagcggggctgcatggctttcgcaaagtcactagcttttggtgaaggatctgccagggtgtcctgggcagagtgagcgtggagggccggtgggtcccgctcgggctctgactctgacgtcggcacacacggccccggacggccagaggggaaccgccgggtgacacctgcgtggaggctgagctgagaaagggcctccgcttagagctgcgggtgaggacgtccttttctaagcaacacagtcttcctcggtctgagagaaaagcagcccactcttgtgttctcaggcaggggatctccaaatgcaaaaggaagc

SEQ ID NO: 14440 - DNA, 1159 bp, Homo sapiens
  source 1..1159: mol_type = unassigned DNA
gtgcaggaacgggctgctggtgatccgagatgacccagaaggtctggagttcccctggggaccgaaacccttcagggaagtcattgcagggcccttgcttagaaacaatgggcagtctctggagagcagcagcctggaggggtctcacgtgggcgtctatttctccgcacattggtgtccgccctgccgaagcctcacccgggtcctggtggaatcctaccggaagatcaaggaggcaggccagaacttcgagatcatcttcgttagtgcagacaggtcggaggagtccttcaaacagtacttcagtgagatgccctggctcgccgtcccctacacggatgaggcccggcggtcgcgcctcaaccggctgtacggaatccaagattctgaggatgacggagagtccgaggcggccaagcagctgattcagccgatagctgagaaaatcattgccaagtacaaagccaaagaggaggaggcaccccttctgttcttcgtagccggggaggatgacatgactgactccctgcgagattacaccaacctgcctgaggctgcccctttgctcaccatcctggacatgtcagcccgggccaagtacgtgatggacgtggaggagatcacccccgccatcgtggaggcctttgtgaatgacttcctagcagagaagctcaaaccggagcccatctagcgtggctccggcctcctgagacgttatttaaaactcagccttctcctcctccccctccttccttccgcccttggacttacccagcgtgccccgaatcccaccacccaagtgtccagcctctctgtggtgccttgtttctgcagtaaactcctcagccagcaccctggggtgtggaatcagcagcggcagagtccaccgtgtttggagactctgtttgggagcacgggatggccgggggcccggccagagcggggctgcatggctttcgcaaagtcactagcttttggtgaaggatctgccagggtgtcctgggcagagtgagcgtggagggccggtgggtcccgctcgggctctgactctgacgtcggcacacacggccccggacggccagaggggaaccgccgggtgacacctgcgtggaggctgagctgagaaagggcctccgcttagagctgcgggtgaggacgt

SEQ ID NO: 14441 - DNA, 1340 bp, Homo sapiens
  source 1..1340: mol_type = unassigned DNA
accggaaccgagcaacggtaactgtgccccttcaccggaaccgagcaatggcagacgtgtcccttcaccggaacccagcaacggtaactgtgtcctttcaccgaaactgagcaatggttaacgtgtttcctcactcagttcccaggcattgctgctgctgatctggggaacacactgtatgagcctgacataaacctctacagagctctgtctcaaactttggaacaaataccgaatttccaacattccatcactaatattcctcgacgccaccactgggaaggttgtgtgcaggaacgggctgctggtgatccgagatgacccagaaggtctggagttcccctggggaccgaaacccttcagggaagtcattgcagggcccttgcttagaaacaatgggcagtctctggagagcagcagcctggaggggtctcacgtgggcgtctatttctccgcacattggtgtccgccctgccgaagcctcacccgggtcctggtggaatcctaccggaagatcaaggaggcaggccagaacttcgagatcatcttcgttagtgcagacaggtcggaggagtccttcaaacagtacttcagtgagatgccctggctcgccgtcccctacacggatgaggcccggcggtcgcgcctcaaccggctgtacggaatccaaggcatccccacgctcatcatgctggacccgcagggcgaggtgatcacgcggcaggggcgggtggaggtgctgaacgacgaggactgccgggagttcccctggcaccccaagcccgtgctggagctctccgactccaacgccgcgcagcttaacgagggcccctgcctcgtcctttttgtagattctgaggatgacggagagtccgaggcggccaagcagctgattcagccgatagctgagaaaatcattgccaagtacaaagccaaagaggaggaggcaccccttctgttcttcgtagccggggaggatgacatgactgactccctgcgagattacaccaacctgcctgaggctgcccctttgctcaccatcctggacatgtcagcccgggccaagtacgtgatggacgtggaggagatcacccccgccatcgtggaggcctttgtgaatgacttcctagcagagaagctcaaaccggagcccatctagcgtggctccggcctcctgagacgttatttaaaactcagccttctcctcctccccctccttccttccgcccttggacttacccagcgtgccccgaatcccaccacccaagtgtccagcctctctgtggtgccttgtttctgcagtaaactcctcagccagcaccctggggtgtggaatcagc

SEQ ID NO: 14442 - DNA, 508 bp, Homo sapiens
  source 1..508: mol_type = unassigned DNA
ggcatccccacgctcatcatgctggacccgcagggcgagattctgaggatgacggagagtccgaggcggccaagcagctgattcagccgatagctgagaaaatcattgccaagtacaaagccaaagaggaggaggcaccccttctgttcttcgtagccggggaggatgacatgactgactccctgcgagattacaccaacctgcctgaggctgcccctttgctcaccatcctggacatgtcagcccgggccaagtacgtgatggacgtggaggagatcacccccgccatcgtggaggcctttgtgaatgacttcctagcagagaagctcaaaccggagcccatctagcgtggctccggcctcctgagacgttatttaaaactcagccttctcctcctccccctccttccttccgcccttggacttacccagcgtgccccgaatcccaccacccaagtgtccagcctctctgtggtgccttgtttctgcagtaaactcctcagccagca

SEQ ID NO: 14443 - DNA, 914 bp, Homo sapiens
  source 1..914: mol_type = unassigned DNA
attacggagtccgtgtatctgccgcggggactttcctaggagaggcgtcactgcaacaggcctaggaggggactggcttgggaaaaaaagaagaatattgtgtgtgatatgcaggaactgagaaatagcctcaaactttggaacaaataccgaatttccaacattccatcactaatattcctcgacgccaccactgggaaggttgtgtgcaggaacgggctgctggtgatccgagatgacccagaaggtctggagttcccctggggaccgaaacccttcagggaagtcattgcagggcccttgcttagaaacaatgggcagtctctggagagcagcagcctggaggggtctcacgtgggcgtctatttctccgcacattggtgtccgccctgccgaagcctcacccgggtcctggtggaatcctaccggaagatcaaggaggcaggccagaacttcgagatcatcttcgttagtgcagacaggtcggaggagtccttcaaacagtacttcagtgagatgccctggctcgccgtcccctacacggatgaggcccggcggtcgcgcctcaaccggctgtacggaatccaaggtaggcgctccaggccccggctccgtgtggctcctggaaacctgctcacctgagctcaccgtgtctttggctttcctttaagaagaagagcatcattatttccatgaatattcatgtgcctttcatgtttctcagcagtgtagaattttcatggtgtgaattctaagccatttttaaaaaataagtattgtcaggccgggcatggcagctcacactgtaaccccagcactttgggaggctgaggcaggtggatcacctgagctcaggagttcgagaccagtttggacaacacggtgaaacccggtctctactaaaaatacaaaaa

SEQ ID NO: 14444 - DNA, 659 bp, Homo sapiens
  source 1..659: mol_type = unassigned DNA
gaacagaccacaggtgtctctagagagggagacttgggggtactctgggaggttgaactgagacctcccaggttcagggacggagcgctgctgagcccattacatgagttggcagcgagcctgggccaccgaatgtccactttggcagttcaagcatgaagccaacaaagatagatgcaactggtttcgagaggacagaacccacctcccttgttttctgccatccattatattttgtggccatttatgaaagttgcagtgtctgaagacatgcctgtgtcaacttgagaatcctacagatccgacatctgaaaaaaggaccaatctgtggacagggtcttgctgtgtcgcccagctggtctcgaactcttgggctcaagcagtctgcctgcttcggcattctaaaatactgggattacagctcaaactttggaacaaataccgaatttccaacattccatcactaatattcctcgacgccaccactgggaaggttgtgtgcaggaacgggctgctggtgatccgagatgacccagaaggtctggagttcccctggggaccgaaacccttcagggaagtcattgcagggcccttgcttagaaacaatgggcagtctctggagagcagcagcctggaggggtctcacgtgggcgtctatt

SEQ ID NO: 14445 - DNA, 586 bp, Homo sapiens
  source 1..586: mol_type = unassigned DNA
attctggaactttcttcggtactttcctgagttggattttattctaacccccgtcattgattgattccaaagttttttttttttttctgtagttcagataccagttagatgtgttaccaaggagatcttaaagagcaaactgcattttcgagagcagagctttaaaatttagtatgtgagttcaacaggttacgtgtaaatgggaatcagctgtctttggattaaacactactacacagttttttttaagaagattaaaaacggaagtgaagcaaggattccaaacgctctttccagagcagcccagctgctttgcaacctggacttgagcctcctccggttgggtcagtctggaatcagagccgcctccagggattgagggatgcgtgctcaaactttggaacaaataccgaatttccaacattccatcactaatattcctcgacgccaccactgggaaggttgtgtgcaggaacgggctgctggtgatccgagatgacccagaaggtctggagttcccctggggaccgaaacccttcagggaagtcattgcagggcccttgcttagaaacaatgggcagtctct

SEQ ID NO: 14446 - DNA, 544 bp, Homo sapiens
  source 1..544: mol_type = unassigned DNA
ggcgctgccctacaaggagaagcacaggaagctcaaactttggaacaaataccgaatttccaacattccatcactaatattcctcgacgccaccactgggaaggttgtgtgcaggaacgggctgctggtgatccgagatgacccagaaggtaaaacctcagcccgtgcatatggtcctcttattacccagccctccctcctccatgcccttaggctaatctccgtcccaccggtggagagagtactggtgaaatagatacacgtgggtttacgtggtagagaatgtcgtcttggtgaaatcatagtattccctaggacatggttttaagattttcacagggatcagaatgtccctcctaggggctttaattcatgggccaaaagagatggactctgccgtaagaagctccgcttggagggccgcagaggctgtgggaaagcggagagctcagaccccggcctctagtgctgcatccgtggcggctgcccccttcacagttagaggcaggctgagtggggtttttcctctttaaaacattacata

SEQ ID NO: 14447 - DNA, 545 bp, Homo sapiens
  source 1..545: mol_type = unassigned DNA
aaagcttttctgtccctgtcgcgatgtgtgcccggagtctctcccgctcctgtctcgagtgctttctctacggaatctcgctctgtcacccaggctggaatgcaatggcacgatctcaactcactggcaacctccgccacccggcttcaagtgattcttctgcctgagtctgctgagtagctgagatgacagatatccgccatcacactggctaatttttgtatttttagtaaagatggggtttcaccatcttggccaggctggttttgaactgttgacctcacggtgatctgcctgcctcagtctcccatagtactgggattacaggtgtgagccactgcacccagcctgagtcccctttttaacttggagagtcccctttcctgggagttaccagtcctcctccattccagacacaggtggttctctgggtcggctacacagctgtcattctggaactttcttcggtactttcctgagttggattttattctaacccccgtcattgattgattccaaagttttttttttttttctgtagttca

SEQ ID NO: 14448 - DNA, 476 bp, Homo sapiens; identical to SEQ ID NO: 14434
  source 1..476: mol_type = unassigned DNA

SEQ ID NO: 14449 - DNA, 476 bp, Homo sapiens; identical to SEQ ID NO: 14434
  source 1..476: mol_type = unassigned DNA

SEQ ID NO: 14450 - DNA, 31 bp, Homo sapiens; identical to SEQ ID NO: 14435
  source 1..31: mol_type = unassigned DNA

SEQ ID NO: 14451 - DNA, 452 bp, Homo sapiens; identical to SEQ ID NO: 14436
  source 1..452: mol_type = unassigned DNA

SEQ ID NO: 14452 - DNA, 1234 bp, Homo sapiens
  source 1..1234: mol_type = unassigned DNA
gtgtgggcggggcgcagttgggggagggtgcagagacctgagggcttgaggttgcctggctggccccgctcccagaggcgggtgccgcgctgtcgcccaggtatctggggtctctggtgtctgagtgtctcattgtcggcgcgaacacaattgctccagccacaggcgaggcctggccaaggtgtgggcgcatctggggcaggtcttgagaggtccagcgcccggtggtgcggacagaggcggggcaccgcggcgctcgccgccgcctccccgcaggtgatcatcctcctgcaggtgtcctcgggtctcaggtggctgcgtgtctgcgccatggttgacattctgggcgagcggcacctggtgacctgtaagggcgcgacggtggaggccgaggcggcgctgcagaacaaggtggtggcactgtacttcgcggcggcccggtgcgcgccgagccgcgacttcacgccgctgctctgcgacttctatacggcgctggtggccgaggcgcggcggcccgcgcccttcgaagtggtcttcgtgtcagccgacggcagctcccaggagatgctggacttcatgcgcgagctgcatggcgcctggctggcgctgcccttccacgacccctaccggcatgagctgaggaagaggtacaacgtcacagccatccccaagcttgtgattgtgaaacaaaatggggaggtcatcaccaacaaagggcggaagcagatccgggaacgggggttggcctgcttccaggactgggtggaggcggccgatatcttccagaatttctccgtttgaagtgggagggacctcagagggccaggacaggtgctgcttctccagcaccgacgctggggcaaagaggagcatgttgggttccttcctctgttggtgtgatttcattgtatttcagagcagaagcactaagctgtggtcaaaaagcaactattgctcaggaaataatacactccatattttgatcatgcaggctgtttgtattatagttatttttgttattctttgcatacctttatccacctgtgcttaaggaaggatcctcatatgttcatactgagctgttggaaatctatgcaagacatttatttgtacaagtctcttcaggtaaaataatatatttattgataacattttctggcgatctgtttattttaatggtatgctttcacaactatcttaataaagtttgcaagctgtgtactttaataaacaa

SEQ ID NO: 14453 - DNA, 1457 bp, Homo sapiens
  source 1..1457: mol_type = unassigned DNA
gtgtgggcggggcgcagttgggggagggtgcagagacctgagggcttgaggttgcctggctggccccgctcccagaggcgggtgccgcgctgtcgcccaggtatctggggtctctggtgtctgagtgtctcattgtcggcgcgaacacaattgctccagccacaggcgaggcctggccaaggtgtgggcgcatctggggcaggtcttgagaggtccagcgcccggtggtgcggacagaggcggggcaccgcggcgctcgccgccgcctccccgcaggtgatcatcctcctgcaggtgtcctcgggtctcaggtggctgcgtgtctgcgccatggttgacattctgggcgagcggcacctggtgacctgtaagggcgcgacggtggaggccgaggcggcgctgcagaacaaggtggtggcactgtacttcgcggcggcccggtgcgcgccgagccgcgacttcacgccgctgctctgcgacttctatacggcgctggtggccgaggcgcggcggcccgcgcccttcgaagtggtcttcgtgtcagccgacggcagctcccaggagatgctggacttcatgcgcgagctgcatggcgcctggctggcgctgcccttccacgacccctaccggcaacggagtctcgctctgttgcccaggctggagtgcagtggcgtgatcttagctcactgcaacctttgcctcctgggttcaagtgattctctagccttagcctcctgagcatctgggactacagccattgctgtgaattacgtgagggaaagatattgaagaggagttggacactccgagagtgcagctgttctccccccgcaccatccgtgtcctgcattctgcgagtctgtgctcattaacaatgtgctgtgaccatgtgactcagcaatcctgctgctgggtatatacccgaaagaaaggaaaaggaagccagtatattgaagaggtatctgcacccccatgtttattgcagcactgttcacaacagccaagatttggaagcaacctaagtgtccatcaacagatgaatggataaagaaaacgtggtacatatacacaatggagtactcttcagccattaaaaaaatgagattctgtcatttgcaataatatagatggaaaaggaggcccttatgtgaagtgaaataagccaggcacagaaagacaaacatcacatgttctcacttatttgtgggatctaatgatcaaaacaattgaactcttggacatagagagtagaaggttggttaccagaagctggaaaggaaagtggggttgggaggaaggtgggaatggttaataggtacaaaaaaatacaaagaataaataagacctaatatttgatagcacaacagtgtgactactgtcaataatcatttaattgtacatttaaaaataactataattgcattgtttgtaacacaaaagataaatgcttgagggga

SEQ ID NO: 14454 - DNA, 827 bp, Homo sapiens
  source 1..827: mol_type = unassigned DNA
gtgccgcgctgtcgcccaggtatctggggtctctggtgtctgagtgtctcattgtcggcgcgaacacaattgctccagccacaggcgaggcctggccaaggtgtgggcgcatctggggcaggtcttgagaggtccagcgcccggtggtgcggacagaggcggggcaccgcggcgctcgccgccgcctccccgcaggtgatcatcctcctgcaggtgtcctcgggtctcaggtggctgcgtgtctgcgccatggttgacattctgggcgagcggcacctggtgacctgtaagggcgcgacggtggaggccgaggcggcgctgcagaacaaggtggtggcactgtacttcgcggcggcccggtgcgcgccgagccgcgacttcacgccgctgctctgcgacttctatacggcgctggtggccgaggcgcggcggcccgcgcccttcgaagtggtcttcgtgtcagccgacggcagctcccaggagatgctggacttcatgcgcgagctgcatggcgcctggctggcgctgcccttccacgacccctaccggcacagccggagccaactaatacatgcggccaccttctctccatgcctgcactttctgttccaagccatctggtggaagcaatccaattgcctgcagaatcatccgaaagcatcactgggaagaagctggtggaactaagaagcaattctttagcctgacagccagtctgtttttagtatttctaaacatgaaatcatctcagaagaagccaagggctgtcgaggtgatttgcctgaggtcctacaactcatcactgactgtgtttggaggaaggaagt

SEQ ID NO: 14455 - DNA, 805 bp, Homo sapiens
  source 1..805: mol_type = unassigned DNA
aggagtgtgggcggggcgcagttgggggagggtgcagagacctgagggcttgaggttgcctggctggccccgctcccagaggcgggtgccgcgctgtcgcccaggtatctggggtctctggtgtctgagtgtctcattgtcggcgcgaacacaattgctccagccacaggcgaggcctggccaaggtgtgggcgcatctggggcaggtcttgagaggtccagcgcccggtggtgcggacagaggcggggcaccgcggcgctcgccgccgcctccccgcaggtgatcatcctcctgcaggtgtcctcgggtctcaggtggctgcgtgtctgcgccatggttgacattctgggcgagcggcacctggtgacctgtaagggcgcgacggtggaggccgaggcggcgctgcagaacaaggtggtggcactgtacttcgcggcggcccggtgcgcgccgagccgcgacttcacgccgctgctctgcgacttctatacggcgctggtggccgaggcgcggcggcccgcgcccttcgaagtggtcttcgtgtcagccgacggcagctcccaggagatgctggacttcatgcgcgagctgcatggcgcctggctggcgctgcccttccacgacccctaccggcatgagctgaggaagaggtacaacgtcacagccatccccaagcttgtgattgtgaaacaaaatggggaggtcatcaccaacaaagggcggaagcagatccgggaacgggggttggcctgcttccaggactgggtggaggcggccgatatcttccagaatttctccgtttga

SEQ ID NO: 14456 - DNA, 739 bp, Homo sapiens
  source 1..739: mol_type = unassigned DNA
aggagtgtgggcggggcgcagttgggggagggtgcagagacctgagggcttgaggttgcctggctggccccgctcccagaggcgggtgccgcgctgtcgcccaggtatctggggtctctggtgtctgagtgtctcattgtcggcgcgaacacaattgctccagccacaggcgaggcctggccaaggtgtgggcgcatctggggcaggtcttgagaggtccagcgcccggtggtgcggacagaggcggggcaccgcggcgctcgccgccgcctccccgcaggtgatcatcctcctgcaggtgtcctcgggtctcaggtggctgcgtgtctgcgccatggttgacattctgggcgagcggcacctggtgacctgtaagggcgcgacggtggaggccgaggcggcgctgcagaacaaggtggtggcactgtacttcgcggcggcccggtgcgcgccgagccgcgacttcacgccgctgctctgcgacttctatacggcgctggtggccgaggcgcggcggcccgcgcccttcgaagtggtcttcgtgtcagccgacggcagctcccaggagatgctggacttcatgcgcgagctgcatggcgcctggctggcgctgcccttccacgacccctaccggcataaagtttcgctcttgttgcccaggctagagtgcaatggcgcaggctcagctcactgcaacctctgcctcctgggttcaagtgattctcctgcctcagcctcc

SEQ ID NO: 14457 - DNA, 797 bp, Homo sapiens
  source 1..797: mol_type = unassigned DNA
gtcggaggtgaggagacgtcgccgggtgaggaagcggggggctagcggcctggcgctgcggcgaccgaccggggcgtcaggatccctggcccccggagagcgaagggcgggcgggtcccggaggcaccttcactaacccggtgcggagcacttggcgacgcctccctgcccatctcatatctctcggctcatcgctgctctgggcaccagctgcctcttggctggcgctgctgtcacacggtggactgttctggccttactgagctgccgtttggggacatcagattcagcaagaagaattgtatagaaatgtaaaaaacatttatgtgtgcttcacatgtggcatgaaaaaaatgaggacctctggtcaaaattgcctgagttcagaatttcatgctggaaggaaagttagacgtaacttctaatttctagttccagtaagcatctcttcttggaaaatttccaaaaaagagtcctgctctgttgcccaggctggagtacattggtgtgatgatcatggttcactgcagcctcgacctcccaggctcaagcaattctcctacctcagcctcctgagtaactgggactataggatttctttgaagaaaaatgtgcttcttgaatcaactgcagtctctcctctgcataagagctcttaagggtactagcaggatagaagcaaatgaaactgaaagctcatctgcagctcagaaaagcaaagacatggaattttaaagagtgaaggtagcatggtgtcggccatgggtgaacaagacacagccagacaatgtggacca

SEQ ID NO: 14458 - DNA, 3941 bp, Homo sapiens
  source 1..3941: mol_type = unassigned DNA
aggaagcggggggctagcggcctggcgctgcggcgaccgaccggggcgtcaggatccctggcccccggagagcgaagggcgggcgggtcccggagcaagaagaattgtatagaaatgtaaaaaacatttatgtgtgcttcacatgtggcatgaaaaaaatgaggacctctggtcaaaattgcctgagttcagaatttcatgctggaaggaaagttagacgtaacttctaatttctagttccagtaagcatctcttcttggaaaatttccaaaaaagagtcctgctctgttgcccaggctggagtacattggtgtgatgatcatggttcactgcagcctcgacctcccaggctcaagcaattctcctacctcagcctcctgagtaactgggactataggatttctttgaagaaaaatgtgcttcttgaatcaactgcagtctctcctctgcataagagctcttaagggtactagcaggatagaagcaaatgaaactgaaagctcatctgcagctcagaaaagcaaagacatggaattttaaagagtgaaggtagcatggtgtcggccatgggtgaacaagacacagccagacaatgtggaccaatttcttcaaactacggcttttctgctgtctgcttgcagtgttgatggtggtggtgctggtcatcaatgttactcaggtagagtacttggaccatgagactgtttcagccactttcatcgacagcagtggacagtttgtttcctcccaggtgacaggaattagccgaaatccctactgtggctatgatcagcagaccctgtccagccaggagcgcatggaggaggactccttgctggctgccttgcaccggcaggttcctgatgtgggcccagtcccctttgtgaagagcactgacccttcttccagctactttgtcatcttgaactctgctgccttctttaaggtgggaagccagcttgaggtgctggttcatgtgcaggattttcaaagaaagcccaagaagtatggtggagactacctgcaggccagaattcactccctcaagctgcaggctggggctgtgggcagggtggtggattaccagaatgggttttacaaggttttctttactttgctatggccaggcaaagttaaagtatccgtatctctggtccaccccagtgaagggatcagagttcttcagcgcttacaggaagataaaccagacagggtctatttcaagagtctcttccgttcaggaagaatttctgaaactactgagtgcaacgtgtgtcttcctgggaatctgcccctgtgtaactttacagacctctacactggggagccctggttctgcttcaaaccaaagaagctcccttgcagcagcagaattacccatttcaaaggtggatacctgaaaggtctcctaaccgctgcagagagtgctttcttccagagtggtgtcaatatcaaaatgccagtcaactccagtggacctgattgggtaactgtgattcccaggagaataaaagaaactaacagtctagaactatctcaaggctcaggaacttttccttctgggtattattataaagaccagtggaggcccagaaagtttaagatgcgtcagtttaatgaccctgacaacattacagagtgcttacaaagaaaagtggtgcatttatttggtgactcaacaatcaggcaatggtttgaataccttactacatttgttccagatttagtggagtttaacttgggtagtcccaagaatgtgggtcccttccttgcagtggaccagaagcacaacatcctgctcaaataccgctgccatggtccacccatccgcttcacgactgtctttagcaatgagctccattatgtggcgaatgagctgaatggcattgtgggagggaagaacacagtggttgccatagctgtatggtctcacttcagcaccttccctttggaagtgtacatccggcggctcaggaacatccgtcgagcagtggttcggctcctcgatcgaagcccaaagaccgtggtggtcatccggacggccaacgcccaagagctgggacctgaggtgagccttttcaacagcgactggtacaactttcagctggacaccatccttcggaggatgttctcaggggttggagtatatctcgtcgatgcctgggagatgaccctggcccattatctaccgcacaagctgcatccagatgaagttattgtgaagaaccagctggacatgttcttgtcctttgtgtgccccttggaaacctagcctgtcttggaagggactggaggaatcatattcaatgaccttctcaattgacctgagttacagaaagtggccccagtgagagatgactgcccttaataagtataaaatttcaaaaagatctggacttaatatgatgacttataaggagcttagaaaatgcaggttacatttatatctacctataggattttatccaatgttgacttagccatggtagaactcttaactgcatctacacactatattgctcttgtaaccaaagatgctaatgagtgtatttgaattagcttctcctaggaggggtgactactttgctaaagagtatgaaaaatgttttgatggaagggacaagtttggttggtagtagagtgtttgtagcttatctggtaaaggaaattgagtgcatctgcatgcatagcacaagtaatccatcttctggcggttaactagagaaagcttatagtcagaggctcttgtgaatgcactgaagactgctgtgtctcaggagtttctcttgatgatctaccttttctgaattacttgaaaaggccaatgtgcttggttcgagttttttagtgaatatttacaatttcctgcttttatctagaaaagaagcaaaagggaaatatgaaagcagtatatataaaatctgtgctttggaattgatatttgcatttggtgattgttttttatttgattcagctaaattttatgtgttgaatacttactctagaataactacttttggaactggaagggggaaatctgtaaatggaaatttatttttatgttctgaaatttgagggtttaggaattgacttttgtgtaaagaatgctacgatattataaagctgtggaagttttttccactagtttcaggtgtttttttttttgttgttgttgttgttattttgaactacttaccaaaattagaagttaaaatctaattagaaattaataagatactaaaattcatgacagttttttgtttgtttgtttgtttgttttttggtatttcttgatttgggcataaaaggcacacccattctctcatgcttggaagaagctgctattcctactggctatctaagaagaatggaattattaattttatttgacttattaattttaaacgagtttaatttgggatcatttagtaagtactcttttctttttgagctgtgatagattatagtctagtttaagttgctcctaagtagacagatgaagaaactagggaggctttagagaggaagacagatgcttgaagtatgaacaatatatacccttagaagaatgggtcaaataatttgggtttttaatttaaaataggagggccccagatcttactttcctgtccttgaggaacaccttcaagtttttaaagtattttagggggaaagaagatttttaattgtttctgagcctaatgaggtaataaaatatattaaaatagtttaattttaatggtccttacgctttacagtacctaaggatcacttgtagtatctgacaaaaatgcagaattaaagagtcatggcagggtgtggtagctcaagcctgtaatcccagcactttgggaggccaggcaggaggattgcttgaggccaggagtttgagaccagcctgggcaacatagtaagacctcatctctacaaaaaataaaaaa

SEQ ID NO: 14459 - DNA, 936 bp, Homo sapiens
  source 1..936: mol_type = unassigned DNA
gcggcctggcgctgcggcgaccgaccggggcgtcaggatccctggcccccggagagcgaagggcgggcgggtcccggaggcaccttcactaacccggtgcggagcacttggcgacgcctccctgcccatctcatatctctcggctcatcgctgctctgggcaccagctgcctcttggctggcgctgctgtcacacggtggactgttctggccttactgagctgccgtttggggacatcagattcaggtcgtatggggagaaacgagtgtaactttacaagcaagaagaattgtatagaaatgtaaaaaacatttatgtgtgcttcacatgtggcatgaaaaaaatgaggacctctggtcaaaattgcctgagttcagaatttcatgctggaaggaaagttagacgtaacttctaatttctagttccagtaagcatctcttcttggaaaatttccaaaaaagagtcctgctctgttgcccaggctggagtacattggtgtgatgatcatggttcactgcagcctcgacctcccaggctcaagcaattctcctacctcagcctcctgagtaactgggactataggatttctttgaagaaaaatgtgcttcttgaatcaactgcagtctctcctctgcataagagctcttaagggtactagcaggatagaagcaaatgaaactgaaagctcatctgcagctcagaaaagcaaagacatggaattttaaagagtgaaggtagcatggtgtcggccatgggtgaacaagacacagccagacaatgtggaccaatttcttcaaactacggcttttctgctgtctgcttgcagtgttgatggtggtggtgctggtcatcaatgttactcaggtagagtacttggaccatgagactgtttcagccactttcatcgacagcagtggacagtttgtttcctcccag

SEQ ID NO: 14460 - DNA, 8074 bp, Homo sapiens
  source 1..8074: mol_type = unassigned DNA
atctgctcccgagtccccagccccgtgctgataggtgcagcccctggagtcgtggctgtgggcataggtgccagggaggggaggcccgggtcgaaggcataggcagaattggagccctgggttgccaaagcgtcgcagctaagaagccggagcccaggctagtaccggcggggcggggcggggcggggccgggagcgagcatctccatcctcagtttcctccacttgcggcaacgccacagctcggtacagttcggacctccacgccgcagcgaaagacttctgtcctccaggcaccttcactaacccggtgcggagcacttggcgacgcctccctgcccatctcatatctctcggctcatcgctgctctgggcaccagctgcctcttggctggcgctgctgtcacacggtggactgttctggccttactgagctgccgtttggggacatcagattcagcaagaagaattgtatagaaatgtaaaaaacatttatgtgtgcttcacatgtggcatgaaaaaaatgaggacctctggtcaaaattgcctgagttcagaatttcatgctggaaggaaagttagacgtaacttctaatttctagttccagtaagcatctcttcttggaaaatttccaaaaaagagtcctgctctgttgcccaggctggagtacattggtgtgatgatcatggttcactgcagcctcgacctcccaggctcaagcaattctcctacctcagcctcctgagtaactgggactataggatttctttgaagaaaaatgtgcttcttgaatcaactgcagtctctcctctgcataagagctcttaagggtactagcaggatagaagcaaatgaaactgaaagctcatctgcagctcagaaaagcaaagacatggaattttaaagagtgaaggtagcatggtgtcggccatgggtgaacaagacacagccagacaatgtggaccaatttcttcaaactacggcttttctgctgtctgcttgcagtgttgatggtggtggtgctggtcatcaatgttactcaggtagagtacttggaccatgagactgtttcagccactttcatcgacagcagtggacagtttgtttcctcccaggtgacaggaattagccgaaatccctactgtggctatgatcagcagaccctgtccagccaggagcgcatggaggaggactccttgctggctgccttgcaccggcaggttcctgatgtgggcccagtcccctttgtgaagagcactgacccttcttccagctactttgtcatcttgaactctgctgccttctttaaggtgggaagccagcttgaggtgctggttcatgtgcaggattttcaaagaaagcccaagaagtatggtggagactacctgcaggccagaattcactccctcaagctgcaggctggggctgtgggcagggtggtggattaccagaatgggttttacaaggttttctttactttgctatggccaggcaaagttaaagtatccgtatctctggtccaccccagtgaagggatcagagttcttcagcgcttacaggaagataaaccagacagggtctatttcaagagtctcttccgttcaggaagaatttctgaaactactgagtgcaacgtgtgtcttcctgggaatctgcccctgtgtaactttacagacctctacactggggagccctggttctgcttcaaaccaaagaagctcccttgcagcagcagaattacccatttcaaaggtggatacctgaaaggtctcctaaccgctgcagagagtgctttcttccagagtggtgtcaatatcaaaatgccagtcaactccagtggacctgattgggtaactgtgattcccaggagaataaaagaaactaacagtctagaactatctcaaggctcaggaacttttccttctgggtattattataaagaccagtggaggcccagaaagtttaagatgcgtcagtttaatgaccctgacaacattacagagtgcttacaaagaaaagtggtgcatttatttggtgactcaacaatcaggcaatggtttgaataccttactacatttgttccagatttagtggagtttaacttgggtagtcccaagaatgtgggtcccttccttgcagtggaccagaagcacaacatcctgctcaaataccgctgccatggtccacccatccgcttcacgactgtctttagcaatgagctccattatgtggcgaatgagctgaatggcattgtgggagggaagaacacagtggttgccatagctgtatggtctcacttcagcaccttccctttggaagtgtacatccggcggctcaggaacatccgtcgagcagtggttcggctcctcgatcgaagcccaaagaccgtggtggtcatccggacggccaacgcccaagagctgggacctgaggtgagccttttcaacagcgactggtacaactttcagctggacaccatccttcggaggatgttctcaggggttggagtatatctcgtcgatgcctgggagatgaccctggcccattatctaccgcacaagctgcatccagatgaagttattgtgaagaaccagctggacatgttcttgtcctttgtgtgccccttggaaacctagcctgtcttggaagggactggaggaatcatattcaatgaccttctcaattgacctgagttacagaaagtggccccagtgagagatgactgcccttaataagtataaaatttcaaaaagatctggacttaatatgatgacttataaggagcttagaaaatgcaggttacatttatatctacctataggattttatccaatgttgacttagccatggtagaactcttaactgcatctacacactatattgctcttgtaaccaaagatgctaatgagtgtatttgaattagcttctcctaggaggggtgactactttgctaaagagtatgaaaaatgttttgatggaagggacaagtttggttggtagtagagtgtttgtagcttatctggtaaaggaaattgagtgcatctgcatgcatagcacaagtaatccatcttctggcggttaactagagaaagcttatagtcagaggctcttgtgaatgcactgaagactgctgtgtctcaggagtttctcttgatgatctaccttttctgaattacttgaaaaggccaatgtgcttggttcgagttttttagtgaatatttacaatttcctgcttttatctagaaaagaagcaaaagggaaatatgaaagcagtatatataaaatctgtgctttggaattgatatttgcatttggtgattgttttttatttgattcagctaaattttatgtgttgaatacttactctagaataactacttttggaactggaagggggaaatctgtaaatggaaatttatttttatgttctgaaatttgagggtttaggaattgacttttgtgtaaagaatgctacgatattataaagctgtggaagttttttccactagtttcaggtgtttttttttttgttgttgttgttgttattttgaactacttaccaaaattagaagttaaaatctaattagaaattaataagatactaaaattcatgacagttttttgtttgtttgtttgtttgttttttggtatttcttgatttgggcataaaaggcacacccattctctcatgcttggaagaagctgctattcctactggctatctaagaagaatggaattattaattttatttgacttattaattttaaacgagtttaatttgggatcatttagtaagtactcttttctttttgagctgtgatagattatagtctagtttaagttgctcctaagtagacagatgaagaaactagggaggctttagagaggaagacagatgcttgaagtatgaacaatatatacccttagaagaatgggtcaaataatttgggtttttaatttaaaataggagggccccagatcttactttcctgtccttgaggaacaccttcaagtttttaaagtattttagggggaaagaagatttttaattgtttctgagcctaatgaggtaataaaatatattaaaatagtttaattttaatggtccttacgctttacagtacctaaggatcacttgtagtatctgacaaaaatgcagaattaaagagtcatggcagggtgtggtagctcaagcctgtaatcccagcactttgggaggccaggcaggaggattgcttgaggccaggagtttgagaccagcctgggcaacatagtaagacctcatctctacaaaaaataaaaaattatccaggtgtgggccgacagtcccagctactagggaggctaaggcagggtgattgattgagcccagtagtttgaggctgcagtgagttatgattgcgccactacactcccacttgggcaacagacaagagatcttatctctaaaaaatttttgttaaataataaaagaattaaggccagggatgttggctcacatctgtaatcccagcagggattatagtctcgggaggctgaggtgggcggattgcttgagcccggaaggtcaagaccagcctgggtgccatggtgaaaccccatctctacaaaaaaatacaaaaactagctgggtgtggtggcaccacctgtagtccccgctacttaggaggctgaggtgggaggattgcttgagcccaggaggcagaaggttgcagaggttgcagtgagccttgattgtgccactgtactccagtctgggcaacagggcaagaccctgtctctaaaaaaaaaaaaaaaaaaaaaagagggaccatgatgcctctgggatttatgaaaccaacctttgtggcgagtgctcagtgattctgatgcaatggtggtattccacactgtgagaaacactaagagaagaggtaagatagaatgagggaataaacatggcttgtttattattttgggggatttaccaataactggtttaattctgttcatgatccaatagtattggtgatattagctccattttatagatgaggaactcatgtttagatctgaaataaggtatgtgagagtccatatctcttttcagctaaacttgtgagactttcgtaaagaagcgtttgtatttatttatttgtttttgagacagggtcttgctcttttgcccaggctggagtgcagtggcatgatatggctcactgcagccttgacttcctgggctcaagggatccttctgcctcagcctcctgagtagctgggactacaggtatgtaccaccatgcccagctaatttttgtatctttttgtagagactacattttgccatgttgtccaggctggtcttaaactcctgagctcaagcatctgcccacctcagcttcccaaagtgctgggattacaggtgtgagccactgtgcccagctgagagtttttcttgtcgtgaaagaacttgacatttcctcaaggatttataaaggaggctgaggagtaattttcccaggagaattttaaaaagaaagcgggcattgctcctccagtggtttggaatgatgccacttgattgtgcaaatgatttcttatgatcttgtctggttttctgttattttttgatttggtgacatagctctcaaagatttggtgacacagcttcttgagtcactttcatctctcttaaaaaaattttttttttaacaacttttaagttcaggggtacatgtgccagtttgtttcataggtaaacttacgtcatgggggtttgttgtatagatgatttcatcacccaggtgttaagcctagtacccattagtaatttttcctgatcctctccctcctcctaccctccaccctccaatagaccccagtgtgtgttgttgccctttatgtgtccatgtgttctcatcatttagctctcacttatcagtgagaacaactttcatcccacatctaatttgtctttcttcactctggtgtggaaattttgatagagattccaatatcacttaaacgtttcccagaatatttagatagaataatttagtttcttctgaaaagtttattttaggctagtgccacatggttgtgaatattagcatggtagccaaataatagtttgtttaaatgtatatttcccaatataaatataaggggcatcataatttttaaaaactataaaatctagaagaaaaatctatggataaaatccataattctatcatctgaatgcaatgaacattagcatttaggtatattttcttgcaggttttttaaccatatacttatagagaatatgtaatttgggtctgtgttttttacatataaatatttttctatgttaaatagtcttcataagttaattataaagatctgcttaatagttctgctactgcagttttcattattagataagttggtcattatagttggacatttaggtttacaatattaaagcagtggtttatatcaatttcagtggtttaaaatatgaatttctattttggaatgaaagtattaatttaatgtagtgaatctcatattccagaactgagatgattgatttgatgctatttgtgacagacagaacccataataaagcctttctatgcaagttacattttatagaattatcctactaaaagtaacctttcttcagcgaatgcaaaacagacctttggtgttccagtatgattcattttgccattctgaacaactatcattttaattaagaccatttaactgacacttcctggattcagttattaagtttcagattgaaacttgatccagtttaataactgaatccagtttcacatttatcaatctgaaaacttagtttgcagattggtaaatcagggtacttgacaagaataaatatggtacgcctttatatattcatgtgttacatgccagaaatgagtctgtttctggaccctgttcaaggaaatagtgatgactgagagaggtacagggaaataaacacccaagggaaacaacagaaataagcctccccaactttctaaaaaactgctcagcattatctctgtggattctgggtaaattcagctttttaacatcagctagtcactaatgccagaaattccacttcaagtgtatttattttcttgtgttaagcattattctacctggtttatgtctacaatgtagtattagtgtacttaggattcttgacacctcagtgtgcaataaataaaattttgaagttgttgtttttcatttgaaggtgagaccacagcccctgagtgctaaggggacctgggaatcctaggggaatggaggtggtggacgataagaggatggttgagggcaggagtttaaaggacacagaagctaggagagcagaaaatgtactccaccaccttctgtctaacttgtctcttaaaagtgcttttacattttaactttttaaaaaaatgtgggccgggcatagtggctcatgcctgtaatcccagcactttgggaggccgaggtgggcggatcacctgaggtcaagagttcaagaccagcctgaccaatatgatgaaaccccatctctactaaaaatacaaaaatagccaggtgtggtggcacatgcctgtcatcccagctactcaggaggctgaggtgggagaatcgcttgaacccgggaggtggaggttgcagtgagccgagatcatgccattgcactctagcctgggcaacgagagtgaaactctgtctcaataaataaataaataaataaaaaataaaaaagtgtgaacttaaatatatttatatgtgtgtacatatattttcttttttaatattctggttaaatgagaggccatcgggcctctttttaagagtctaatgatgtgtatatctaatgcccattccagctggattgtaacactgcttggggaagataacttaaaaaaaagtagtaccgagattacagcagctagtgtcctaaatggaaaagaagtgaaactaaatgtcataggagaaatcctttcagttttgtgcagtggttcatttgctgttaaatctaccccattaccattccccttactccttgaaaataaagtgatcttcatgtta

SEQ ID NO: 14461 - DNA, 620 bp, Homo sapiens
  source 1..620: mol_type = unassigned DNA
ggctgtgggcataggtgccagggaggggaggcccgggtcgaaggcataggcagaattggagccctgggttgccaaagcgtcgcagctaagaagccggagcccaggctagtaccggcggggcggggcggggcggggccgggagcgagcatctccatcctcagtttcctccacttgcggcaacgccacagctcggtacagttcggacctccacgccgcagcgaaagacttctgtcctccaggcaccttcactaacccggtgcggagcacttggcgacgcctccctgcccatctcatatctctcggctcatcgctgctctgggcaccagctgcctcttggctggcgctgctgtcacacggtggactgttctggccttactgagctgccgtttggggacatcagattcaggtcgtatggggagaaacgagtgtaactttacaagcaagaagaattgtatagaaatgtaaaaaacatttatgtgtgcttcacatgtggcatgaaaaaaatgaggacctctggtcaaaattgcctgagttcagaatttcatgctggaaggaaagttagacgtaacttctaatttctagttccagtaagcatctcttcttggaaaatttccaaaaaa

SEQ ID NO: 14462 - DNA, 3450 bp, Homo sapiens
  source 1..3450: mol_type = unassigned DNA
gaataataacttttagatctgtacagataccccttttttctgtaggggaaaacaagatcattggatcattgaactaaataattataatagtttttaagaaaaataacatttggagcttttatctttggtttatattttttcacttatatcgctgtttataaagttttgaccttcagccaaggtctgagagtgatttaccatgttgaagttcatgtatttaaatagactatttaaattactgttttttattagtaaggaaaaggaaacgttcctatgcccactcctcccactatatcatgtataactctcttgcctgtaaaattgtactcttaatttctaatgtttttctttacttcattttcagtatctttaacctttatatcatatgcatatttttgtttcagcaagaagaattgtatagaaatgtaaaaaacatttatgtgtgcttcacatgtggcatgaaaaaaatgaggacctctggtcaaaattgcctgagttcagaatttcatgctggaaggaaagttagacgtaacttctaatttctagttccagtaagcatctcttcttggaaaatttccaaaaaagagtcctgctctgttgcccaggctggagtacattggtgtgatgatcatggttcactgcagcctcgacctcccaggctcaagcaattctcctacctcagcctcctgagtaactgggactataggatttctttgaagaaaaatgtgcttcttgaatcaactgcagtctctcctctgcataagagctcttaagggtactagcaggatagaagcaaatgaaactgaaagctcatctgcagctcagaaaagcaaagacatggaattttaaagagtgaaggtagcatggtgtcggccatgggtgaacaagacacagccagacaatgtggaccaatttcttcaaactacggcttttctgctgtctgcttgcagtgttgatggtggtggtgctggtcatcaatgttactcaggtagagtacttggaccatgagactgtttcagccactttcatcgacagcagtggacagtttgtttcctcccaggtgacaggaattagccgaaatccctactgtggctatgatcagcagaccctgtccagccaggagcgcatggaggaggactccttgctggctgccttgcaccggcaggttcctgatgtgggcccagtcccctttgtgaagagcactgacccttcttccagctactttgtcatcttgaactctgctgccttctttaaggtgggaagccagcttgaggtgctggttcatgtgcaggattttcaaagaaagcccaagaagtatggtggagactacctgcaggccagaattcactccctcaagctgcaggctggggctgtgggcagggtggtggattaccagaatgggttttacaaggttttctttactttgctatggccaggcaaagttaaagtatccgtatctctggtccaccccagtgaagggatcagagttcttcagcgcttacaggaagataaaccagacagggtctatttcaagagtctcttccgttcaggaagaatttctgaaactactgagtgcaacgtgtgtcttcctgggaatctgcccctgtgtaactttacagacctctacactggggagccctggttctgcttcaaaccaaagaagctcccttgcagcagcagaattacccatttcaaaggtggatacctgaaaggtctcctaaccgctgcagagagtgctttcttccagagtggtgtcaatatcaaaatgccagtcaactccagtggacctgattgggtaactgtgattcccaggagaataaaagaaactaacagtctagaactatctcaaggctcaggaacttttccttctgggtattattataaagaccagtggaggcccagaaagtttaagatgcgtcagtttaatgaccctgacaacattacagagtgcttacaaagaaaagtggtgcatttatttggtgactcaacaatcaggcaatggtttgaataccttactacatttgttccagatttagtggagtttaacttgggtagtcccaagaatgtgggtcccttccttgcagtggaccagaagcacaacatcctgctcaaataccgctgccatggtccacccatccgcttcacgactgtctttagcaatgagctccattatgtggcgaatgagctgaatggcattgtgggagggaagaacacagtggttgccatagctgtatggtctcacttcagcaccttccctttggaagtgtacatccggcggctcaggaacatccgtcgagcagtggttcggctcctcgatcgaagcccaaagaccgtggtggtcatccggacggccaacgcccaagagctgggacctgaggtgagccttttcaacagcgactggtacaactttcagctggacaccatccttcggaggatgttctcaggggttggagtatatctcgtcgatgcctgggagatgaccctggcccattatctaccgcacaagctgcatccagatgaagttattgtgaagaaccagctggacatgttcttgtcctttgtgtgccccttggaaacctagcctgtcttggaagggactggaggaatcatattcaatgaccttctcaattgacctgagttacagaaagtggccccagtgagagatgactgcccttaataagtataaaatttcaaaaagatctggacttaatatgatgacttataaggagcttagaaaatgcaggttacatttatatctacctataggattttatccaatgttgacttagccatggtagaactcttaactgcatctacacactatattgctcttgtaaccaaagatgctaatgagtgtatttgaattagcttctcctaggaggggtgactactttgctaaagagtatgaaaaatgttttgatggaagggacaagtttggttggtagtagagtgtttgtagcttatctggtaaaggaaattgagtgcatctgcatgcatagcacaagtaatccatcttctggcggttaactagagaaagcttatagtcagaggctcttgtgaatgcactgaagactgctgtgtctcaggagtttctcttgatgatctaccttttctgaattacttgaaaaggccaatgtgcttggttcgagttttttagtgaatatttacaatttcctgcttttatctagaaaagaagcaaaagggaaatatgaaagcagtatatataaaatctgtgctttggaattgatatttgcatttggtgattgttttttatttgattcagctaaattttatgtgttgaatacttactctagaataactacttttggaactggaagggggaaatctgtaaatggaaatttatttttatgttctgaaatttgagggtttaggaattgacttttgtgtaaagaatgctacgatattataaagctgtggaagttttttcca

SEQ ID NO: 14463 - DNA, 1832 bp, Homo sapiens
  source 1..1832: mol_type = unassigned DNA
acctctacactggggagccctggttctgcttcaaaccaaagaagctcccttgcagcagcagaattacccatttcaaaggtggatacctgaaaggtctcctaaccgctgcagagagtgctttcttccagagtggtgtcaatatcaaaatgccagtcaactccagtggacctgattgggtaactgtgattcccaggagaataaaagaaactaacagtctagaactatctcaaggctcaggaacttttccttctgggtattattataaagaccagtggaggcccagaaagtttaagatgcgtcagtttaatgaccctacaacattacagagtgcttacaaagaaaagtggtgcatttatttggtgactcaacaatcaggcaatggtttgaataccttactacatttgttccagatttagtggagtttaacttgggtagtcccaagaatgtgggtcccttccttgcagtggaccagaagcacaacatcctgctcaaataccgctgccatggtccacccatccgcttcacgactgtctttagcaatgagctccattatgtggcgaatgagctgaatggcattgtgggagggaagaacacagtggttgccatagctgtatggtctcacttcagcaccttccctttggaagtgtacatccggcggctcaggaacatccgtcgagcagtggttcggctcctcgatcgaagcccaaagaccgtggtggtcatccggacggccaacgcccaagagctgggacctgaggtgagccttttcaacagcgactggtacaactttcagctggacaccatccttcggaggatgttctcaggggttggagtatatctcgtcgatgcctgggagatgaccctggcccattatctaccgcacaagctgcatccagatgaagttattgtgaagaaccagctggacatgttcttgtcctttgtgtgccccttggaaacctagcctgtcttggaagggactggaggaatcatattcaatgaccttctcaattgacctgagttacagaaagtggccccagtgagagatgactgcccttaataagtataaaatttcaaaaagatctggacttaatatgatgacttataaggagcttagaaaatgcaggttacatttatatctacctataggattttatccaatgttgacttagccatggtagaactcttaactgcatctacacactatattgctcttgtaaccaaagatgctaatgagtgtatttgaattagcttctcctaggaggggtgactactttgctaaagagtatgaaaaatgttttgatggaagggacaagtttggttggtagtagagtgtttgtagcttatctggtaaaggaaattgagtgcatctgcatgcatagcacaagtaatccatcttctggcggttaactagagaaagcttatagtcagaggctcttgtgaatgcactgaagactgctgtgtctcaggagtttctcttgatgatctaccttttctgaattacttgaaaaggccaatgtgcttggttcgagttttttagtgaatatttacaatttcctgcttttatctagaaaagaagcaaaagggaaatatgaaagcagtatatataaaatctgtgctttggaattgatatttgcatttggtgattgttttttatttgattcagctaaattttatgtgttgaatacttactctagaataactacttttggaactggaagggggaaatctgtaaatggaaatttatttttatgttctgaaatttgagggtttaggaattgacttttgtgtaaagaatgctacgatattataaagctgtggaagttttttccact

SEQ ID NO: 14464 - DNA, 5461 bp, Homo sapiens
  source 1..5461: mol_type = unassigned DNA
agtaattgtgtgcatggctcggctgtgcagggagggtggaggcaaaattgatatcaaataagggtatcaaactgagatctagatgttccatttaagttgttgttcattttcattagccacgccaggggtgaaatgcttataacttaaccattctctgtagtaagaacatttgttttcaatggatttatatttttcctctccataaagactgaattagtgctatagtgaatataaatgaagggtgtttctttaccctcttttccttttattatttactaatcagacttcagctcagttagataaaagagagaggttctgttgcctagatgtgaggcctttaatgaggatgggagcccccagggagccgaaatccaaagtagaacgatgccgctttccggtttcttgcaatttcttcagttgcttctcccttttccaatgggcctagtgagcaggaactatccaaggtgctagaacgctggcagccttgccgttcaatgcagacggattgcagaaacagagaagaaagattactgcttatttcagaagaatataatcaaatgaggtacattagccagcttggtgattgcttctggtcctgtaatcatctgtgtagcaaagtgggtaaaatcattcaatttcttccctgctggacctggaaggagaggggctgtgtgttcatccccacccattagctatgccctcttttctccgaatgtcgatttaaggaagcaagcacctgtcttccgccactgcatcttcctagcaaactttaaaggccattttatctgataggaaggacatcgagaatgctctgatctagtgatgaagaatctgggagtcgacacttttcccatccagacacaatgcactttaattgaagaaacactgagctgaactacaagtctatttcttatggtgctggattactcctacagaactgccctgagatcaaccgtgagagagggctctgacagacacaagtcaccttctggttattgcacttagctctccctggggacttaaattttggcagtgttcctctttacatgatatcctccaagatgatgagttctaatcctgaggaagaccctttggacacatttctccagtacattgaggatatggggatgaaggcctatgatggcttggttattcagaatgcgtcagatattgctcgagagaatgatcgcttgagaaatgaaactaacctagcctatttgaaagagaagaatgaaaaacgccgaagacaagaagaagcaataaagcgcataggtggagaagtagggcgaggccacgaaggaagttacgtgggcaaacatttccgcatgggattcatgacaatgcctgctcctcaggacagacttccccatccttgctccagtggcttttctgtgagatcacagtccctgcactcggttgggggcacagacgatgacagcagctgtggctcacggagacaaccaccacccaaacccaagagggaccccagcaccaagctgagcacctcatcagagacagtcagcagcactgcagccagtaagagcgggaaaacccctgagaggactgaagcgtcagctaaaccaagaccccacagcgatgaatattccaagaagattcctcctcccaaaccgaagcgaaatccgaacactcagctgagcacatctttcgatgaaacgtacatcaaaaagcatgggccccggaggacgtcgctgccgcgggactcctccttgtcccagatgggcagccccgcgggagaccccgaggaagaggagcccgtgtacatcgagatggtggggaacattctcagagacttcaggaaggaggacgatgaccagagcgaggccgtctacgaggaaatgaagtaccctatctttgacgacttgggccaagacgccaaatgtgacttcgaccatcacagctgttcttcgcagtgtgctactcccacggtgcctgacttggacttcgccaaggcctcagtgccatgcccccccaaggggctgctttgcgacatccctccgcccttccccaacctgctttctcacagacccccgctgctggtatttccccccgcccccgtgcattgctcccccaactccgacgagtccccgcttacccctctggaggtcacgaagcttcccgtgctggaaaacgtgtcttacatgaaacagccagccggggcgtcgccctccacgctgccgtcccacgtccccggccatgcgaaactggagaaagagcaggccgcggccctgggacctgcctctgccacccctgcgctctcctcgtcgcccccacccccgtctacgctgtaccgaacccagtctccccatggctaccctaaaagtcactccacctctccctcccccgtcagcatggggaggtccctgactcccctgagcctcaaaaggcctcccccttacgacgctgtgcattcgggcagcctctcaaggagctctccttcagtgcctcactcgacccccagacccgtgtcgcaagatggggccaagatggtcaacgccgcggtgaacacctacggggcagccccgggtggctcccggtcccggacacccacgagcccgctggaggagctgaccagcctcttctcctccggccgcagcctgctgcgcaagtcgtccagtggccggcgctccaaagagcctgcagagaaatcaacagaggaactgaaagtccgaagccacagcacggagccattaccaaagttggacaacaaggaaagaggccaccatggggcgtcttcctccagagagcctgtcaaagctcaggaatgggatggaacaccagggacacctgtggtcaccagtcgactaggaagatgctctgtgagccccaccttgttagcgggaaaccacagttcagagcctaaagtaagctgcaaattaggccggtctgcgtcgacgtcaggtgtgcctcctccatcagtcactcccctcaggcaaagcagtgacctgcaacagagccaggtaccatcatcgttagccaatcgtgattgacttcctgtgatacaacttgccaaatgcttcccacctctgtctgtcctgttgctgtagacaactttcgcatttgcttttatttttctatgtgtgtatgggttaggggatgcgggggatgagttctggcagtctgtgttttcatttgaaaaagaatatctttcttccttgtgattggtggtgaaactttctttgctgtttgttaccaaatcgtttttgtctctggtttccatcattctgtaatataaatgtagtaaacttgtactatatgtattggcttagtggttcttttttaaattctttctctctttcatgttttgtgtacttttatactgtctctgaaaatttatcaatatttgataaatttatctactttgttttatgtagatttctttttaaatgttttgtccagaacactcgcacagatgttgtcaatgaatttgtacatatttcttagctcttatcctattatactgtaatatttctggtggttttatttttatttagcttggagcatgactgtaagacactgttgaatattgatgtccttataaatattcatatcccgattcatttggattgagtatggcagctagtctttcttctttcttaggctattgactggcctaagacaatttgactggccagacaaattgactggccagataatctagatatttaacaaaaactgcagattaataaggcaacctttaaatgaatgacttttctctcttataccaacaatatcagaaatgttctcagaaagggaatgtaagtgttcatgcatggtaaatgagatctcaattatcacttggagaaaagagacaagaaataaaggcataaactgaaatatcatttaatcctttacagcataatatgttgctctgatgttcgtttgggtacgtggttgtggatggggaattagtatggggaaaaatcactacacataaatgtcctatctttagctcacccaataggaattcaatacattgacttaatttgtgaggcttaattgtcgttactgttaagtattataggtgttaagtagggtggtgtcattctggaatgttttctctctgcttcctagcttcaatctttgcattcatgaaactcttctgaaatagcaacttataaaacactgatgatacctccaagggaactgcccattactgatgagaaaattacatattcatctattattttaaatgtcaggctattttaaaaacataactaagtagaataattgcgttttcttctaatgagagacattgtgcctcttagtgtttttgtctgacttaaatatgcaaaatagttgatttataaatatatgaggtatctgcaaatacaagaaatgagaggcttctctcaagggtatctcaagtaccatttagaatttcttgtgtcttaatttaaaatttaaatgcctttatataaatgttaaatgcctttataactaaatgtaccaactcaaacactttttggatataaaagaagtagaaacagtaagacactgaataaaataaataagataaactgccaacttagctaattaaagctattccaaaaatattgtacttaccaacatttaaagcttaaaaacattgggtactgaaagaagagaagtttagctaattggcagaggattgcactaatacaatcaagttttcaagtttatgacccttgctagtatattaccttcaatatctcagagatgttttgtattatttgttttgttttgcttttttcctagttgtctttatagctgtttcaccctaagccccttcaaactctcaatgaaagcaggttcttgggataaacttccagaatagagacaaggtataccctttgtgcctttgcattatcaactctttgttcacctgatgggaagttcttcgtttttcaaaatgtagcaagggagaaagcccaggacgcctttatatgctgttagtttccttacctgctgatagagattctgacacacagtcaaatcatacatgggctgtcagagctataaattagaaggctggcctctaggcttctcctctgtggcttatagccagttgtaatatacatgcattcctatactctagagatgaagtggtaagcatagctcatatgaacactgctctgaactcctctgacttagcattcaacttaagtcaagaaatacttattggctgggcgtggtggctcacgcctgtaatcccagcactctgggaggcagaggtgggtggatcacaaggtcaggagattgagaccatcctggctaacacggtgagaccccatctctactaaaaatacaaaaaattagccaggtgtggtggcgggcgcctgtagtcccagctacttgggaggctgaggcaggagaatgtggtgaacctgggaggtggagcttgcagtgagctgagatcgcaccactgcactccagcctgggtgacagagcgagactccatctc

SEQ ID NO: 14465 - DNA, 4590 bp, Homo sapiens
  source 1..4590: mol_type = unassigned DNA
taattgaagaaacactgagctgaactacaagtctatttcttatggtgctggattactcctacagaactgccctgagatcaaccgtgagagagggctctgacagacacaagtcaccttctggttattgcacttagctctccctggggacttaaattttggcagtgttcctctttacatgatatcctccaagatgatgagttctaatcctgaggaagaccctttggacacatttctccagtacattgaggatatggggatgaaggcctatgatggcttggttattcagaatgcgtcagatattgctcgagagaatgatcgcttgagaaatgaaactaacctagcctatttgaaagagaagaatgaaaaacgccgaagacaagaagaagcaataaagcgcataggtggagaagtagggcgaggccacgaaggaagttacgtgggcaaacatttccgcatgggattcatgacaatgcctgctcctcaggacagacttccccatccttgctccagtggcttttctgtgagatcacagtccctgcactcggttgggggcacagacgatgacagcagctgtggctcacggagacaaccaccacccaaacccaagagggaccccagcaccaagctgagcacctcatcagagacagtcagcagcactgcagccagtaagagcgggaaaacccctgagaggactgaagcgtcagctaaaccaagaccccacagcgatgaatattccaagaagattcctcctcccaaaccgaagcgaaatccgaacactcagctgagcacatctttcgatgaaacgtacatcaaaaagcatgggccccggaggacgtcgctgccgcgggactcctccttgtcccagatgggcagccccgcgggagaccccgaggaagaggagcccgtgtacatcgagatggtggggaacattctcagagacttcaggaaggaggacgatgaccagagcgaggccgtctacgaggaaatgaagtaccctatctttgacgacttgggccaagacgccaaatgtgacttcgaccatcacagctgttcttcgcagtgtgctactcccacggtgcctgacttggacttcgccaaggcctcagtgccatgcccccccaaggggctgctttgcgacatccctccgcccttccccaacctgctttctcacagacccccgctgctggtatttccccccgcccccgtgcattgctcccccaactccgacgagtccccgcttacccctctggaggtcacgaagcttcccgtgctggaaaacgtgtcttacatgaaacagccagccggggcgtcgccctccacgctgccgtcccacgtccccggccatgcgaaactggagaaagagcaggccgcggccctgggacctgcctctgccacccctgcgctctcctcgtcgcccccacccccgtctacgctgtaccgaacccagtctccccatggctaccctaaaagtcactccacctctccctcccccgtcagcatggggaggtccctgactcccctgagcctcaaaaggcctcccccttacgacgctgtgcattcgggcagcctctcaaggagctctccttcagtgcctcactcgacccccagacccgtgtcgcaagatggggccaagatggtcaacgccgcggtgaacacctacggggcagccccgggtggctcccggtcccggacacccacgagcccgctggaggagctgaccagcctcttctcctccggccgcagcctgctgcgcaagtcgtccagtggccggcgctccaaagagcctgcagagaaatcaacagaggaactgaaagtccgaagccacagcacggagccattaccaaagttggacaacaaggaaagaggccaccatggggcgtcttcctccagagagcctgtcaaagctcaggaatgggatggaacaccagggacacctgtggtcaccagtcgactaggaagatgctctgtgagccccaccttgttagcgggaaaccacagttcagagcctaaagtaagctgcaaattaggccggtctgcgtcgacgtcaggtgtgcctcctccatcagtcactcccctcaggcaaagcagtgacctgcaacagagccaggtaccatcatcgttagccaatcgtgattgacttcctgtgatacaacttgccaaatgcttcccacctctgtctgtcctgttgctgtagacaactttcgcatttgcttttatttttctatgtgtgtatgggttaggggatgcgggggatgagttctggcagtctgtgttttcatttgaaaaagaatatctttcttccttgtgattggtggtgaaactttctttgctgtttgttaccaaatcgtttttgtctctggtttccatcattctgtaatataaatgtagtaaacttgtactatatgtattggcttagtggttcttttttaaattctttctctctttcatgttttgtgtacttttatactgtctctgaaaatttatcaatatttgataaatttatctactttgttttatgtagatttctttttaaatgttttgtccagaacactcgcacagatgttgtcaatgaatttgtacatatttcttagctcttatcctattatactgtaatatttctggtggttttatttttatttagcttggagcatgactgtaagacactgttgaatattgatgtccttataaatattcatatcccgattcatttggattgagtatggcagctagtctttcttctttcttaggctattgactggcctaagacaatttgactggccagacaaattgactggccagataatctagatatttaacaaaaactgcagattaataaggcaacctttaaatgaatgacttttctctcttataccaacaatatcagaaatgttctcagaaagggaatgtaagtgttcatgcatggtaaatgagatctcaattatcacttggagaaaagagacaagaaataaaggcataaactgaaatatcatttaatcctttacagcataatatgttgctctgatgttcgtttgggtacgtggttgtggatggggaattagtatggggaaaaatcactacacataaatgtcctatctttagctcacccaataggaattcaatacattgacttaatttgtgaggcttaattgtcgttactgttaagtattataggtgttaagtagggtggtgtcattctggaatgttttctctctgcttcctagcttcaatctttgcattcatgaaactcttctgaaatagcaacttataaaacactgatgatacctccaagggaactgcccattactgatgagaaaattacatattcatctattattttaaatgtcaggctattttaaaaacataactaagtagaataattgcgttttcttctaatgagagacattgtgcctcttagtgtttttgtctgacttaaatatgcaaaatagttgatttataaatatatgaggtatctgcaaatacaagaaatgagaggcttctctcaagggtatctcaagtaccatttagaatttcttgtgtcttaatttaaaatttaaatgcctttatataaatgttaaatgcctttataactaaatgtaccaactcaaacactttttggatataaaagaagtagaaacagtaagacactgaataaaataaataagataaactgccaacttagctaattaaagctattccaaaaatattgtacttaccaacatttaaagcttaaaaacattgggtactgaaagaagagaagtttagctaattggcagaggattgcactaatacaatcaagttttcaagtttatgacccttgctagtatattaccttcaatatctcagagatgttttgtattatttgttttgttttgcttttttcctagttgtctttatagctgtttcaccctaagccccttcaaactctcaatgaaagcaggttcttgggataaacttccagaatagagacaaggtataccctttgtgcctttgcattatcaactctttgttcacctgatgggaagttcttcgtttttcaaaatgtagcaagggagaaagcccaggacgcctttatatgctgttagtttccttacctgctgatagagattctgacacacagtcaaatcatacatgggctgtcagagctataaattagaaggctggcctctaggcttctcctctgtggcttatagccagttgtaatatacatgcattcctatactctagagatgaagtggtaagcatagctcatatgaacactgctctgaactcctctgacttagcattcaacttaagtcaagaaatacttattggctgggcgtggtggctcacgcctgtaatcccagcactctgggaggcagaggtgggtggatcacaaggtcaggagattgagaccatcctggctaacacggtgagaccccatctctactaaaaatacaaaaaattagccaggtgtggtggcgggcgcctgtagtcccagctacttgggaggctgaggcaggagaatgtggtgaacctgggaggtggagcttgcagtgagctgagatcgcaccactgcactccagcctgggtgacagagcgagactccatctc

SEQ ID NO: 14466 - DNA, 2713 bp, Homo sapiens
  source 1..2713: mol_type = unassigned DNA
tggctgcctgacttgggagatggatgggctgagggagtggagggggacctcagaggagcaggaccagggagactcccaggacggtaagcaacatttgaggaccattcactaacgcttctctgcaggggtttcctctccatccatttccttgctgggttgtcagtgatgccatctgagttgctgtcagggctgtagcctgacaaagggtttcctaatagatccaaactgtccatttgtggggagcttctgattttctgttgttactggtttcccttagcccaacaccagggtcattaagaaggaaggaatgtgaggaagaaagaaaggcagggcattcaggaagaagtgtggaggcatgggagggttctcatggggccctcctgggcactgggtgacctgtcctttctcccctcaggtaggggtcccacggctgggtggtcctaagccactgggtggatgaaaggccgagggatgttggtcctgcttctgcatgcggtggtcctcggcctgcccagcgcctgggccgtgggggcctgcgcccgcgcttgtcccgccgcctgcgcctgcagcaccgtggagcgcggctgctcggtgcgctgcgaccgcgcgggcctcctgcgggtgccggccgagctcccgtgcgaggcggtctccatcgacctggaccggaacggcctgcgcttcctgggcgagcgagccttcggcacgctgccgtccttgcgccgcctgtcgctgcgccacaacaacctgtccttcatcacgcccggcgccttcaagggcctgccgcgcctggctgagctgcgcctggcgcacaacggcgacctgcgctacctgcacgcgcgcaccttcgcggcgctcagccgcctgcgccgcctagacctagcagcctgccgcctcttcagcgtgcccgagcgcctcctggccgaactgccggccctgcgcgaactcgccgccttcgacaacctgttccgccgcgtgccgggcgcgctgcgcggcctggccaacctgacgcacgcgcacctggagcgcggccgcatcgaggcggtggcctccagctcgctgcagggcctgcgccgcctgcgctcgctcagcctgcaggccaaccgcgtccgtgccgtgcacgctggcgccttcggggactgtggcgtcctggagcatctgctgctcaacgacaacctgctggccgagctcccggccgacgccttccgcggcctgcggcgcctgcgcacgctcaacctgggtggcaacgcgctggaccgcgtggcgcgcgcctggttcgctgacctggccgagctcgagctgctctacctggaccgcaacagcatcgccttcgtggaggagggcgccttccagaacctctcgggtctcctcgcgctgcacctcaacggcaaccgcctcaccgtgctcgcctgggtcgccttccagcccggcttcttcctgggccgcctcttcctcttccgcaacccgtggtgctgcgactgccgtctggagtggctgagggactggatggagggctccggacgtgtcaccgacgtgccgtgcgcctccccgggctccgtggccggcctggacctcagccaggtgaccttcgggcgctcctccgatggcctctgtgtggaccccgaggagctgaacctcaccacgtccagtccaggcccgtccccagaaccagcggccaccaccgtgagcaggttcagcagcctcctctccaagctgctggccccgagggtcccggtggaggaggcggccaacaccactggggggctggccaacgcctccctgtccgacagcctctcctcccgtggggtgggaggcgcgggccggcagccctggtttctcctcgcctcttgtctcctgcccagcgtggcccagcacgtggtgtttggcctgcagatggactgacctggccagaggggggaaagtttgcttaactgggcttgagtgtgtttgtggtaaggggagaggagccggaatggagggcagaggtgaaaatcccagtggagggtggaaggaaccgtttgcctccagagatggccccagggagaacacagggacgtgccactcgagggggaggatggtatggatttctgcttttgtcacacgggcatccattggaaaagagaagcaagaatgaacgtgggccctcgggtgggaagactaggaatcggaagcttctagggcttcacatcccttcccctcccctccccttcccctcatcttccaggcaacagtgcctgcaaggcctgaattagagagacttccattggctaagtagttaagagccgtcccatttctcctggcggggtaacccattacaccgaagtcctttgttttctaccacaatcctcctcctcctctccaggggcctggaaacactaggattcaggaaggtaggcaggacgtgagagaagggagatgggagagagatttaagacaaagggtggcggtggttcctggggtctgagatgtgttaggaggcgtttaaaacaaagatccagttcatttactccacagttattcccagggctggccctagccacaaaggaactttagggcagggtagggaaaaaaggggcagcagggggtgtgtttgtggacaaataaatttgtaaagtccgaggattaaaaaaaaaaaaaggttaaaccggtttctctactgctggacttttcagagtctttcatatgctaacattcattgtgaatctcccaagag

SEQ ID NO: 14467 - DNA, 2297 bp, Homo sapiens
  source 1..2297: mol_type = unassigned DNA
ggctgagggagtggagggggacctcagaggagcaggaccagggagactcccaggacggtaggggtcccacggctgggtggtcctaagccactgggtggatgaaaggccgagggatgttggtcctgcttctgcatgcggtggtcctcggcctgcccagcgcctgggccgtgggggcctgcgcccgcgcttgtcccgccgcctgcgcctgcagcaccgtggagcgcggctgctcggtgcgctgcgaccgcgcgggcctcctgcgggtgccggccgagctcccgtgcgaggcggtctccatcgacctggaccggaacggcctgcgcttcctgggcgagcgagccttcggcacgctgccgtccttgcgccgcctgtcgctgcgccacaacaacctgtccttcatcacgcccggcgccttcaagggcctgccgcgcctggctgagctgcgcctggcgcacaacggcgacctgcgctacctgcacgcgcgcaccttcgcggcgctcagccgcctgcgccgcctagacctagcagcctgccgcctcttcagcgtgcccgagcgcctcctggccgaactgccggccctgcgcgaactcgccgccttcgacaacctgttccgccgcgtgccgggcgcgctgcgcggcctggccaacctgacgcacgcgcacctggagcgcggccgcatcgaggcggtggcctccagctcgctgcagggcctgcgccgcctgcgctcgctcagcctgcaggccaaccgcgtccgtgccgtgcacgctggcgccttcggggactgtggcgtcctggagcatctgctgctcaacgacaacctgctggccgagctcccggccgacgccttccgcggcctgcggcgcctgcgcacgctcaacctgggtggcaacgcgctggaccgcgtggcgcgcgcctggttcgctgacctggccgagctcgagctgctctacctggaccgcaacagcatcgccttcgtggaggagggcgccttccagaacctctcgggtctcctcgcgctgcacctcaacggcaaccgcctcaccgtgctcgcctgggtcgccttccagcccggcttcttcctgggccgcctcttcctcttccgcaacccgtggtgctgcgactgccgtctggagtggctgagggactggatggagggctccggacgtgtcaccgacgtgccgtgcgcctccccgggctccgtggccggcctggacctcagccaggtgaccttcgggcgctcctccgatggcctctgtgtggaccccgaggagctgaacctcaccacgtccagtccaggcccgtccccagaaccagcggccaccaccgtgagcaggttcagcagcctcctctccaagctgctggccccgagggtcccggtggaggaggcggccaacaccactggggggctggccaacgcctccctgtccgacagcctctcctcccgtggggtgggaggcgcgggccggcagccctggtttctcctcgcctcttgtctcctgcccagcgtggcccagcacgtggtgtttggcctgcagatggactgacctggccagaggggggaaagtttgcttaactgggcttgagtgtgtttgtggtaaggggagaggagccggaatggagggcagaggtgaaaatcccagtggagggtggaaggaaccgtttgcctccagagatggccccagggagaacacagggacgtgccactcgagggggaggatggtatggatttctgcttttgtcacacgggcatccattggaaaagagaagcaagaatgaacgtgggccctcgggtgggaagactaggaatcggaagcttctagggcttcacatcccttcccctcccctccccttcccctcatcttccaggcaacagtgcctgcaaggcctgaattagagagacttccattggctaagtagttaagagccgtcccatttctcctggcggggtaacccattacaccgaagtcctttgttttctaccacaatcctcctcctcctctccaggggcctggaaacactaggattcaggaaggtaggcaggacgtgagagaagggagatgggagagagatttaagacaaagggtggcggtggttcctggggtctgagatgtgttaggaggcgtttaaaacaaagatccagttcatttactccacagttattcccagggctggccctagccacaaaggaactttagggcagggtagggaaaaaaggggcagcagggggtgtgtttgtggacaaataaatttgtaaagtccgaggattaaaaaaaaaaaaaggttaaaccggtttctct

SEQ ID NO: 14468 - DNA, 494 bp, Homo sapiens
  source 1..494: mol_type = unassigned DNA
cagagttcctggctcgggaacattgggaggcctgggatacagtggcttagcctcaagcaaaaaggtgaacaatatctttatggcttgaaggtatacgaaataatgtcactacatcggagcagcgcctctgcttgcacacctatgggagtctgtagctgtgacacatagaagttggccacatccatgtcggtggctccaaagtgggtggccacacgcacaccctcgtgcaatgtgaagctcacctgatgactcaccatggccagcaggccgcggagcggtggtcctcggcctgcccagcgcctgggccgtgggggcctgcgcccgcgcttgtcccgccgcctgcgcctgcagcaccgtggagcgcggctgctcggtgcgctgcgaccgcgcgggcctcctgcgggtgccggccgagctcccgtgcgaggcggtctccatcgacctggaccggaacggcctgcgcttcctgggcgagcgagccttcggcacgctgc

SEQ ID NO: 14469 - DNA, 2048 bp, Homo sapiens
  source 1..2048: mol_type = unassigned DNA
ctccggcgtcactgttgcgcttcatagacgccgcgtgtacccggttgtcctcaggcgctgtcagatctgtggtttttctacttgaaggacacaatgttttccaaactagcacatttgcagaggtttgctgtacttagtcgcggagttcattcttcagtggcttctgctacatctgttgcaactaaaaaaacagtccaaggccctccaacctctgatgacatttttgaaagggaatataagtatggtgcacacaactaccatcctttacctgtagccctggagagaggaaaaggtatttacttatgggatgtagaaggcagaaaatattttgacttcctgagttcttacagtgctgtcaaccaagggcattgtcaccccaagattgtgaatgctctgaagagtcaagtggacaaattgaccttaacatctagagctttctataataacgtacttggtgaatatgaggagtatattactaaacttttcaactaccacaaagttcttcctatgaatacaggagtggaggctggagagactgcctgtaaactagctcgtaagtggggctataccgtgaagggcattcagaaatacaaagcaaagattgtttttgcagctgggaacttctggggtaggacgttgtctgctatctccagttccacagacccaaccagttacgatggttttggaccatttatgccgggattcgacatcattccctataatgatctgcccgcactggagcgtgctcttcaggatccaaatgtggctgcgttcatggtagaaccaattcagggtgaagcaggcgttgttgttccggatccaggttacctaatgggagtgcgagagctctgcaccaggcaccaggttctctttattgctgatgaaatacagacaggattggccagaactggtagatggctggctgttgattatgaaaatgtcagacctgatatagtcctccttggaaaggccctttctgggggcttataccctgtgtctgcagtgctgtgtgatgatgacatcatgctgaccattaagccaggggagcatgggtccacatacggtggcaatccactaggctgccgagtggccatcgcagcccttgaggttttagaagaagaaaaccttgctgaaaatgcagacaaattgggcattatcttgagaaatgaactcatgaagctaccttctgatgttgtaactgccgtaagaggaaaaggattattaaacgctattgtcattaaagaaaccaaagattgggatgcttggaaggtgtgtctacgacttcgagataatggacttctggccaagccaacccatggcgacattatcaggtttgcgcctccgctggtgatcaaggaggatgagcttcgagagtccattgaaattattaacaagaccatcttgtctttctgagggtagccagctgttttcagtggtccctgggagccagctggagacaggtggtcctgtaaaagctttattcctaatgtgggcacattccactcccatgagtcttcaaaaactttttttttgaatatatttttttcagttgatacataatagaacaacgtttatgaacctgccgtttgctttgtaacgtaactaaataatgtaatggcatctatattcagttgaagtgttttgatgtgcatgtgtacttcctaaggtgaaatgcatctatatacagacagcctctaaatcaagtccttcagtataattgatatatgtttttataatttcctcactggtataagtgtttcatatttgaaaaagttatctctgggtattgcataaaaggcttcatcttataaagtgaaatcattgttattgaattttaggaaggattaatggttaagtgtatataaaatactaatattaagtaaacttcatattggccaacaccagggttgtattctatggatgtcattattttgaattaagaattagtgtttaacattcctaaattgttttgagtgcttgattataatttgtaaaaaatgtttattttcaatacttctttaaatttaaaataaagcttatatttcaaa

SEQ ID NO: 14470 - DNA, 751 bp, Homo sapiens
  source 1..751: mol_type = unassigned DNA
tacaaaaccctcacctttgcatcagcaccttttcactatgtagagcagggcagaatgggcctctagggagatagtggcctgacaaaggaaatagttggtgagtctacaagattcttataggatactcttgaaattgtgtgcagttaaaacatttttacaaatttgagggcacatcagaattacacatttattgttggtggggggacagtgaaataaggatggctattttccctgtggaaacgaaagtgatcactaataggggtattttttttccccaataggttctctttattgctgatgaaatacagacaggattggccagaactggtagatggctggctgttgattatgaaaatgtcagacctgatatagtcctccttggaaaggccctttctgggggcttataccctgtgtctgcagtgctgtgtgatgatgacatcatgctgaccattaagccaggggagcatgggtccacatacggtggcaatccactaggctgccgagtggccatcgcagcccttgaggttttagaagaagaaaaccttgctgaaaatgcagacaaattgggcattatcttgagaaatgaactcatgaagctaccttctgatgttgtaactgccgtaagaggaaaaggattattaaacgctattgtcattaaagaaaccaaagattgggatgcttggaaggtgtgtctacgacttcgagataatggacttctggccaagccaacccatggcgacattatcaggtt

SEQ ID NO: 14471 - DNA, 810 bp, Homo sapiens
  source 1..810: mol_type = unassigned DNA
agtatattactaaacttttcaactaccacaaagttcttcctatgaatacaggagtggaggctggagagactgcctgtaaactagctcgtaagtggggctataccgtgaagggcattcagaaatacaaagcaaagattgtttttgcaggacaacataactgtctcttgcaaacaaaaatggtgtttctggtgattttcattcttatagactgtgtccagtctctttcttaatagcaaagggtgcaaagatgttttcacctgagtattgaaagaagctggtgagtcagtggggtggagagacagaggaagactgtccctaactctgggaacttctggggtaggacgttgtctgctatctccagttccacagacccaaccagttacgatggttttggaccatttatgccgggattcgacatcattccctataatgatctgcccgcactggagcgtgctcttcaggatccaaatgtggctgcgttcatggtagaaccaattcagggtgaagcaggcgttgttgttccggatccaggttacctaatgggagtgcgagagctctgcaccaggcaccaggttctctttattgctgatgaaatacagacaggattggccagaactggtagatggctggctgttgattatgaaaatgtcagacctgatatagtcctccttggaaaggccctttctgggggcttataccctgtgtctgcagtgctgtgtgatgatgacatcatgctgaccattaagccaggggagcatgggtccacatacggtggcaatccactaggctgccgagtggccatcgcagccc

SEQ ID NO: 14472 - DNA, 570 bp, Homo sapiens
  source 1..570: mol_type = unassigned DNA
taaatgcaccttctctagaaaacatgcattcaagacctcaattgttagggcttggttttgggttggggattattgaaagaaaagtaagttatctatcttcaggggctatatattccagtcaagaggctcagtagagagaaatgcctaaaataggaattacaaggccagacttagtggccttgtgtcataggagccatggtgtttaatatcagactttgttttaacaattgaaagcccaccgaaggtgcactaaagcaagcccttgatttattttttgagtcaaacttcttgtggtgttttgcggggatagtgcttattgaattttgggtttctttgaaataatcactgtttgtttcccctttgtagctgggaacttctggggtaggacgttgtctgctatctccagttccacagacccaaccagttacgatggttttggaccatttatgccgggattcgacatcattccctataatgatctgcccgcactggagcgtgctcttcaggatccaaatgtggctgcgttcatggtagaaccaattcagggtgaagcaggcgttgttgttccgg

SEQ ID NO: 14473 - DNA, 646 bp, Homo sapiens
  source 1..646: mol_type = unassigned DNA
ttacggaagcagaaccttccttacagtaacgtgcagatctgtggtttttctacttgaaggacacaatgttttccaaactagcacatttgcagaggtttgctgtacttagtcgcggagttcattcttcagtggcttctgctacatctgttgcaactaaaaaaacagtccaaggccctccaacctctgatgacatttttgaaagggaatataagtatggtgcacacaactaccatcctttacctgtagccctggagagaggaaaaggtatttacttatgggatgtagaaggcagaaaatattttgacttcctgagttcttacagtgctgtcaaccaagggcattgtcaccccaagattgtgaatgctctgaagagtcaagtggacaaattgaccttaacatctagagctttctataataacgtacttggtgaatatgaggagtatattactaaacttttcaactaccacaaagttcttcctatgaatacaggagtggaggctggagagactgcctgtaaactagctcgtaagtggggctataccgtgaagggcattcagaaatacaaagcaaagattgtttttgcagactgtgtccagtctctttcttaatagcaaagggtgcaaagatgttttcacctgagtattga

SEQ ID NO: 14474 - DNA, 579 bp, Homo sapiens
  source 1..579: mol_type = unassigned DNA
cgctttgtagcccaggctggagtgctggtggcacagatcgtggctcactgcagcccagaactcagggctcaagagatctttccaccttagtcttagtctcctaagtaccagatactacaggagattttggactctctgcagactgtccctggatcttgggttaaaaatctgtattctagactgaaccgtgggaagaaaaaatagtcaatctgtggtttttctacttgaaggacacaatgttttccaaactagcacatttgcagaggtttgctgtacttagtcgcggagttcattcttcagtggcttctgctacatctgttgcaactaaaaaaacagtccaaggccctccaacctctgatgacatttttgaaagggaatataagtatggtgcacacaactaccatcctttacctgtagccctggagagaggaaaaggtatttacttatgggatgtagaaggcagaaaatattttgacttcctgagttcttacagtgctgtcaaccaagggcattgtcaccccaagattgtgaatgctctgaagagtcaagtggacaaattgaccttaacatctagagctt

SEQ ID NO: 14475 - DNA, 620 bp, Homo sapiens
  source 1..620: mol_type = unassigned DNA
tcaggagattttggactctctgcagactgtccctggatcttgggttaaaaatctgtattctagactgaaccgtgggaagaaaaaatagtcagtgagtctttggcaaaccggagtactggattttgtttagcaattgcaaattcctgaacatactggatttactgggtagtgccaagtttaaagggaagtaagccaaactccaagtattatgttttgctaatttggcagctcgaatcaagagtggctgtgagattatacatggtttgacttgtcattggtagacttctgttgaaacatgaattaactagtcttttagaaaatctgtggtttttctacttgaaggacacaatgttttccaaactagcacatttgcagaggtttgctgtacttagtcgcggagttcattcttcagtggcttctgctacatctgttgcaactaaaaaaacagtccaaggccctccaacctctgatgacatttttgaaagggaatataagtatggtgcacacaactaccatcctttacctgtagccctggagagaggaaaaggtatttacttatgggatgtagaaggcagaaaatattttgacttcctgagttcttacagtgctgtcaaccaagg

SEQ ID NO: 14476 - DNA, 1864 bp, Homo sapiens
  source 1..1864: mol_type = unassigned DNA
ttgggggcggggcagaatcagcctttaagttgcagtgactctccggcgtcactgttgcgcttcatagacgccgcgtgtacccggttgtcctcaggcgctgtcaggtatttacttatgggatgtagaaggcagaaaatattttgacttcctgagttcttacagtgctgtcaaccaagggcattgtcaccccaagattgtgaatgctctgaagagtcaagtggacaaattgaccttaacatctagagctttctataataacgtacttggtgaatatgaggagtatattactaaacttttcaactaccacaaagttcttcctatgaatacaggagtggaggctggagagactgcctgtaaactagctcgtaagtggggctataccgtgaagggcattcagaaatacaaagcaaagattgtttttgcagctgggaacttctggggtaggacgttgtctgctatctccagttccacagacccaaccagttacgatggttttggaccatttatgccgggattcgacatcattccctataatgatctgcccgcactggagcgtgctcttcaggatccaaatgtggctgcgttcatggtagaaccaattcagggtgaagcaggcgttgttgttccggatccaggttacctaatgggagtgcgagagctctgcaccaggcaccaggttctctttattgctgatgaaatacagacaggattggccagaactggtagatggctggctgttgattatgaaaatgtcagacctgatatagtcctccttggaaaggccctttctgggggcttataccctgtgtctgcagtgctgtgtgatgatgacatcatgctgaccattaagccaggggagcatgggtccacatacggtggcaatccactaggctgccgagtggccatcgcagcccttgaggttttagaagaagaaaaccttgctgaaaatgcagacaaattgggcattatcttgagaaatgaactcatgaagctaccttctgatgttgtaactgccgtaagaggaaaaggattattaaacgctattgtcattaaagaaaccaaagattgggatgcttggaaggtgtgtctacgacttcgagataatggacttctggccaagccaacccatggcgacattatcaggtttgcgcctccgctggtgatcaaggaggatgagcttcgagagtccattgaaattattaacaagaccatcttgtctttctgagggtagccagctgttttcagtggtccctgggagccagctggagacaggtggtcctgtaaaagctttattcctaatgtgggcacattccactcccatgagtcttcaaaaactttttttttgaatatatttttttcagttgatacataatagaacaacgtttatgaacctgccgtttgctttgtaacgtaactaaataatgtaatggcatctatattcagttgaagtgttttgatgtgcatgtgtacttcctaaggtgaaatgcatctatatacagacagcctctaaatcaagtccttcagtataattgatatatgtttttataatttcctcactggtataagtgtttcatatttgaaaaagttatctctgggtattgcataaaaggcttcatcttataaagtgaaatcattgttattgaattttaggaaggattaatggttaagtgtatataaaatactaatattaagtaaacttcatattggccaacaccagggttgtattctatggatgtcattattttgaattaagaattagtgtttaacattcctaaattgttttgagtgcttgattataatttgtaaaaaatgtttattttcaatacttctttaaatttaaaataaagcttatatttcaaatgtc

SEQ ID NO: 14477 - DNA, 3704 bp, Homo sapiens
  source 1..3704: mol_type = unassigned DNA
acggcgcgcgcgcaccccttccgcgcagccccctgacctgcagcctccggacctcgctgcagcgcggacccggcccgcccgcccgaatgagtcagctgaggctgctgccgtcccgtcttggggtacaggctgcgaggctcctggctgcacatgacgtcccggtgtttggctggcgcagcaggtcctccgggccaccggccaccttcccaagcagcaaaggtggaggcggctccagttacatggaggagatgtacttcgcctggttggaaaacccccagagtgtccacaagtcctgggacagcttcttcagggaagccagcgaggaagccttttctggctctgctcagccacggcccccttctgttgtccatgagagcaggtctgcagtctcaagtcggaccaagaccagcaaattggtggaggaccacctggctgtgcagtccctgatccgggcctaccagatccggggtcaccatgtggcccagctggaccccctgggcattctggatgcagacctggactcctttgtgccctcagacttgatcacaaccattgataaactggccttctatgaccttcaggaggctgaccttgataaggagttccagctgccgacaaccaccttcattgggggctctgaaaacaccctctctctgcgggagatcattcggcgcctggagaacacctactgccagcacattggcctggagttcatgttcatcaacgatgtggagcagtgccagtggatccggcagaagtttgagacccctggtgtgatgcagttctccagcgaggagaagcggaccctgctggcccggctagtgcgctccatgaggtttgaagacttcctggcccggaaatggtcctcagagaagcggtttggcctggagggctgtgaagtgatgattcctgccctcaagaccatcatcgacaaatccagcgagatggggattgagaatgtcatcttggggatgccacacaggggaaggctgaacgtgctggccaacgtgatccgcaaggacctggagcagatcttctgccagtttgaccccaagctggaggcggcggacgagggctccggggatgtcaagtaccacctgggcatgtaccatgagaggatcaaccgcgtcaccaaccggaacatcactctgtcgctggttgccaacccctcccacctggaggcagtggaccctgtggtgcaggggaagacaaaggcagagcagttctaccgtggagatgcccagggcaagaaggtcatgtccatcctggttcatggggacgccgcctttgctggccagggcgtggtatatgagaccttccacctgagcgacctgccctcctacacgaccaatggtaccgtgcacgtcgtcgtcaacaaccagattggattcaccacagacccccgaatggcccgctcctcaccatacccgaccgacgtggcccgggtggtcaatgcgcctatcttccatgtgaatgccgatgacccagaggctgtgatatatgtgtgcagtgtggcagccgaatggagaaacactttcaacaaagatgttgtcgtggacctggtctgttaccgccggcgtggccacaatgagatggacgagcccatgttcacccagccgctcatgtacaagcagatccacagacaggtgcctgtgctgaagaagtacgcagacaagctgattgccgagggcacagtcaccctgcaggagtttgaggaagaaattgccaaatacgaccggatctgtgaggaggcttatggcaggtccaaggataaaaagattctgcatataaagcactggttggactccccctggcctggcttcttcaacgtagatggggagcccaagagcatgacatgcccagccacggggatccctgaggacatgctcacccacatcggcagtgtggccagctctgtgcccctggaggactttaagatccacactggcctctctcgcattctgcggggccgtgcggacatgaccaagaaccggacggtggactgggcgttggcagagtacatggcctttggctccctgctgaaggaaggcatccacgtgcggctcagcgggcaggatgtggagaggggcacattcagtcaccggcaccatgttctccatgaccaggaggttgaccgcaggacgtgtgtgcctatgaatcatctctggcctgaccaggccccgtacaccgtgtgcaacagctccctctcggagtacggagtcctgggctttgagctgggctatgccatggccagccccaatgccctggtcctctgggaggcccagtttggggacttccacaacacggcccagtgcatcatcgaccagttcatcagcaccggccaggccaagtgggtgcggcataatggcattgtgctgctgctgccccatggcatggaaggcatgggcccagagcactcgtcagcgaggcccgaaaggttcctgcagatgagcaatgatgactcggatgcctaccctgcattcaccaaggacttcgaggtgagccagctctatgactgcaactggatcgtggtcaactgctccacaccggccaactacttccacgtgctgcgccggcagatcctgctgcccttccgcaagccgctgattatcttcacacctaaatctctgctgaggcacccagaggccaagtccagctttgaccaaatggtatccgggaccagcttccagcgggtgattcctgaagatggggccgcagcacgggcccctgagcaggtgcagcggctcatcttctgcacgggaaaggtgtactatgacctggtgaaggagcggagcagccaggacctggaggagaaagtggccatcacgcgcctggagcagatctctccattccccttcgacctgatcaagcaggaggcagagaagtacccaggtgcggagctggcctggtgtcaggaggagcacaagaacatgggctactatgactacatcagcccacgcttcatgaccatcctgaggcgcgcacggcccatatggtatgttggccgggacccagcggctgcaccagccacaggaaacaggaacactcacctggtgtcactgaagaagtttctggatactgccttcaatctccaggcctttgagggcaagacattttagagctgggcaaaacctgtgtaggtctcgctgtgggtttgctggggaccaagggggtgatgaaaaggggaggggcggagctcctgcccaggagaggggctgtggggccccaggataaaacagacacagtgacagggccaagagccagcactgctggccttggtgtcatgccagaatctaccaggactgagggagccagaggagtcctataggcaggctactgtgctggagcatcccccagctgctcccatcttgctggaatttcttgggcggcttctccacctgtatctcaagacagacacccgggggcctgtgtctgtggccgctcccatcccggcagccctggctgctgctcgccccaccctcgcttatctgtagattcaaagcgatgttctcttctgtgctcttagaagtagggagttcagcagtaacagccaggtgaagcgaacctgctgggtgatttgtttgcgctctgttttatggggcattcctgcgagatgtgtcagcttctgtgtgaaatgcagccacagctcatgtgtaccaaagtagaaaaccaaatcacagagaaataaaaacatgcttcagaga

SEQ ID NO: 14478 - DNA, 2651 bp, Homo sapiens
  source 1..2651: mol_type = unassigned DNA
gctgctgagacgatgatgctacccctggcagcagaaggcgctaccacgtatgagtgcttgctgtgcgccaggcactgttcaatgcttctgaatgttaactcttccaatccatacaacttaatgaagtaggctgtgttcctgcttttcagatgaggaaacagaggcacagagctggggagtaggttgcccaaggtttcacagctagtagctggggtttgaagctatcctgtgcagtactgcctgttctctggtcccctcctgtatgacctgcctctgcagccacacatggggcagagggaagacatgcaggctgggtgcatcctccggaggctcctgggctagcaggaagggaggaaggagcagggtgtcatgtgataccatctggtgggcaggtggcctgaccaggcagaagggagacaggcagggggctcattgccaccattatccctgagtggcatgttatgagcactttacaggctgcatactcggcatcctcacaacaccgggtatcagtgaggagggaggtgaggctccctgcttggggctgcctgccgtgaaggcagcttcttgggaggccagatctgggccaggctgggtgtggggggctgggtccttggccgtccccaccaagagagggcaagtggcagctgtgcagtgggtcatccccgtcctgcaggagctggcttggagatgcccctgggcttgtcttgctgctttcatggagcagagcggtccgtgtgggtgagggtgggcgaggcccaggccgagttgggttggcccctgcctggctgtgtggtcatgggtggtttcttaccctctccttgcctcttcatctgtgcagtggggaagagtgtctgcatcatggggctactttgggggttagcgataaggcgtgtgggattcctagaactctgcctcctgtacagcaggtgctcagtcagtggcagccactgttccaggacattccagagaaagcacgtctcagtgcgggctttttgctttttcttctgtccctgcaagttcacatactgtgctagctctgggcagaccccactctgaggattcccattctgctcttgttccacattcttggttcttttctatggttcaggctccagggtgagggcacctctgctgagaagccctccagactttcccctgagcctggggtccctgcagggccagatgtctttcccatggtggggtccagccttggctgtctggcgtttgctttcagggcccagagcactcgtcagcgaggcccgaaaggttcctgcagatgagcaatgatgactcggatgcctaccctgtgagtgttgctgctgtccccaggacagggacgcgccctattgtgcccacagggctaggggtccagggtgtgggtgcagcagacagccaccctggccatatgcatctcgtccccacaggcattcaccaaggacttcgaggtgagccagctctatgactgcaactggatcgtggtcaactgctccacaccggccaactacttccacgtgctgcgccggcagatcctgctgcccttccgcaagccgctgattatcttcacacctaaatctctgctgaggcacccagaggccaagtccagctttgaccaaatggtatccgggaccagcttccagcgggtgattcctgaagatggggccgcagcacgggcccctgagcaggtgcagcggctcatcttctgcacgggaaaggtgtactatgacctggtgaaggagcggagcagccaggacctggaggagaaagtggccatcacgcgcctggagcagatctctccattccccttcgacctgatcaagcaggaggcagagaagtacccaggtgcggagctggcctggtgtcaggaggagcacaagaacatgggctactatgactacatcagcccacgcttcatgaccatcctgaggcgcgcacggcccatatggtatgttggccgggacccagcggctgcaccagccacaggaaacaggaacactcacctggtgtcactgaagaagtttctggatactgccttcaatctccaggcctttgagggcaagacattttagagctgggcaaaacctgtgtaggtctcgctgtgggtttgctggggaccaagggggtgatgaaaaggggaggggcggagctcctgcccaggagaggggctgtggggccccaggataaaacagacacagtgacagggccaagagccagcactgctggccttggtgtcatgccagaatctaccaggactgagggagccagaggagtcctataggcaggctactgtgctggagcatcccccagctgctcccatcttgctggaatttcttgggcggcttctccacctgtatctcaagacagacacccgggggcctgtgtctgtggccgctcccatcccggcagccctggctgctgctcgccccaccctcgcttatctgtagattcaaagcgatgttctcttctgtgctcttagaagtagggagttcagcagtaacagccaggtgaagcgaacctgctgggtgatttgtttgcgctctgttttatggggcattcctgcgagatgtgtcagcttctgtgtgaaatgcagccacagctcatgtgtaccaaagtagaaaaccaaatcacagagaaataaaaacatgcttcag

SEQ ID NO: 14479 - DNA, 669 bp, Homo sapiens
  source 1..669: mol_type = unassigned DNA
tgcaggagtttgaggaagaaattgccaaatacgaccggatctgtgaggaggcttatggcaggtccaaggataaaaagattctgcatataaagcactggttggactccccctggcctggcttcttcaacgtagatggggagcccaagagcatgacatgcccagccacggggatccctgaggacatgctcacccacatcggcagtgtggccagctctgtgcccctggaggactttaagatccacactggtgaggttgctggacaggctgcagcccaggctgctggccccaccccaacactgtgcctcgaagggagattggttgggatgcaagagagatggtgtgtcgcattcctgctcagtctgtagtgggtccacgtagctctcggcaccatgtctgtgcccgtgacagtagctcttttcagggtgggcgtggcgagctgggcagctccagatgccacactcccagctgggtaccagtgactagtcttaggttggggaccttggattttccaaatgcctttgccggggcgtccctgggtcaggcagaagagcaggaaagcaagggctcccatacaggggctggaacgcagcctggaacgtgggcagaattctgcagctgaaaggacggtggcttgccggggcctggaccaatgaccgagggcagcccccc

SEQ ID NO: 14480 - DNA, 545 bp, Homo sapiens
  source 1..545: mol_type = unassigned DNA
tgctgccgtcccgtcttggggtacaggctgcgaggctcctggctgcacatgacgtcccggtgtttggctggcgcagcaggtcctccgggccaccggccaccttcccaagcagcaaaggtggaggcggctccagttacatggaggagatgtacttcgcctggttggaaaacccccagagtgtccacaagtcctgggacagcttcttcagggaagccagcgaggaagccttttctggctctgctcagccacggcccccttctgttgtccatgagagcaggtctgcagtctcaagtcggaccaagaccagcaaattggtggaggaccacctggctgtgcagtccctgatccgggcctaccaggtgaggggcagctgaggcacagcctgggaggctgcactggctcctggggtgtggccaggcactgaagggaaggggtctcagctccaacatcatctccccagagagcccttctccttgtcctctactgagcggcacctactcctctagccagtctttgccacatcaccattcagagcacttaccacc

SEQ ID NO: 14481 - DNA, 3588 bp, Homo sapiens
  source 1..3588: mol_type = unassigned DNA
gagtctcaggggcgcgcgcccgtgggcggctgcgtcacgtgacccaggtaattggcacggcgcgcgcgcaccccttccgcgcagccccctgacctgcagcctccggacctcgctgcagcgcggacccggcccgcccgcccgaatgagtcagctgaggctgctgccgtcccgtcttggggtacaggctgcgaggctcctggctgcacatgacgtcccggtgtttggctggcgcagcaggtcctccgggccaccggccaccttcccaagcagcaaaggtggaggcggctccagttacatggaggagatgtacttcgcctggttggaaaacccccagagtgtccacaagatccggggtcaccatgtggcccagctggaccccctgggcattctggatgcagacctggactcctttgtgccctcagacttgatcacaaccattgataaactggccttctatgaccttcaggaggctgaccttgataaggagttccagctgccgacaaccaccttcattgggggctctgaaaacaccctctctctgcgggagatcattcggcgcctggagaacacctactgccagcacattggcctggagttcatgttcatcaacgatgtggagcagtgccagtggatccggcagaagtttgagacccctggtgtgatgcagttctccagcgaggagaagcggaccctgctggcccggctagtgcgctccatgaggtttgaagacttcctggcccggaaatggtcctcagagaagcggtttggcctggagggctgtgaagtgatgattcctgccctcaagaccatcatcgacaaatccagcgagatggggattgagaatgtcatcttggggatgccacacaggggaaggctgaacgtgctggccaacgtgatccgcaaggacctggagcagatcttctgccagtttgaccccaagctggaggcggcggacgagggctccggggatgtcaagtaccacctgggcatgtaccatgagaggatcaaccgcgtcaccaaccggaacatcactctgtcgctggttgccaacccctcccacctggaggcagtggaccctgtggtgcaggggaagacaaaggcagagcagttctaccgtggagatgcccagggcaagaaggtcatgtccatcctggttcatggggacgccgcctttgctggccagggcgtggtatatgagaccttccacctgagcgacctgccctcctacacgaccaatggtaccgtgcacgtcgtcgtcaacaaccagattggattcaccacagacccccgaatggcccgctcctcaccatacccgaccgacgtggcccgggtggtcaatgcgcctatcttccatgtgaatgccgatgacccagaggctgtgatatatgtgtgcagtgtggcagccgaatggagaaacactttcaacaaagatgttgtcgtggacctggtctgttaccgccggcgtggccacaatgagatggacgagcccatgttcacccagccgctcatgtacaagcagatccacagacaggtgcctgtgctgaagaagtacgcagacaagctgattgccgagggcacagtcaccctgcaggagtttgaggaagaaattgccaaatacgaccggatctgtgaggaggcttatggcaggtccaaggataaaaagattctgcatataaagcactggttggactccccctggcctggcttcttcaacgtagatggggagcccaagagcatgacatgcccagccacggggatccctgaggacatgctcacccacatcggcagtgtggccagctctgtgcccctggaggactttaagatccacactggcctctctcgcattctgcggggccgtgcggacatgaccaagaaccggacggtggactgggcgttggcagagtacatggcctttggctccctgctgaaggaaggcatccacgtgcggctcagcgggcaggatgtggagaggggcacattcagtcaccggcaccatgttctccatgaccaggaggttgaccgcaggacgtgtgtgcctatgaatcatctctggcctgaccaggccccgtacaccgtgtgcaacagctccctctcggagtacggagtcctgggctttgagctgggctatgccatggccagccccaatgccctggtcctctgggaggcccagtttggggacttccacaacacggcccagtgcatcatcgaccagttcatcagcaccggccaggccaagtgggtgcggcataatggcattgtgctgctgctgccccatggcatggaaggcatgggcccagagcactcgtcagcgaggcccgaaaggttcctgcagatgagcaatgatgactcggatgcctaccctgcattcaccaaggacttcgaggtgagccagctctatgactgcaactggatcgtggtcaactgctccacaccggccaactacttccacgtgctgcgccggcagatcctgctgcccttccgcaagccgctgattatcttcacacctaaatctctgctgaggcacccagaggccaagtccagctttgaccaaatggtatccgggaccagcttccagcgggtgattcctgaagatggggccgcagcacgggcccctgagcaggtgcagcggctcatcttctgcacgggaaaggtgtactatgacctggtgaaggagcggagcagccaggacctggaggagaaagtggccatcacgcgcctggagcagatctctccattccccttcgacctgatcaagcaggaggcagagaagtacccaggtgcggagctggcctggtgtcaggaggagcacaagaacatgggctactatgactacatcagcccacgcttcatgaccatcctgaggcgcgcacggcccatatggtatgttggccgggacccagcggctgcaccagccacaggaaacaggaacactcacctggtgtcactgaagaagtttctggatactgccttcaatctccaggcctttgagggcaagacattttagagctgggcaaaacctgtgtaggtctcgctgtgggtttgctggggaccaagggggtgatgaaaaggggaggggcggagctcctgcccaggagaggggctgtggggccccaggataaaacagacacagtgacagggccaagagccagcactgctggccttggtgtcatgccagaatctaccaggactgagggagccagaggagtcctataggcaggctactgtgctggagcatcccccagctgctcccatcttgctggaatttcttgggcggcttctccacctgtatctcaagacagacacccgggggcctgtgtctgtggccgctcccatcccggcagccctggctgctgctcgccccaccctcgcttatctgtagattcaaagcgatgttctcttctgtgctcttagaagtagggagttcagcagtaacagccaggtgaagcgaacctgctgggtgatttgtttgcgctctgttttatggggcattcctgcgagatgtgtcagcttctgtgtgaaatgcagccacagctcatgtgtaccaaagtagaaaaccaaatcacagagaaataaaaacatgcttcagag

SEQ ID NO: 14482 - DNA, 3383 bp, Homo sapiens
  source 1..3383: mol_type = unassigned DNA
gagtctcaggggcgcgcgcccgtgggcggctgcgtcacgtgacccaggtaattggcacggcgcgcgcgcaccccttccgcgcagccccctgacctgcagcctccggacctcgctgcagcgcggacccggcccgcccgcccgatccggggtcaccatgtggcccagctggaccccctgggcattctggatgcagacctggactcctttgtgccctcagacttgatcacaaccattgataaactggccttctatgaccttcaggaggctgaccttgataaggagttccagctgccgacaaccaccttcattgggggctctgaaaacaccctctctctgcgggagatcattcggcgcctggagaacacctactgccagcacattggcctggagttcatgttcatcaacgatgtggagcagtgccagtggatccggcagaagtttgagacccctggtgtgatgcagttctccagcgaggagaagcggaccctgctggcccggctagtgcgctccatgaggtttgaagacttcctggcccggaaatggtcctcagagaagcggtttggcctggagggctgtgaagtgatgattcctgccctcaagaccatcatcgacaaatccagcgagatggggattgagaatgtcatcttggggatgccacacaggggaaggctgaacgtgctggccaacgtgatccgcaaggacctggagcagatcttctgccagtttgaccccaagctggaggcggcggacgagggctccggggatgtcaagtaccacctgggcatgtaccatgagaggatcaaccgcgtcaccaaccggaacatcactctgtcgctggttgccaacccctcccacctggaggcagtggaccctgtggtgcaggggaagacaaaggcagagcagttctaccgtggagatgcccagggcaagaaggtcatgtccatcctggttcatggggacgccgcctttgctggccagggcgtggtatatgagaccttccacctgagcgacctgccctcctacacgaccaatggtaccgtgcacgtcgtcgtcaacaaccagattggattcaccacagacccccgaatggcccgctcctcaccatacccgaccgacgtggcccgggtggtcaatgcgcctatcttccatgtgaatgccgatgacccagaggctgtgatatatgtgtgcagtgtggcagccgaatggagaaacactttcaacaaagatgttgtcgtggacctggtctgttaccgccggcgtggccacaatgagatggacgagcccatgttcacccagccgctcatgtacaagcagatccacagacaggtgcctgtgctgaagaagtacgcagacaagctgattgccgagggcacagtcaccctgcaggagtttgaggaagaaattgccaaatacgaccggatctgtgaggaggcttatggcaggtccaaggataaaaagattctgcatataaagcactggttggactccccctggcctggcttcttcaacgtagatggggagcccaagagcatgacatgcccagccacggggatccctgaggacatgctcacccacatcggcagtgtggccagctctgtgcccctggaggactttaagatccacactggcctctctcgcattctgcggggccgtgcggacatgaccaagaaccggacggtggactgggcgttggcagagtacatggcctttggctccctgctgaaggaaggcatccacgtgcggctcagcgggcaggatgtggagaggggcacattcagtcaccggcaccatgttctccatgaccaggaggttgaccgcaggacgtgtgtgcctatgaatcatctctggcctgaccaggccccgtacaccgtgtgcaacagctccctctcggagtacggagtcctgggctttgagctgggctatgccatggccagccccaatgccctggtcctctgggaggcccagtttggggacttccacaacacggcccagtgcatcatcgaccagttcatcagcaccggccaggccaagtgggtgcggcataatggcattgtgctgctgctgccccatggcatggaaggcatgggcccagagcactcgtcagcgaggcccgaaaggttcctgcagatgagcaatgatgactcggatgcctaccctgcattcaccaaggacttcgaggtgagccagctctatgactgcaactggatcgtggtcaactgctccacaccggccaactacttccacgtgctgcgccggcagatcctgctgcccttccgcaagccgctgattatcttcacacctaaatctctgctgaggcacccagaggccaagtccagctttgaccaaatggtatccgggaccagcttccagcgggtgattcctgaagatggggccgcagcacgggcccctgagcaggtgcagcggctcatcttctgcacgggaaaggtgtactatgacctggtgaaggagcggagcagccaggacctggaggagaaagtggccatcacgcgcctggagcagatctctccattccccttcgacctgatcaagcaggaggcagagaagtacccaggtgcggagctggcctggtgtcaggaggagcacaagaacatgggctactatgactacatcagcccacgcttcatgaccatcctgaggcgcgcacggcccatatggtatgttggccgggacccagcggctgcaccagccacaggaaacaggaacactcacctggtgtcactgaagaagtttctggatactgccttcaatctccaggcctttgagggcaagacattttagagctgggcaaaacctgtgtaggtctcgctgtgggtttgctggggaccaagggggtgatgaaaaggggaggggcggagctcctgcccaggagaggggctgtggggccccaggataaaacagacacagtgacagggccaagagccagcactgctggccttggtgtcatgccagaatctaccaggactgagggagccagaggagtcctataggcaggctactgtgctggagcatcccccagctgctcccatcttgctggaatttcttgggcggcttctccacctgtatctcaagacagacacccgggggcctgtgtctgtggccgctcccatcccggcagccctggctgctgctcgccccaccctcgcttatctgtagattcaaagcgatgttctcttctgtgctcttagaagtagggagttcagcagtaacagccaggtgaagcgaacctgctgggtgatttgtttgcgctctgttttatggggcattcctgcgagatgtgtcagcttctgtgtgaaatgcagccacagctcatgtgtaccaaagtagaaaaccaaatcacagagaaataaaaacatgcttcagag

SEQ ID NO: 14483 - DNA, 961 bp, Homo sapiens
  source 1..961: mol_type = unassigned DNA
gcgcgggggagccattaggaggcgaggagagaggagggcgcagctcccgcccagcccagccctgcccagccctgcccggaggcagacgcgccggaaccgggacgcgataaatatgcagagcggaggcttcgcgcagcagagcccgcgcgccgcccgctccgggtgctgaatccaggcgtggggacacgagccaggcgccgccgccggagccagcggagccggggccagagccggagcgcgtccgcgtccacgcagccgccggccggccagcacccagggccctgcatgccaggtcgttggaggtggcagcgagacatgcacccggcccggaagctcctcagcctcctcttcctcatcctgatgggcactgaactcactcaaaataaaagagaaaacaaagcagagaagatgggagggccagagagcgagaggaagaccacaggagagaagacactgaacgagcttcccttgttttgcctggaagcccacgctggctccctggctctgcccaggatgtgcagtccaaatcccaatccagcagtggggttatgtcgtcccgcttaccctcagagcccttctcctggtgctgcccagacgatcagccagtccctcctggagaggttctgcatggcctctaggagaggttttcttggccccaggaaggcctggtggagggtggtggttgtgcactgttgctggacagatgcattcattcatgtgcacacacacacacacacatgcacacacaggggagcagatacctgcagagaagagccaaccaggtcctgattagtggcaagctgccccacaaagggctatgcctgtgtcttattgagacaccttggcaaagagatggctgattctgggtggtcctggacatggccgcacccaagggccctccaagccttaatggcaccctgaagcctccatgcccaggccaaaagatgcttttcctccctaa

SEQ ID NO: 14484 - DNA, 1014 bp, Homo sapiens
  source 1..1014: mol_type = unassigned DNA
gcgcgggggagccattaggaggcgaggagagaggagggcgcagctcccgcccagcccagccctgcccagccctgcccggaggcagacgcgccggaaccgggacgcgataaatatgcagagcggaggcttcgcgcagcagagcccgcgcgccgcccgctccgggtgctgaatccaggcgtggggacacgagccaggcgccgccgccggagccagcggagccggggccagagccggagcgcgtccgcgtccacgcagccgccggccggccagcacccagggccctgcatgccaggtcgttggaggtggcagcgagacatgcacccggcccggaagctcctcagcctcctcttcctcatcctgatgggcactgaactcactcaagtgctgcccaccaaccctgaggagagctggcaggtgtacagctctgcccaggacagcgagggcaggtgtatctgcacagtggtcgctccacagcagaccatgtgttcacgggatgcccgcacaaaacagctgaggcagctactggagaaggtgcagaacatgtctcaatccatagaggtcttggacaggcggacccagagagacttgcagtacgtggagaagatggagaaccaaatgaaaggactggagtccaagttcaaacaggtggaggagagtcataagcaacacctggccaggcagtttaagggctaacttaaaagagttttttcaatgctgcagtgactgaagaagcagtccactcccatgtaaccatgaaagagagccagagagctttttgcaccatgcatttttactattattttccaatacttagcaccatttcactaaggaaccttgaatacaaccaggatcctcctttgcatgcgactgtagctgcatttcatgaatagtttgaacccttgtcaatgcattttttgaaaaagaaagaaaaaaaaaacttcgtgtatgtgactcaaagcatgtaaccttaagatgttgcattctaaactgacaataaagacctttcccaaatat

SEQ ID NO: 14485 - DNA, 2591 bp, Homo sapiens
  source 1..2591: mol_type = unassigned DNA
gggacgcgataaatatgcagagcggaggcttcgcgcagcagagcccgcgcgccgcccgctccgggtgctgaatccaggcgtggggacacgagccaggcgccgccgccggagccagcggagccggggccagagccggagcgcgtccgcgtccacgcagccgccggccggccagcacccagggccctgcatgccaggtcgttggaggtggcagcgagacatgcacccggcccggaagctcctcagcctcctcttcctcatcctgatgggcactgaactcactcaagtgctgcccaccaaccctgaggagagctggcaggtgtacagctctgcccaggacagcgagggcaggtgtatctgcacagtggtcgctccacagcagaccatgtgttcacgggatgcccgcacaaaacagctgaggcagctactggagaaggtgcagaacatgtctcaatccatagaggtcttggacaggcggacccagagagacttgcagtacgtggagaagatggagaaccaaatgaaaggactggagtccaagttcaaacaggtggaggagagtcataagcaacacctggccaggcagtttaaggcgataaaagcgaaaatggatgaacttaggcctttgatacctgtgttggaagagtacaaggccgatgccaaattggtattgcagtttaaagaggaggtccagaatctgacgtcagtgcttaacgagctgcaagaggaaattggcgcctatgactacgatgaacttcagagcagagtgtccaatcttgaagaaaggctccgtgcatgcatgcaaaaactagcttgcgggaagttgacgggcatcagtgaccccgtgactgtcaagacctccggctcgaggttcggatcctggatgacagaccctctcgcccctgaaggcgataaccgggtgtggtacatggacggctatcacaacaaccgcttcgtacgtgagtacaagtccatggttgacttcatgaacacggacaatttcacctcccaccgtctcccccacccctggtcgggcacggggcaggtggtctacaacggttctatctacttcaacaagttccagagccacatcatcatcaggtttgacctgaagacagagaccatcctcaagacccgcagcctggactatgccggttacaacaacatgtaccactacgcctggggtggccactcggacatcgacctcatggtggacgagagcgggctgtgggccgtgtacgccaccaaccagaacgctggcaacatcgtggtcagtaggctggaccccgtgtccctgcagaccctgcagacctggaacacgagctaccccaagcgcagcgccggggaggccttcatcatctgcggcacgctgtacgtcaccaacggctactcagggggtaccaaggtccactatgcataccagaccaatgcctccacctatgaatacatcgacatcccattccagaacaaatactcccacatctccatgctggactacaaccccaaggaccgggccctgtatgcctggaacaacggccaccagatcctctacaacgtgaccctcttccacgtcatccgctccgacgagttgtagctccctcctcctggaagccaagggcccacgtcctcaccacaaagggactcctgtgaaactgctgccaaaaagataccaataacactaacaataccgatcttgaaaaatcatcagcagtgcggattctgacatcgagggatggcattacctccgtgtttctccctttcgagccggcgggccacagacgtcggaagaaactcccgtatttgcagctggaactgcagcccacggcgccccggttttcctccccgccctgtccctctctggtcaaacaacatactaaagaggcgaggcaatgactgttggccagttctcaccggggaaaaacccactgttaggatggcatgaacatttccttagatcgtggtcagctccgaggaatgtggcgtccaggctctttgagagccatgggctgcacccggccgtaggctagtgtaactcgcatcccattgcagtgccgtttcttgactgtgttgctgtctcttagattaaccgtgctgaggctccacatagctcctggacctgtgtctagtacatactgaagcgatggtcagagtgtgtagagtgaagttgctgtgcccacattgtttgaactcgcgtaccccgtagatacattgtgcaacgttcttctgttattcccttgaggtggtaacttcgtatgttcagtttatgcgatgattgttgtaaatgcaatgccgtagtttggattaataagtggatggtttttgtttctaaaaagaaaaaaaaaatcagtgttcacccttatagagacatagtcaagttcatgttgataataatcaaaggaattactctcttcttgttaaattagctaaatcatgtaaccgcagataggaagggctcgcctggggaaactctggtttccgatgggacaggaaagtcatacgggcaacagtatgcggaaagtacgttttttaagtaaaaaacaaaggcaaactttgtactatccagttatctaaggaacaataaaaacattaggaga

SEQ ID NO: 14486 - DNA, 568 bp, Homo sapiens
  source 1..568: mol_type = unassigned DNA
cgtccacgcagccgccggccggccagcacccagggccctgcatgccaggtcgttggaggtggcagcgagacatgcacccggcccggaagctcctcagcctcctcttcctcatcctgatgggcactgaactcactcaagactccgctgcccccgactccctgctgagaagttcaaagggcagcacgagggggtctttggctgctattgtcatctggagggggaagagtgagagccggatagccaagaccccaggcattttcagaggtggcgggaccttagtcctacccccaacacacacccctgagtggctcatcctccctttgggcataacgctgcccttgggggctccagaaacaggcggtggggattgtgccgctgagacctggaagggcagccagcgtgccggccagctgtgtgcattgctggcttaatatgcagggcttggggggctgtggccacatgcccggcaggaggtgagtgaggagccctgtggcgtgctggtgtggggatcgtgggcatttcaaacgggcttgtcgtaccctgaacaatgtatcaatagagaaaggtc

SEQ ID NO: 14487 - DNA, 542 bp, Homo sapiens
  source 1..542: mol_type = unassigned DNA
gtagtgagtgatctggaggattctttccttcccaaatggctgggaaagcttaatggaaggccccggaggaagtggctttcatctccgattagaagccttctgtaaatgcaaaagccctattaacgtgtttgacccagtcaggcctgcgcttcaggtgggactgacacgcgtgctgcccaccaaccctgaggagagctggcaggtgtacagctctgcccaggacagcgagggcaggtgtatctgcacagtggtcgctccacagcagaccatgtgttcacgggatgcccgcacaaaacagctgaggcagctactggagaaggtgcagaacatgtctcaatccatagaggtcttggacaggcggacccagagagacttgcagtacgtggagaagatggagaaccaaatgaaaggactggagtccaagttcaaacaggtggaggagagtcataagcaacacctggccaggcagtttaaggcgataaaagcgaaaatggatgaacttaggcctttgatacctgtgttggaagagtacaaggccgatg

SEQ ID NO: 14488 - DNA, 2492 bp, Homo sapiens
  source 1..2492: mol_type = unassigned DNA
gaatcaccgcggaaaagggctccagtaggcaggacggcgccgtctctctgccggcaacctttgccccaaagcggaccctctgcggggatcggagagggatgccccggcgtgaggatgggagaagccccgggacgggagggccgcgggccgtgcccccagctggagtccccgcgccgccgccgggtgctgcccaccaaccctgaggagagctggcaggtgtacagctctgcccaggacagcgagggcaggtgtatctgcacagtggtcgctccacagcagaccatgtgttcacgggatgcccgcacaaaacagctgaggcagctactggagaaggtgcagaacatgtctcaatccatagaggtcttggacaggcggacccagagagacttgcagtacgtggagaagatggagaaccaaatgaaaggactggagtccaagttcaaacaggtggaggagagtcataagcaacacctggccaggcagtttaaggcgataaaagcgaaaatggatgaacttaggcctttgatacctgtgttggaagagtacaaggccgatgccaaattggtattgcagtttaaagaggaggtccagaatctgacgtcagtgcttaacgagctgcaagaggaaattggcgcctatgactacgatgaacttcagagcagagtgtccaatcttgaagaaaggctccgtgcatgcatgcaaaaactagcttgcgggaagttgacgggcatcagtgaccccgtgactgtcaagacctccggctcgaggttcggatcctggatgacagaccctctcgcccctgaaggcgataaccgggtgtggtacatggacggctatcacaacaaccgcttcgtacgtgagtacaagtccatggttgacttcatgaacacggacaatttcacctcccaccgtctcccccacccctggtcgggcacggggcaggtggtctacaacggttctatctacttcaacaagttccagagccacatcatcatcaggtttgacctgaagacagagaccatcctcaagacccgcagcctggactatgccggttacaacaacatgtaccactacgcctggggtggccactcggacatcgacctcatggtggacgagagcgggctgtgggccgtgtacgccaccaaccagaacgctggcaacatcgtggtcagtaggctggaccccgtgtccctgcagaccctgcagacctggaacacgagctaccccaagcgcagcgccggggaggccttcatcatctgcggcacgctgtacgtcaccaacggctactcagggggtaccaaggtccactatgcataccagaccaatgcctccacctatgaatacatcgacatcccattccagaacaaatactcccacatctccatgctggactacaaccccaaggaccgggccctgtatgcctggaacaacggccaccagatcctctacaacgtgaccctcttccacgtcatccgctccgacgagttgtagctccctcctcctggaagccaagggcccacgtcctcaccacaaagggactcctgtgaaactgctgccaaaaagataccaataacactaacaataccgatcttgaaaaatcatcagcagtgcggattctgacatcgagggatggcattacctccgtgtttctccctttcgagccggcgggccacagacgtcggaagaaactcccgtatttgcagctggaactgcagcccacggcgccccggttttcctccccgccctgtccctctctggtcaaacaacatactaaagaggcgaggcaatgactgttggccagttctcaccggggaaaaacccactgttaggatggcatgaacatttccttagatcgtggtcagctccgaggaatgtggcgtccaggctctttgagagccatgggctgcacccggccgtaggctagtgtaactcgcatcccattgcagtgccgtttcttgactgtgttgctgtctcttagattaaccgtgctgaggctccacatagctcctggacctgtgtctagtacatactgaagcgatggtcagagtgtgtagagtgaagttgctgtgcccacattgtttgaactcgcgtaccccgtagatacattgtgcaacgttcttctgttattcccttgaggtggtaacttcgtatgttcagtttatgcgatgattgttgtaaatgcaatgccgtagtttggattaataagtggatggtttttgtttctaaaaagaaaaaaaaaatcagtgttcacccttatagagacatagtcaagttcatgttgataataatcaaaggaattactctcttcttgttaaattagctaaatcatgtaaccgcagataggaagggctcgcctggggaaactctggtttccgatgggacaggaaagtcatacgggcaacagtatgcggaaagtacgttttttaagtaaaaaacaaaggcaaactttgtactatccagttatctaaggaacaataaaaacattaggagat

SEQ ID NO: 14489 - DNA, 546 bp, Homo sapiens
  source 1..546: mol_type = unassigned DNA
gagccggacggcgcttcccggtggcggcggaggagcccggagggacgcagccgggcaaggtgctgcccaccaaccctgaggagagctggcaggtgtacagctctgcccaggacagcgagggcaggtgtatctgcacagtggtcgctccacagcagaccatgtgttcacgggatgcccgcacaaaacagctgaggcagctactggagaaggtgcagaacatgtctcaatccatagaggtcttggacaggcggacccagagagacttgcagtacgtggagaagatggagaaccaaatgaaaggactggagtccaagttcaaacaggtggaggagagtcataagcaacacctggccaggcagtttaaggcgataaaagcgaaaatggatgaacttaggcctttgatacctgtgttggaagagtacaaggccgatgccaaattggtattgcagtttaaagaggaggtccagaatctgacgtcagtgcttaacgagctgcaagaggaaattggcgcctatgactacgatgaacttcagagcagagtgtcca

SEQ ID NO: 14490 - DNA, 1057 bp, Homo sapiens
  source 1..1057: mol_type = unassigned DNA
ggacggcgcttcccggtggcggcggaggagcccggagggacgcagccgggcaaggcagggcgcagggcgggcggcgcgaggcgcagggcgcggcgggcagaggccacctggccaccttccctggcgcccggggaaggcgcggcgatggccggggcgcgcggggcggcggcggcggcgggcgggcggcggcgggccgagggggcgcggggacacagccaggcgcccctgcccgccgcggtgcccgccgcctgaaggccgcctgggcgcgggagccggtgccagctcggagcgggcgctggaggcagctcgaggcgcgatgtcggtgccgctgctcaagatcggggtcgtgctgagcaccatggccatgatcactaactggatgtcccagacgctgccctcgctggtgggcctcaacaccaccaagctctcggcggccggcggcgggacgctggaccgcagcaccggcgtgctgcccaccaaccctgaggagagctggcaggtgtacagctctgcccaggacagcgagggcaggtgtatctgcacagtggtcgctccacagcagaccatgtgttcacgggatgcccgcacaaaacagctgaggcagctactggagaaggtgcagaacatgtctcaatccatagaggtcttggacaggcggacccagagagacttgcagtacgtggagaagatggagaaccaaatgaaaggactggagtccaagttcaaacaggtggaggagagtcataagcaacacctggccaggcagtttaagggctaacttaaaagagttttttcaatgctgcagtgactgaagaagcagtccactcccatgtaaccatgaaagagagccagagagctttttgcaccatgcatttttactattattttccaatacttagcaccatttcactaaggaaccttgaatacaaccaggatcctcctttgcatgcgactgtagctgcatttcatgaatagtttgaacccttgtcaatgcattttttgaaaaagaaagaaaaaaaaaacttcgtgtatgtgactcaaagcatgtaaccttaag

SEQ ID NO: 14491 - DNA, 2444 bp, Homo sapiens
  source 1..2444: mol_type = unassigned DNA
ggcgggcggcgcgaggcgcagggcgcggcgggcagaggccacctggccaccttccctggcgcccggggaaggcgcggcgatggccggggcgcgcggggcggcggcggcggcgggcgggcggcggcgggccgagggggcgcggggacacagccaggcgcccctgcccgccgcggtgcccgccgcctgaaggccgcctgggcgcgggagccggtgccagctcggagcgggcgctggaggcagctcgaggcgcgatgtcggtgccgctgctcaagatcggggtcgtgctgagcaccatggccatgatcactaactggatgtcccagacgctgccctcgctggtgggcctcaacaccaccaagctctcggcggccggcggcgggacgctggaccgcagcaccggcgtgctgcccaccaaccctgaggagagctggcaggtgtacagctctgcccaggacagcgagggcaggtgtatctgcacagtggtcgctccacagcagaccatgtgttcacgggatgcccgcacaaaacagctgaggcagctactggagaaggtgcagaacatgtctcaatccatagaggtcttggacaggcggacccagagagacttgcagtacgtggagaagatggagaaccaaatgaaaggactggagtccaagttcaaacaggtggaggagagtcataagcaacacctggccaggcagtttaaggcgataaaagcgaaaatggatgaacttaggcctttgatacctgtgttggaagagtacaaggccgatgccaaattggtattgcagtttaaagaggaggtccagaatctgacgtcagtgcttaacgagctgcaagaggaaattggcgcctatgactacgatgaacttcagagcagagtgtccaatcttgaagaaaggctccgtgcatgcatgcaaaaactagcttgcgggaagttgacgggcatcagtgaccccgtgactgtcaagacctccggctcgaggttcggatcctggatgacagaccctctcgcccctgaaggcgataaccgggtgtggtacatggacggctatcacaacaaccgcttcgtacgtgagtacaagtccatggttgacttcatgaacacggacaatttcacctcccaccgtctcccccacccctggtcgggcacggggcaggtggtctacaacggttctatctacttcaacaagttccagagccacatcatcatcaggtttgacctgaagacagagaccatcctcaagacccgcagcctggactatgccggttacaacaacatgtaccactacgcctggggtggccactcggacatcgacctcatggtggacgagagcgggctgtgggccgtgtacgccaccaaccagaacgctggcaacatcgtggtcagtaggctggaccccgtgtccctgcagaccctgcagacctggaacacgagctaccccaagcgcagcgccggggaggccttcatcatctgcggcacgctgtacgtcaccaacggctactcagggggtaccaaggtccactatgcataccagaccaatgcctccacctatgaatacatcgacatcccattccagaacaaatactcccacatctccatgctggactacaaccccaaggaccgggccctgtatgcctggaacaacggccaccagatcctctacaacgtgaccctcttccacgtcatccgctccgacgagttgtagctccctcctcctggaagccaagggcccacgtcctcaccacaaagggactcctgtgaaactgctgccaaaaagataccaataacactaacaataccgatcttgaaaaatcatcagcagtgcggattctgacatcgagggatggcattacctccgtgtttctccctttcgagccggcgggccacagacgtcggaagaaactcccgtatttgcagctggaactgcagcccacggcgccccggttttcctccccgccctgtccctctctggtcaaacaacatactaaagaggcgaggcaatgactgttggccagttctcaccggggaaaaacccactgttaggatggcatgaacatttccttagatcgtggtcagctccgaggaatgtggcgtccaggctctttgagagccatgggctgcacccggccgtaggctagtgtaactcgcatcccattgcagtgccgtttcttgactgtgttgctgtctcttagattaaccgtgctgaggctccacatagctcctggacctgtgtctagtacatactgaagcgatggtcagagtgtgtagagtgaagttgctgtgcccacattgtttgaactcgcgtaccccgtagatacattgtgcaacgttcttctgttattcccttgaggtggtaacttcgtatgttcagtttatgcgatgattgttgtaaatgcaatgccgtagtttggattaataagtggatggtttttgtttctaa

SEQ ID NO: 14492 - DNA, 791 bp, Homo sapiens
  source 1..791: mol_type = unassigned DNA
gctgcactaaaactgtttttcttttaagctccctggaatcctgttgaatattaaagttccatcttgaggctagactcaattcagatctgcctgtaaagatgtaaaacagcgattcttcatttgctgggtgattgattcctgactctatgctcagaatgtacataacatgtctcaatccatagaggtcttggacaggcggacccagagagacttgcagtacgtggagaagatggagaaccaaatgaaaggactggagtccaagttcaaacaggtggaggagagtcataagcaacacctggccaggcagtttaaggcgataaaagcgaaaatggatgaacttaggcctttgatacctgtgttggaagagtacaaggccgatgccaaattggtattgcagtttaaagaggaggtccagaatctgacgtcagtgcttaacgagctgcaagaggaaattggcgcctatgactacgatgaacttcagagcagagtgtccaatcttgaagaaaggctccgtgcatgcatgcaaaaactagcttgcgggaagttgacgggcatcagtgaccccgtgactgtcaagacctccggctcgaggttcggatcctggatgacagaccctctcgcccctgaaggcgataaccgggtgtggtacatggacggctatcacaacaaccgcttcgtacgtgagtacaagtccatggttgacttcatgaacacggacaatttcacctcccaccgtctcccccacccctggtcgggcacggggcaggtggtctacaacggttctatctact

SEQ ID NO: 14493 - DNA, 727 bp, Homo sapiens
  source 1..727: mol_type = unassigned DNA
gagtcataagcaacacctggccaggcagtttaaggcgataaaagcgaaaatggatgaacttaggcctttgatacctgtgttggaagagtacaaggccgatgccaaattggtattgcagtttaaagaggaggtccagaatctgacgtcagtgcttaacgagctgcaagaggaaattggcgcctatgactacgatgaacttcagagcagagtgtccaatcttgaagaaaggctccgtgcatgcatgcaaaaactaggtgtggtacatggacggctatcacaacaaccgcttcgtacgtgagtacaagtccatggttgacttcatgaacacggacaatttcacctcccaccgtctcccccacccctggtcgggcacggggcaggtggtctacaacggttctatctacttcaacaagttccagagccacatcatcatcaggtttgacctgaagacagagaccatcctcaagacccgcagcctggactatgccggttacaacaacatgtaccactacgcctggggtggccactcggacatcgacctcatggtggacgagagcgggctgtgggccgtgtacgccaccaaccagaacgctggcaacatcgtggtcagtaggctggaccccgtgtccctgcagaccctgcagacctggaacacgagctaccccaagcgcagcgccggggaggccttcatcatctgcggcacgctgtacgtcaccaacggctactc

SEQ ID NO: 14494 - DNA, 2624 bp, Homo sapiens
  source 1..2624: mol_type = unassigned DNA
ccgcagtcttcccccacacgtggatggcctctgaactcgtgtgctcgtgcaagcccaccgagggtgccacgcagacctaggaggtcacaggcgggcttggccgggagggacagggcagggtgcggggacttgtggtggaggggcccttcctctaccctccccaggaaagccacccacttcccatccagggtccctgttagaatcaggagcgtttggcccttcagagggcggccgaggctcgtgcattctggaagagctgcgtggctgcgcagacacaccggcctccgggcaggaggagttctgttcctgtgcagtgggtgtggaagccgccctgagccctcgggggtgtggggggctccagcctcagtccaaatcaccgggtggcccgggtgtgtccctcctcacctccatggtcctctgtgagacgggagggctgctgagatcacatccaggatcccatccgccctggtgcgctccagcttgggctcctcccactggcagaagcaaccggctcacgcctgtgggagaagcgcgcaggctcttcctgcgggaaggcagctgtggcctttgtcccgggtcagttccggggcggctggtggtgctgctgctccatcgtgggacagggcctgcctggatgcagtgtctcacactgggcctgactgtgccccacgcgggctgggctgtcagggcatgacctctaatgcccttgggggtggagccgctgcgttcccatctccaagagaagaaaattgagtcttggcaaagctgaccccctctcctagaggtgctgctccagcacccccatccccaggccatgggtccagcaggctgaggaggcgtgaagcctgggagggcggccgtctgcccacggctcttccctgctatcctggccacagctgctctgttttggggaggaggtggcttttccgagagtgggggagttgtctgtgaaaacaagggcgtgagcagctttccacagtaccccagaccccgagggcaagaggagaagccgccacatggcacgtgtgctctgggcagtcgaggtcagggtcatcaccgcgggccggggcccccgccctccctctcctgacctgcgtgctcttttccagcttgcgggaagttgacgggcatcagtgaccccgtgactgtcaagacctccggctcgaggttcggatcctggatgacagaccctctcgcccctgaaggcgataaccgggtgtggtacatggacggctatcacaacaaccgcttcgtacgtgagtacaagtccatggttgacttcatgaacacggacaatttcacctcccaccgtctcccccacccctggtcgggcacggggcaggtggtctacaacggttctatctacttcaacaagttccagagccacatcatcatcaggtttgacctgaagacagagaccatcctcaagacccgcagcctggactatgccggttacaacaacatgtaccactacgcctggggtggccactcggacatcgacctcatggtggacgagagcgggctgtgggccgtgtacgccaccaaccagaacgctggcaacatcgtggtcagtaggctggaccccgtgtccctgcagaccctgcagacctggaacacgagctaccccaagcgcagcgccggggaggccttcatcatctgcggcacgctgtacgtcaccaacggctactcagggggtaccaaggtccactatgcataccagaccaatgcctccacctatgaatacatcgacatcccattccagaacaaatactcccacatctccatgctggactacaaccccaaggaccgggccctgtatgcctggaacaacggccaccagatcctctacaacgtgaccctcttccacgtcatccgctccgacgagttgtagctccctcctcctggaagccaagggcccacgtcctcaccacaaagggactcctgtgaaactgctgccaaaaagataccaataacactaacaataccgatcttgaaaaatcatcagcagtgcggattctgacatcgagggatggcattacctccgtgtttctccctttcgagccggcgggccacagacgtcggaagaaactcccgtatttgcagctggaactgcagcccacggcgccccggttttcctccccgccctgtccctctctggtcaaacaacatactaaagaggcgaggcaatgactgttggccagttctcaccggggaaaaacccactgttaggatggcatgaacatttccttagatcgtggtcagctccgaggaatgtggcgtccaggctctttgagagccatgggctgcacccggccgtaggctagtgtaactcgcatcccattgcagtgccgtttcttgactgtgttgctgtctcttagattaaccgtgctgaggctccacatagctcctggacctgtgtctagtacatactgaagcgatggtcagagtgtgtagagtgaagttgctgtgcccacattgtttgaactcgcgtaccccgtagatacattgtgcaacgttcttctgttattcccttgaggtggtaacttcgtatgttcagtttatgcgatgattgttgtaaatgcaatgccgtagtttggattaataagtggatggtttttgtttct

SEQ ID NO: 14495 - DNA, 2019 bp, Homo sapiens
  source 1..2019: mol_type = unassigned DNA
cgcaacaaagactcggagcgagcgagggggcgggggtggggcggaatcccggccgccggcgaggcgggggaggcggcggcgcagggtcgccccggccgggcgggcggggtcgcgcctggtggcggtccccgcgccgaggcgccgctagggcgggcgggggtcgggacgccgggctaggggcgcgtcatgtggccgctcacggtcccgccgccgctgctgctgctgctgtgctcaggcctggccggacagactctcttccagaacccagaagagggctggcagctgtacacctcagcccaggcccctgacgggaaatgcatctgcacggccgtgatcccagcgcagagtacctgctctcgagatggcaggagtcgggagctgcggcaactgatggagaaggtccagaacgtctcccagtccatggaggtccttgagttgcggacgtatcgcgacctccagtatgtacgcggcatggagaccctcatgcggagcctggatgcgcggctccgggcagctgatgggtccctctcggccaagagcttccaggagctgaaggacaggatgacggaactgttgcccctgagctcggtcctggagcagtacaaggcagacacgcggaccattgtacgcttgcgggaggaggtgaggaatctctccggcagtctggcggccattcaggaggagatgggtgcctacgggtatgaggacctgcagcaacgggtgatggccctggaggcccggctccacgcctgcgcccagaagctgggctgtgggaagctgaccggggtcagtaaccccatcaccgttcgggccatggggtcccgcttcggctcctggatgactgacacgatggcccccagtgcggatagccgggtctggtacatggatggctattacaaaggccgccgggtcctggagttccgtaccctgggagacttcatcaaaggccagaactttatccagcacctgctgccccagccgtgggcgggcacgggccacgtggtgtacaacggctccctgttctataacaagtaccagagcaacgtggtggtcaaataccacttccgctcgcgctctgtgctggtgcagaggagcctcccgggcgccggttacaacaacaccttcccctactcctggggcggcttctccgacatggacttcatggtggacgagagcgggctctgggctgtgtacaccaccaaccagaacgcgggcaacatcgtggtcagccggctggacccgcacaccctcgaggtcatgcggtcctgggacaccggctaccccaagcgcagcgctggcgaggccttcatgatctgcggtgtgctctacgtgaccaactcccacctggctggggccaaggtctacttcgcctattttaccaacacgtccagttacgagtacacggacgtgcccttccacaaccagtattcccacatctcgatgctggattacaacccccgggagcgcgccctctatacctggaacaacggccaccaggtgctctacaatgtcaccctgtttcacgtcatcagcacctctggggacccctgagccaatgctgtggctcgggctgctgcctggggggcctctgggggctgggggcccttttcattctgcctgtgtccctcaagggtgatctctctgtctctgtcacgccctttctccccgcctttttgctgggcttttgttctctgcctatgtatttctgtctattttttcaatttcccctcttctcctttattgatctctgcttttaatacaccacttctttctttctgcctttttatggatgtctttttctttttatggctctggttctccagttctttccgtctctgcctctctctgtctctctctctctgtccttccacccctccctccttgcttcccacccattcctcatccctcactcccacccccacccccacccccaggagttgagtgcatggatctgtttctttttttatttacactttttctttccggtttgccggaataaacaggacctttgacatttga

SEQ ID NO: 14496 - DNA, 1665 bp, Homo sapiens
  source 1..1665: mol_type = unassigned DNA
aagttccttctgtctgctgtgtagagaattgactacaggggatgaaggtggaactgggagactagggaggaggtccagaacgtctcccagtccatggaggtccttgagttgcggacgtatcgcgacctccagtatgtacgcggcatggagaccctcatgcggagcctggatgcgcggctccgggcagctgatgggtccctctcggccaagagcttccaggagctgaaggacaggatgacggaactgttgcccctgagctcggtcctggagcagtacaaggcagacacgcggaccattgtacgcttgcgggaggaggtgaggaatctctccggcagtctggcggccattcaggaggagatgggtgcctacgggtatgaggacctgcagcaacgggtgatggccctggaggcccggctccacgcctgcgcccagaagctgggctgtgggaagctgaccggggtcagtaaccccatcaccgttcgggccatggggtcccgcttcggctcctggatgactgacacgatggcccccagtgcggatagccgggtctggtacatggatggctattacaaaggccgccgggtcctggagttccgtaccctgggagacttcatcaaaggccagaactttatccagcacctgctgccccagccgtgggcgggcacgggccacgtggtgtacaacggctccctgttctataacaagtaccagagcaacgtggtggtcaaataccacttccgctcgcgctctgtgctggtgcagaggagcctcccgggcgccggttacaacaacaccttcccctactcctggggcggcttctccgacatggacttcatggtggacgagagcgggctctgggctgtgtacaccaccaaccagaacgcgggcaacatcgtggtcagccggctggacccgcacaccctcgaggtcatgcggtcctgggacaccggctaccccaagcgcagcgctggcgaggccttcatgatctgcggtgtgctctacgtgaccaactcccacctggctggggccaaggtctacttcgcctattttaccaacacgtccagttacgagtacacggacgtgcccttccacaaccagtattcccacatctcgatgctggattacaacccccgggagcgcgccctctatacctggaacaacggccaccaggtgctctacaatgtcaccctgtttcacgtcatcagcacctctggggacccctgagccaatgctgtggctcgggctgctgcctggggggcctctgggggctgggggcccttttcattctgcctgtgtccctcaagggtgatctctctgtctctgtcacgccctttctccccgcctttttgctgggcttttgttctctgcctatgtatttctgtctattttttcaatttcccctcttctcctttattgatctctgcttttaatacaccacttctttctttctgcctttttatggatgtctttttctttttatggctctggttctccagttctttccgtctctgcctctctctgtctctctctctctgtccttccacccctccctccttgcttcccacccattcctcatccctcactcccacccccacccccacccccaggagttgagtgcatggatctgtttctttttttatttacactttttctttccggtttgcc

SEQ ID NO: 14497 - DNA, 713 bp, Homo sapiens
  source 1..713: mol_type = unassigned DNA
agagaattgactacaggggatgaaggtggaactgggagactagggaggaggtccagaacgtctcccagtccatggaggtccttgagttgcggacgtatcgcgacctccagtatgtacgcggcatggagaccctcatgcggagcctggatgcgcggctccgggcagctgatgggtccctctcggccaagagcttccaggagctgaaggacaggatgacggaactgttgcccctgagctcggtcctggagcagtacaaggcagacacgcggaccattgtacgcttgcgggaggaggctgtgggaagctgaccggggtcagtaaccccatcaccgttcgggccatggggtcccgcttcggctcctggatgactgacacgatggcccccagtgcggatagccgggtctggtacatggatggctattacaaaggccgccgggtcctggagttccgtaccctgggagacttcatcaaaggccagaactttatccagcacctgctgccccagccgtgggcgggcacgggccacgtggtgtacaacggctccctgttctataacaagtaccagagcaacgtggtggtcaaataccacttccgctcgcgctctgtgctggtgcagaggagcctcccgggcgccggttacaacaacaccttcccctactcctggggcggcttctccgacatggacttcatggtggacgagagcgggctctggg

SEQ ID NO: 14498 - DNA, 1226 bp, Homo sapiens
  source 1..1226: mol_type = unassigned DNA
cggcgctttataagaggagcccgccaggcgcgccgagccgcagcccgcgtccccgagccccccctcaccccgtcccggaccccctgccccgcagctcgcgctcgtgccccctcccccacgcccccccggggcgcctgggtgtcgagggaccgagcgccccgcggcgggccagagaagggacgcgcggcgggcggccgcggggcatgaggcggaggcgcgatgtcggtgccgctgctcaagatcggggccgtgctgagcaccatggccatggtcaccaactggatgtcgcagacgctgccctcgctcgtggggctcaacggcaccgtgtcccgtgcgggcgcctctgagaaaatcactctcttccagaacccagaagagggctggcagctgtacacctcagcccaggcccctgacgggaaatgcatctgcacggccgtgatcccagcgcagagtacctgctctcgagatggcaggagtcgggagctgcggcaactgatggagaaggtccagaacgtctcccagtccatggaggtccttgagttgcggacgtatcgcgacctccagtatgtacgcggcatggagaccctcatgcggagcctggatgcgcggctccgggcagctgatgggtccctctcggccaagagcttccaggagctgaaggacaggatgacggaactgttgcccctgagctcggtcctggagcagtacaaggcagacacgcggaccattgtacgcttgcgggaggaggtgaggaatctctccggcagtctggcggccattcaggaggagatgggtgcctacgggtatgaggacctgcagcaacgggtgatggccctggaggcccggctccacgcctgcgcccagaagctgggctgtgggaagctgaccggggtcagtaaccccatcaccgttcgggccatggggtcccgcttcggctcctggatgactgacacgatggcccccagtgcggatagccgggtctggtacatggatggctattacaaaggccgccgggtcctggagttccgtaccctgggagacttcatcaaaggccagaactttatccagcacctgctgccccagccgtgggcgggcacgggccacgtggtgtacaacggctccctgttctataacaagtaccagagcaacgtggtggtcaaataccacttccgctcgcgctctgtgctggtgcagaggagcctcccgggcgccggttacaacaacac

SEQ ID NO: 14499 - DNA, 593 bp, Homo sapiens
  source 1..593: mol_type = unassigned DNA
tgctcaggcctggccggacagactctcttccagaacccagaagagggctggcagctgtacacctcagcccaggcccctgacgggaaatgcatctgcacggccgtgatcccagcgcagagtacctgctctcgagatggcaggagtcgggagctgcggcaactgatggagaaggtccagaacgtctcccagtccatggaggtccttgagttgcggacgtatcgcgacctccagtatgtacgcggcatggagaccctcatgcggagcctggatgcgcggctccgggcagctgatgggtccctctcggccaagagcttccaggagctgaaggacaggatgacggaactgttgcccctgagctcggtcctggagcagtacaaggcagacacgcggaccattgtacgcttgcgggaggaggtgaggaatctctccggcagtctggcggccattcaggaggagatgggtgcctacgggtatgaggacctgcagcaacgggtgatggccctggaggcccggctccacgcctgcgcccagaagctgggtatgccttggcccttgaccctgacccctgatctctgactgccacacccaactcc

SEQ ID NO: 14500 - DNA, 2189 bp, Homo sapiens
  source 1..2189: mol_type = unassigned DNA
atgagtcctccactgctgaagcttggcgctgtgcttagtaccatggcaatgatctcaaactggatgtcccaaactctcccatccttggtgggactgaacaccacgaggctgtcgactccggataccttaactcagattagtcctaaagaagggtggcaggtgtacagctcagctcaggatcctgatgggcggtgcatttgcacagttgttgctccagaacaaaacctgtgttcccgggatgccaaaagcaggcaacttcgccaactactggaaaaggttcagaacatgtcccagtctattgaagtcttaaacttgagaactcagagagatttccaatatgttttaaaaatggaaacccaaatgaaagggctgaaggcaaaatttcggcagattgaagatgatcgaaagacacttatgaccaagcattttcaggagttgaaagagaaaatggacgagctcctgcctttgatccccgtgctggaacagtacaaaacagatgctaagttaatcacccagttcaaggaggaaataaggaatctgtctgctgtcctcactggtattcaggaggaaattggtgcctatgactacgaggaactacaccaaagagtgctgagcttggaaacaagacttcgtgactgcatgaaaaagctaacatgtggcaaactgatgaaaatcacaggcccagttacagtcaagacatctggaacccgatttggtgcttggatgacagaccctttagcatctgagaaaaacaacagagtctggtacatggacagttatactaacaataaaattgttcgtgaatacaaatcaattgcagactttgtcagtggggctgaatcaaggacatacaaccttcctttcaagtgggcaggaactaaccatgttgtctacaatggctcactctattttaacaagtatcagagtaatatcatcatcaaatacagctttgatatggggagagtgcttgcccaacgaagcctggagtatgctggttttcataatgtttacccctacacatggggtggattctctgacatcgacctaatggctgatgaaatcgggctgtgggctgtgtatgcaactaaccagaatgcaggcaatattgtcatcagccaacttaaccaagataccttggaggtgatgaagagctggagcactggctaccccaagagaagtgcaggggaatctttcatgatctgtgggacactgtatgtcaccaactcccacttaactggagccaaggtgtattattcctattccaccaaaacctccacatatgagtacacagacattcccttccataaccaatactttcacatatccatgcttgactacaatgcaagagatcgagctctctatgcctggaacaatggccaccaggtgctgttcaatgtcacccttttccatatcatcaagacagaggatgacacataggcaaatgtgacatgttttcattgatttaaacagtgtgatttgtgataaactctataagaccccttccgtttttttcttcactattatttttcatcatttctccaaagcaaagcatttttattgtaaagttggtgtttcaaaaacatagctgagcttgtctaacttaccatgttggaaacacatcttaacttctaaatttacaaggcctatcatgtccttgtcatgaaaagcactaaaaaaaaaaagagtttaagtggctaaagtcatagttttgcaagagattaatgatctgccttatattagagtcagagactaatggtggcttaaatgcacgaatgtctttttttttaaaactgtcattttttactgtcttttgctccatatcaggaaatattttggtaggaattaggagaacaaaaagcacttttatcccatttatttctttaaaaaatgtaaggatttcatttatattgaaaaataatattaatcattttgctgttaacacaattctctgatgcggtgctgtacagtcatttttaaatctcttgctaacattttattggcagtatgtatttctaccattgtaaccaccattgtgctattgtatctcttcacttctgtgaaagtaatattttttataaaatacactgaaatttaacctcagtaattgagtccattttcaagtgtggtcaagaataatcttcttggcttacccctttacataagcattataaactaaaatgaaaaccaaa

SEQ ID NO: 14501 - DNA, 2926 bp, Homo sapiens
  source 1..2926: mol_type = unassigned DNA
atgagtcctccactgctgaagcttggcgctgtgcttagtaccatggcaatgatctcaaactggatgtcccaaactctcccatccttggtgggactgaacaccacgaggctgtcgactccggataccttaactcagattagtcctaaagaagggtggcaggtgtacagctcagctcaggatcctgatgggcggtgcatttgcacagttgttgctccagaacaaaacctgtgttcccgggatgccaaaagcaggcaacttcgccaactactggaaaaggttcagaacatgtcccagtctattgaagtcttaaacttgagaactcagagagatttccaatatgttttaaaaatggaaacccaaatgaaagggctgaaggcaaaatttcggcagattgaagatgatcgaaagacacttatgaccaagcattttcaggagttgaaagagaaaatggacgagctcctgcctttgatccccgtgctggaacagtacaaaacagatgctaagttaatcacccagttcaaggaggaaataaggaatctgtctgctgtcctcactggtattcaggaggaaattggtgcctatgactacgaggaactacaccaaagagtgctgagcttggaaacaagacttcgtgactgcatgaaaaagctaattgatttaaaaaagagaaaagaagaagaaaaaaggcaacagaaaggagaagcataagcaatagtattttgggaagctataacacgcgacttgcctccctgttcacctttgtattctcagcacctagaatagttctggtacaaaataagttcacagtaaatggttgtcaaatgaataaattaattattatatctttaaatagtaactattgtttttaccctctaacatatttcagagaaatgcttagtgctacaagaaagtaaagtttgctttctaaggtatgattgactggagtaagaatcaattttcctcacaaaaccaggtacaaaataaaagagtcaactagccaaaagaccactttaccatggtcacccaatgtttagtttaagagccagaagcttttaacctccggtacaaattctgtcctaagttttggccgaaacaacctaagactcagcagtatccctttgccatagagatgcaaggctggattagattcaagcaccatcgaagccaaagacaccccaagccagtgatgtgctgtgggttgtttggaaatgtcgattagataaggctcatggtatgattcagagctccaaggacagttcttgttcaggtttcaactaatcaacatcggattatgcacacctcaacatctgaaatatgcagacatttgagacaaataccagaattgtgtcttcttgctttgtacaaatcatgcttcagtctggcaataagcatgtggcaaactgatgaaaatcacaggcccagttacagtcaagacatctggaacccgatttggtgcttggatgacagaccctttagcatctgagaaaaacaacagagtctggtacatggacagttatactaacaataaaattgttcgtgaatacaaatcaattgcagactttgtcagtggggctgaatcaaggacatacaaccttcctttcaagtgggcaggaactaaccatgttgtctacaatggctcactctattttaacaagtatcagagtaatatcatcatcaaatacagctttgatatggggagagtgcttgcccaacgaagcctggagtatgctggttttcataatgtttacccctacacatggggtggattctctgacatcgacctaatggctgatgaaatcgggctgtgggctgtgtatgcaactaaccagaatgcaggcaatattgtcatcagccaacttaaccaagataccttggaggtgatgaagagctggagcactggctaccccaagagaagtgcaggggaatctttcatgatctgtgggacactgtatgtcaccaactcccacttaactggagccaaggtgtattattcctattccaccaaaacctccacatatgagtacacagacattcccttccataaccaatactttcacatatccatgcttgactacaatgcaagagatcgagctctctatgcctggaacaatggccaccaggtgctgttcaatgtcacccttttccatatcatcaagacagaggatgacacataggcaaatgtgacatgttttcattgatttaaacagtgtgatttgtgataaactctataagaccccttccgtttttttcttcactattatttttcatcatttctccaaagcaaagcatttttattgtaaagttggtgtttcaaaaacatagctgagcttgtctaacttaccatgttggaaacacatcttaacttctaaatttacaaggcctatcatgtccttgtcatgaaaagcactaaaaaaaaaaagagtttaagtggctaaagtcatagttttgcaagagattaatgatctgccttatattagagtcagagactaatggtggcttaaatgcacgaatgtctttttttttaaaactgtcattttttactgtcttttgctccatatcaggaaatattttggtaggaattaggagaacaaaaagcacttttatcccatttatttctttaaaaaatgtaaggatttcatttatattgaaaaataatattaatcattttgctgttaacacaattctctgatgcggtgctgtacagtcatttttaaatctcttgctaacattttattggcagtatgtatttctaccattgtaaccaccattgtgctattgtatctcttcacttctgtgaaagtaatattttttataaaatacactgaaatttaacctcagtaattgagtccattttcaagtgtggtcaagaataatcttcttggcttacccctttacataagcattataaactaaaatgaaaaccaaa

SEQ ID NO: 14502 - DNA, 3255 bp, Homo sapiens
  source 1..3255: mol_type = unassigned DNA
tcctagctctgagaatgcctgcggaatgatcgccccccagggcggctgccgccgctgccgctgctgctgttattgctactgctgctgccgccgcctctgcttccactcggctctgactggcaggcagaaagtgcaactgacgagggaaaggtctctgcagtgagtggagagcctacataaaagagagtaaagaggggcaaaaacccagatcagaatgcaggcgacgtccaaccttctcaacctcctgctgctgtctttgtttgccggattagatccttccaagactcagattagtcctaaagaagggtggcaggtgtacagctcagctcaggatcctgatgggcggtgcatttgcacagttgttgctccagaacaaaacctgtgttcccgggatgccaaaagcaggcaacttcgccaactactggaaaaggttcagaacatgtcccagtctattgaagtcttaaacttgagaactcagagagatttccaatatgttttaaaaatggaaacccaaatgaaagggctgaaggcaaaatttcggcagattgaagatgatcgaaagacacttatgaccaagcattttcaggagttgaaagagaaaatggacgagctcctgcctttgatccccgtgctggaacagtacaaaacagatgctaagttaatcacccagttcaaggaggaaataaggaatctgtctgctgtcctcactggtattcaggaggaaattggtgcctatgactacgaggaactacaccaaagagtgctgagcttggaaacaagacttcgtgactgcatgaaaaagctaacatgtggcaaactgatgaaaatcacaggcccagttacagtcaagacatctggaacccgatttggtgcttggatgacagaccctttagcatctgagaaaaacaacagagtctggtacatggacagttatactaacaataaaattgttcgtgaatacaaatcaattgcagactttgtcagtggggctgaatcaaggacatacaaccttcctttcaagtgggcaggaactaaccatgttgtctacaatggctcactctattttaacaagtatcagagtaatatcatcatcaaatacagctttgatatggggagagtgcttgcccaacgaagcctggagtatgctggttttcataatgtttacccctacacatggggtggattctctgacatcgacctaatggctgatgaaatcgggctgtgggctgtgtatgcaactaaccagaatgcaggcaatattgtcatcagccaacttaaccaagataccttggaggtgatgaagagctggagcactggctaccccaagagaagtgcaggggaatctttcatgatctgtgggacactgtatgtcaccaactcccacttaactggagccaaggtgtattattcctattccaccaaaacctccacatatgagtacacagacattcccttccataaccaatactttcacatatccatgcttgactacaatgcaagagatcgagctctctatgcctggaacaatggccaccaggtgctgttcaatgtcacccttttccatatcatcaagacagaggatgacacataggcaaatgtgacatgttttcattgatttaaacagtgtgatttgtgataaactctataagaccccttccgtttttttcttcactattatttttcatcatttctccaaagcaaagcatttttattgtaaagttggtgtttcaaaaacatagctgagcttgtctaacttaccatgttggaaacacatcttaacttctaaatttacaaggcctatcatgtccttgtcatgaaaagcactaaaaaaaaaaagagtttaagtggctaaagtcatagttttgcaagagattaatgatctgccttatattagagtcagagactaatggtggcttaaatgcacgaatgtctttttttttaaaactgtcattttttactgtcttttgctccatatcaggaaatattttggtaggaattaggagaacaaaaagcacttttatcccatttatttctttaaaaaatgtaaggatttcatttatattgaaaaataatattaatcattttgctgttaacacaattctctgatgcggtgctgtacagtcatttttaaatctcttgctaacattttattggcagtatgtatttctaccattgtaaccaccattgtgctattgtatctcttcacttctgtgaaagtaatattttttataaaatacactgaaatttaacctcagtaattgagtccattttcaagtgtggtcaagaataatcttcttggcttacccctttacataagcattataaactaaaatgaaaaccaaaccagacacctgacatagagtctttattttaccccaagttttttgggccactgacattgaatgcaacaactgatttcatacaactgagttactctgttcactccactgaatgcaacccatatagtttcttgcacaaggtgcatctggattccaaatattggatttgagttgactctactcatttattatacactaaagaaattttgttcttcatagttaaatgtactagcatttaatttatattttacatacaacttgcaataatgaaattccttatgtcaggaccctgaaaataagcacatttgaaaactcttagaaaaaaaaaattctgtaatgtcctctagatttagattatgagccctgaggagttattggcaagatttgtgcaaaataaaatatggggagacttgggagttgtctttgtggtttcaaaagtgtaaataaccaattcagaaaacaaaatggaaaaacgaccccttgttaccttgattcactgtatgtggaaaaataatgtaaccaaaagggaagagctttaataatacttatgttaataactctatgaaacatataagctaactatatatcaaacatttcattgagtttggatgtattttccacatattaaaaaaatagttccctaaggcagctttatggaaactaatataggttggttttacaatttaaaaagtatattctataataaataataaaacaaattgttttaaatgtttagtttcacacatacatagtaccatgattttctttgaaagataaggatgtaatgatttagataaagcatcatgtaaagaaatcctaacatttaagtgtaattcatttcaaatgtcacaagtaaagcatcatcctcaaatatctcactgtcaaaattgtagaattaaataacccaatcttgaaa

SEQ ID NO: 14503 - DNA, 2955 bp, Homo sapiens
  source 1..2955: mol_type = unassigned DNA
agaaagtgcaactgacgagggaaaggtctctgcagtgagtggagagcctacataaaagagagtaaagaggggcaaaaacccagatcagaatgcaggcgacgtccaaccttctcaacctcctgctgctgtctttgtttgccggattagatccttccaagactcagattagtcctaaagaagggtggcaggtgtacagctcagctcaggatcctgatgggcggtgcatttgcacagttgttgctccagaacaaaacctgtgttcccgggatgccaaaagcaggcaacttcgccaactactggaaaaggttcagaacatgtcccagtctattgaagtcttaaacttgagaactcagagagatttccaatatgttttaaaaatggaaacccaaatgaaagggctgaaggcaaaatttcggcagattgaagatgatcgaaagacacttatgaccaagcattttcaggagttgaaagagaaaatggacgagctcctgcctttgatccccgtgctggaacagtacaaaacagatgctaagttaatcacccagttcaaggaggaaataaggaatctgtctgctgtcctcactggtattcaggaggaaattggtgcctatgactacgaggaactacaccaaagagtgctgagcttggaaacaagacttcgtgactgcatgaaaaagctaattgatttaaaaaagagaaaagaagaagaaaaaaggcaacagaaaggagaagcataagcaatagtattttgggaagctataacacgcgacttgcctccctgttcacctttgtattctcagcacctagaatagttctggtacaaaataagttcacagtaaatggttgtcaaatgaataaattaattattatatctttaaatagtaactattgtttttaccctctaacatatttcagagaaatgcttagtgctacaagaaagtaaagtttgctttctaaggtatgattgactggagtaagaatcaattttcctcacaaaaccaggtacaaaataaaagagtcaactagccaaaagaccactttaccatggtcacccaatgtttagtttaagagccagaagcttttaacctccggtacaaattctgtcctaagttttggccgaaacaacctaagactcagcagtatccctttgccatagagatgcaaggctggattagattcaagcaccatcgaagccaaagacaccccaagccagtgatgtgctgtgggttgtttggaaatgtcgattagataaggctcatggtatgattcagagctccaaggacagttcttgttcaggtttcaactaatcaacatcggattatgcacacctcaacatctgaaatatgcagacatttgagacaaataccagaattgtgtcttcttgctttgtacaaatcatgcttcagtctggcaataagcatgtggcaaactgatgaaaatcacaggcccagttacagtcaagacatctggaacccgatttggtgcttggatgacagaccctttagcatctgagaaaaacaacagagtctggtacatggacagttatactaacaataaaattgttcgtgaatacaaatcaattgcagactttgtcagtggggctgaatcaaggacatacaaccttcctttcaagtgggcaggaactaaccatgttgtctacaatggctcactctattttaacaagtatcagagtaatatcatcatcaaatacagctttgatatggggagagtgcttgcccaacgaagcctggagtatgctggttttcataatgtttacccctacacatggggtggattctctgacatcgacctaatggctgatgaaatcgggctgtgggctgtgtatgcaactaaccagaatgcaggcaatattgtcatcagccaacttaaccaagataccttggaggtgatgaagagctggagcactggctaccccaagagaagtgcaggggaatctttcatgatctgtgggacactgtatgtcaccaactcccacttaactggagccaaggtgtattattcctattccaccaaaacctccacatatgagtacacagacattcccttccataaccaatactttcacatatccatgcttgactacaatgcaagagatcgagctctctatgcctggaacaatggccaccaggtgctgttcaatgtcacccttttccatatcatcaagacagaggatgacacataggcaaatgtgacatgttttcattgatttaaacagtgtgatttgtgataaactctataagaccccttccgtttttttcttcactattatttttcatcatttctccaaagcaaagcatttttattgtaaagttggtgtttcaaaaacatagctgagcttgtctaacttaccatgttggaaacacatcttaacttctaaatttacaaggcctatcatgtccttgtcatgaaaagcactaaaaaaaaaaagagtttaagtggctaaagtcatagttttgcaagagattaatgatctgccttatattagagtcagagactaatggtggcttaaatgcacgaatgtctttttttttaaaactgtcattttttactgtcttttgctccatatcaggaaatattttggtaggaattaggagaacaaaaagcacttttatcccatttatttctttaaaaaatgtaaggatttcatttatattgaaaaataatattaatcattttgctgttaacacaattctctgatgcggtgctgtacagtcatttttaaatctcttgctaacattttattggcagtatgtatttctaccattgtaaccaccattgtgctattgtatctcttcacttctgtgaaagtaatattttttataaaatacactgaaatttaacctcagtaattgagtccattttcaagtgtggtcaagaataatcttcttggcttacccctttacataagcattataaactaaaatgaaaaccaaa

SEQ ID NO: 14504 - DNA, 817 bp, Homo sapiens
  source 1..817: mol_type = unassigned DNA
cgataaacatcttgtgatgatgaagaggattatttaactgtaaagctgaagcttctctgagacaagggatatgaagaagcagaaggaggaaagcaggaggaggagaatggaggggaaaggtagaaatcacaagggctgaataaattcatggtttataaaggaggcattccaagcaggaaaaatgaaatgagcgacataaaaagacatgaatcaacatggcatgcttgcacgacgcacacagaccgatttggttaaaggtttctgttggatggtacagaagataaatctagaagcataaattgcagaaaaactacagtagaactggaataccaccccttcacacttgagttctaagaagactcagattagtcctaaagaagggtggcaggtgtacagctcagctcaggatcctgatgggcggtgcatttgcacagttgttgctccagaacaaaacctgtgttcccgggatgccaaaagcaggcaacttcgccaactactggaaaaggttcagaacatgtcccagtctattgaagtcttaaacttgagaactcagagagatttccaatatgttttaaaaatggaaacccaaatgaaagggctgaaggcaaaatttcggcagattgaagatgatcgaaagacacttatgaccaagcattttcaggagttgaaagagaaaatggacgagctcctgcctttgatccccgtgctggaacagtacaaaacagatgctaagttaatcacccagttcaaggaggaaataaggaatctgtctgctgtcctcactggtattcaggaggaaattggtgcctatgactac

SEQ ID NO: 14505 - DNA, 2801 bp, Homo sapiens
  source 1..2801: mol_type = unassigned DNA
tcagactcagattagtcctaaagaagggtggcaggtgtacagctcagctcaggatcctgatgggcggtgcatttgcacagttgttgctccagaacaaaacctgtgttcccgggatgccaaaagcaggcaacttcgccaactactggaaaaggttcagaacatgtcccagtctattgaagtcttaaacttgagaactcagagagatttccaatatgttttaaaaatggaaacccaaatgaaagggctgaaggcaaaatttcggcagattgaagatgatcgaaagacacttatgaccaagcattttcaggagttgaaagagaaaatggacgagctcctgcctttgatccccgtgctggaacagtacaaaacagatgctaagttaatcacccagttcaaggaggaaataaggaatctgtctgctgtcctcactggtattcaggaggaaattggtgcctatgactacgaggaactacaccaaagagtgctgagcttggaaacaagacttcgtgactgcatgaaaaagctaattgatttaaaaaagagaaaagaagaagaaaaaaggcaacagaaaggagaagcataagcaatagtattttgggaagctataacacgcgacttgcctccctgttcacctttgtattctcagcacctagaatagttctggtacaaaataagttcacagtaaatggttgtcaaatgaataaattaattattatatctttaaatagtaactattgtttttaccctctaacatatttcagagaaatgcttagtgctacaagaaagtaaagtttgctttctaaggtatgattgactggagtaagaatcaattttcctcacaaaaccaggtacaaaataaaagagtcaactagccaaaagaccactttaccatggtcacccaatgtttagtttaagagccagaagcttttaacctccggtacaaattctgtcctaagttttggccgaaacaacctaagactcagcagtatccctttgccatagagatgcaaggctggattagattcaagcaccatcgaagccaaagacaccccaagccagtgatgtgctgtgggttgtttggaaatgtcgattagataaggctcatggtatgattcagagctccaaggacagttcttgttcaggtttcaactaatcaacatcggattatgcacacctcaacatctgaaatatgcagacatttgagacaaataccagaattgtgtcttcttgctttgtacaaatcatgcttcagtctggcaataagcatgtggcaaactgatgaaaatcacaggcccagttacagtcaagacatctggaacccgatttggtgcttggatgacagaccctttagcatctgagaaaaacaacagagtctggtacatggacagttatactaacaataaaattgttcgtgaatacaaatcaattgcagactttgtcagtggggctgaatcaaggacatacaaccttcctttcaagtgggcaggaactaaccatgttgtctacaatggctcactctattttaacaagtatcagagtaatatcatcatcaaatacagctttgatatggggagagtgcttgcccaacgaagcctggagtatgctggttttcataatgtttacccctacacatggggtggattctctgacatcgacctaatggctgatgaaatcgggctgtgggctgtgtatgcaactaaccagaatgcaggcaatattgtcatcagccaacttaaccaagataccttggaggtgatgaagagctggagcactggctaccccaagagaagtgcaggggaatctttcatgatctgtgggacactgtatgtcaccaactcccacttaactggagccaaggtgtattattcctattccaccaaaacctccacatatgagtacacagacattcccttccataaccaatactttcacatatccatgcttgactacaatgcaagagatcgagctctctatgcctggaacaatggccaccaggtgctgttcaatgtcacccttttccatatcatcaagacagaggatgacacataggcaaatgtgacatgttttcattgatttaaacagtgtgatttgtgataaactctataagaccccttccgtttttttcttcactattatttttcatcatttctccaaagcaaagcatttttattgtaaagttggtgtttcaaaaacatagctgagcttgtctaacttaccatgttggaaacacatcttaacttctaaatttacaaggcctatcatgtccttgtcatgaaaagcactaaaaaaaaaaagagtttaagtggctaaagtcatagttttgcaagagattaatgatctgccttatattagagtcagagactaatggtggcttaaatgcacgaatgtctttttttttaaaactgtcattttttactgtcttttgctccatatcaggaaatattttggtaggaattaggagaacaaaaagcacttttatcccatttatttctttaaaaaatgtaaggatttcatttatattgaaaaataatattaatcattttgctgttaacacaattctctgatgcggtgctgtacagtcatttttaaatctcttgctaacattttattggcagtatgtatttctaccattgtaaccaccattgtgctattgtatctcttcacttctgtgaaagtaatattttttataaaatacactgaaatttaacctcagtaattgagtccattttcaagtgtggtcaagaataatcttcttggcttacccctttacataagcattataaactaaaatgaaaaccaaa

SEQ ID NO: 14506 - DNA, 2277 bp, Homo sapiens
  source 1..2277: mol_type = unassigned DNA
atcgtttccccgcgcgcaggtccgcggggaggggcggcctgccgaccggcccaccccagggcgttcctgaagggcgtcctcggccgcccccaccgcctcccagatgtactatgcggtttcccaggcgcgcgtgaacgcggtccccgggaccatgctgcggccacagcggcccggagacttgcagctcggggcctccctctacgagctggtgggctacaggcagccgccctcctcctcctcctcctccacctcctccacctcctccacttcctcctcctccacgacggcccccctcctccccaaggctgcgcgcgagaagccggaggcgccggccgagcctccaggccccgggcccgggtcaggcgcgcacccgggcggcagcgcccggccggacgccaaggaggagcagcagcagcagctgcggcgcaagatcaacagccgcgagcggaagcgcatgcaggacctgaacctggccatggacgccctgcgcgaggtcatcctgccctactcagcggcgcactgccagggcgcgcccggccgcaagctctccaagatagccacgctgctgctcgcccgcaactacatcctactgctgggcagctcgctgcaggagctgcgccgcgcgctgggcgagggcgccgggcccgccgcgccgcgcctgctgctggccgggctgcccctgctcgccgccgcgcccggctccgtgctgctggcgcccggcgccgtaggaccccccgacgcgctgcgccccgccaagtacctgtcgctggcgctggacgagccgccgtgcggccagttcgctctccccggcggcggcgcaggcggccccggcctctgcacctgcgccgtgtgcaagttcccgcacctggtcccggccagcctgggcctggccgccgtgcaggcgcaattctccaagtgagggcgggcctgggcctggggcgcgacctcggcccggcctcccttcgctcagcttctccgcgcccctgctccctgcgtctgggagagcgaggccgagcaaggaaagcatttcgaaccttccagtccagaggaagggactgtcgggcacccccttccccgcccccacccctgggacgttaaagtgaccagagcggatgttcgatggcgcctcggggcagtttggggttctgggtcggttccagcggctttaggcagaaagtgctcgctctcacccagcacatctctctccttgtccctggagttgcgcgcttcgcggggccgatgtagaacttagggcgccttgccgtggttggcgcgccccgggtgcagcgagaggccatccccgagcgctacctccccggagcggagcacgccggctcccagtactaggggctgcgctcgagcagtggcgggggcggaggggtggttcttttccttctcctccgccagaggccacgggcgcccttgttcccgccggccaggtcctatcaaaggaggctgccggaactcaagaggcagaaaaagaccagttaggcggtgcagacggtctgggacgtggcagacggacggaccctcggcggacaggtggtcggcgtcggggtgcggtgggtaggggcgaggacaacgcagggtgcgctgggttgggacgtgggtccacttttgtagaccagctgtttggagagctgtatttaagactcgcgtatccagtgttttgtcgcagagagttttcgctcttaaatcctgggggtttcttagaaagcaacttagaactcgagattcacctttcgtttccctttccccaaaagtagcgtaaccaacatttaagcttgcttaaaaacgaaaaccaaccgccttgcatccagtgttcccgatttactaaaataggtaaccaggcgtctcacagtcgccgtcctgtcaagagcgctaatgaacgttctcattaacacgcaggagtaccgggagccctgaaccgcccgctgctcggcggatcccagctgcggtggcgacggcgggaaggcgctttccgctgttcctcagcgggccgggcccttgaccagcgcggcccgcaggtcttccttctcgccgtcttgcagttgaagagctacatacgtagtcagtttcgatttgttacagacgttaacaaattcctttacccaaggttatgctatgacctttccgcagtttactttgattttctatgtttaaggttttggttgttggtagtagccgaatttaactggcactttattttacttctaaccttgtttcctgacggtgtacagaatcaacaaaataaaacatttaaagtctgatttttta

SEQ ID NO: 14507 - DNA, 1083 bp, Homo sapiens
  source 1..1083: mol_type = unassigned DNA
gcggccccggcctctgcacctgcgccgtgtgcaagttcccgcacctggtcccggccagcctgggcctggccgccgtgcaggcgcaattctccaagtgagggcgggcctgggcctggggcgcgacctcggcccggcctcccttcgctcagcttctccgcgcccctgctccctgcgtctgggagagcgaggccgagcaaggaaagcatttcgaaccttccagtccagaggaagggactgtcgggcacccccttccccgcccccacccctgggacgttaaagtgaccagagcggatgttcgatggcgcctcggggcagtttggggttctgggtcggttccagcggctttaggcagaaagtgctcgctctcacccagcacatctctctccttgtccctggagttgcgcgcttcgcggggccgatgtagaacttagggcgccttgccgtggttggcgcgccccgggtgcagcgagaggccatccccgagcgctacctccccggagcggagcacgccggctcccagtactaggggctgcgctcgagcagtggcgggggcggaggggtggttcttttccttctcctccgccagaggccacgggcgcccttgttcccgccggccaggtcctatcaaaggaggctgccggaactcaagaggcagaaaaagaccagttaggcggtgcagacggtctgggacgtggcagacggacggaccctcggcggacaggagtaccgggagccctgaaccgcccgctgctcggcggatcccagctgcggtggcgacggcgggaaggcgctttccgctgttcctcagcgggccgggcccttgaccagcgcggcccgcaggtcttccttctcgccgtcttgcagttgaagagctacatacgtagtcagtttcgatttgttacagacgttaacaaattcctttacccaaggttatgctatgacctttccgcagtttactttgattttctatgtttaaggttttggttgttggtagtagccgaatttaactggcactttattttacttctaaccttgtttcctgacggtgtacagaatcaacaaaataaaacatttaaagtctga

SEQ ID NO: 14508 - DNA, 400 bp, Homo sapiens
  source 1..400: mol_type = unassigned DNA
cggaccctcggcggacaggtggtcggcgtcggggtgcggagtaccgggagccctgaaccgcccgctgctcggcggatcccagctgcggtggcgacggcgggaaggcgctttccgctgttcctcagcgggccgggcccttgaccagcgcggcccgcaggtcttccttctcgccgtcttgcagttgaagagctacatacgtagtcagtttcgatttgttacagacgttaacaaattcctttacccaaggttatgctatgacctttccgcagtttactttgattttctatgtttaaggttttggttgttggtagtagccgaatttaactggcactttattttacttctaaccttgtttcctgacggtgtacagaatcaacaaaataaaacatttaaagtctga

SEQ ID NO: 14509 - DNA, 2578 bp, Homo sapiens
  source 1..2578: mol_type = unassigned DNA
gcacattgttccccgcccccgcccccgccaccgctgccgccgtcgccgctgccaccgggctataaaaaccggccgagcccctaaaggtgcggatgcttattatagatcgacgcgacaccagcgcccggtgccaggttctcccctgaggcttttcggagcgagctcctcaaatcgcatccagattttcgggtccgagggaaggaggaccctgcgaaagctgcgacgactatcttcccctggggccatggactcggacgccagcctggtgtccagccgcccgtcgtcgccagagcccgatgacctttttctgccggcccggagtaagggcagcagcggcagcgccttcactgggggcaccgtgtcctcgtccaccccgagtgactgcccgccggagctgagcgccgagctgcgcggcgctatgggctctgcgggcgcgcatcctggggacaagctaggaggcagtggcttcaagtcatcctcgtccagcacctcgtcgtctacgtcgtcggcggctgcgtcgtccaccaagaaggacaagaagcaaatgacagagccggagctgcagcagctgcgtctcaagatcaacagccgcgagcgcaagcgcatgcacgacctcaacatcgccatggatggcctccgcgaggtcatgccgtacgcacacggcccttcggtgcgcaagctttccaagatcgccacgctgctgctggcgcgcaactacatcctcatgctcaccaactcgctggaggagatgaagcgactggtgagcgagatctacgggggccaccacgctggcttccacccgtcggcctgcggcggcctggcgcactccgcgcccctgcccgccgccaccgcgcacccggcagcagcagcgcacgccgcacatcaccccgcggtgcaccaccccatcctgccgcccgccgccgcagcggctgctgccgccgctgcagccgcggctgtgtccagcgcctctctgcccggatccgggctgccgtcggtcggctccatccgtccaccgcacggcctactcaagtctccgtctgctgccgcggccgccccgctggggggcgggggcggcggcagtggggcgagcgggggcttccagcactggggcggcatgccctgcccctgcagcatgtgccaggtgccgccgccgcaccaccacgtgtcggctatgggcgccggcagcctgccgcgcctcacctccgacgccaagtgagccgactggcgccggcgcgttctggcgacaggggagccaggggccgcggggaagcgaggactggcctgcgctgggctcgggagctctgtcgcgaggaggggcgcaggaccatggactgggggtggggcatggtggggattccagcatctgcgaacccaagcaatgggggcgcccacagagcagtggggagtgaggggatgttctctccgggacctgatcgagcgctgtctggctttaacctgagctggtccagtagacatcgttttatgaaaaggtaccgctgtgtgcattcctcactagaactcatccgacccccgacccccacctccgggaaaagattctaaaaacttctttccctgagagcgtggcctgacttgcagactcggcttgggcagcacttcggggggggagggggtgttatgggagggggacacattggggccttgctcctcttcctcctttcttggcgggtgggagactccgggtagccgcactgcagaagcaacagcccgaccgcgccctccagggtcgtccctggcccaaggccaggggccacaagttagttggaagccggcgttcggtatcagaagcgctgatggtcatatccaatctcaatatctgggtcaatccacaccctcttagaactgtggccgttcctccctgtctctcgttgatttgggagaatatggttttctaataaatctgtggatgttccttcttcaacagtatgagcaagtttatagacattcagagtagaaccacttgtggattggaataacccaaaactgccgatttcaggggcgggtgcattgtagttattattttaaaatagaaactaccccaccgactcatctttccttctctaagcacaaagtgatttggttattttggtacctgagaacgtaacagaattaaaaggcagttgctgtggaaacagtttgggttatttgggggttctgttggctttttaaaattttcttttttggatgtgtaaatttatcaatgatgaggtaagtgcgcaatgctaagctgtttgctcacgtgactgccagccccatcggagtctaagccggctttcctctattttggtttatttttgccacgtttaacacaaatggtaaactcctccacgtgcttcctgcgttccgtgcaagccgcctcggcgctgcctgcgttgcaaactgggctttgtagcgtctgccgtgtaacacccttcctctgatcgcaccgcccctcgcagagagtgtatcatctgttttatttttgtaaaaacaaagtgctaaataatatttattacttgtttggttgcaaaaacggaataaatgactgagtgttgagattttaaataaaatttaaagtaaa

SEQ ID NO: 14510 - DNA, 575 bp, Homo sapiens
  source 1..575: mol_type = unassigned DNA
ggatgcttattatagatcgacgcgacaccagcgcccggtgccaggttctcccctgaggcttttcggagcgagctcctcaaatcgcatccagagtaagtgtccccgccccacagcagccgcagcctagatcccagggacagactctcctcaactcggctgtgacccagaatgctccgatacagggggtctggatccctactctgcgggccatttctccagagcgactttgctcttctgtcctccccacactcaccgctgcatctccctcaccaaaagcgagaagtcggagcgacaacagctctttctgcccaagccccagtcagctgttttcgggtccgagggaaggaggaccctgcgaaagctgcgacgactatcttcccctggggccatggactcggacgccagcctggtgtccagccgcccgtcgtcgccagagcccgatgacctttttctgccggcccggagtaagggcagcagcggcagcgccttcactgggggcaccgtgtcctcgtccaccccgagtgactgcccgccggagctgagcgccgagctgcgcggcgctatgggctctgcgg

SEQ ID NO: 14511 - DNA, 3262 bp, Homo sapiens
  source 1..3262: mol_type = unassigned DNA
ggatgcttattatagatcgacgcgacaccagcgcccggtgccaggttctcccctgaggcttttcggagcgagctcctcaaatcgcatccagagtaagtgtccccgccccacagcagccgcagcctagatcccagggacagactctcctcaactcggctgtgacccagaatgctccgatacagggggtctggatccctactctgcgggccatttctccagagcgactttgctcttctgtcctccccacactcaccgctgcatctccctcaccaaaagcgagaagtcggagcgacaacagctctttctgcccaagccccagtcagctggtgagctccccgtggtctccagatgcagcacatggactctgggccccgcgccggctctgggtgcatgtgcgtgtgcgtgtgtttgctgcgtggtgtcgatggagataaggtggatccgtttgaggaaccaaatcattagttctctatctagatctccattctccccaaagaaaggccctcacttcccactcgtttattccagcccgggggctcagttttcccacacctaactgaaagcccgaagcctctagaatgccacccgcaccccgagggtcaccaacgctccctgaaataacctgttgcatgagagcagaggggagatagagagagcttaattataggtacccgcgtgcagctaaaaggagggccagagatagtagcgagggggacgaggagccacgggccacctgtgccgggaccccgcgctgtggtactgcggtgcaggcgggagcagcttttctgtctctcactgactcactctctctctctctccctctctctctctctcattctctctcttttctcctcctctcctggaagttttcgggtccgagggaaggaggaccctgcgaaagctgcgacgactatcttcccctggggccatggactcggacgccagcctggtgtccagccgcccgtcgtcgccagagcccgatgacctttttctgccggcccggagtaagggcagcagcggcagcgccttcactgggggcaccgtgtcctcgtccaccccgagtgactgcccgccggagctgagcgccgagctgcgcggcgctatgggctctgcgggcgcgcatcctggggacaagctaggaggcagtggcttcaagtcatcctcgtccagcacctcgtcgtctacgtcgtcggcggctgcgtcgtccaccaagaaggacaagaagcaaatgacagagccggagctgcagcagctgcgtctcaagatcaacagccgcgagcgcaagcgcatgcacgacctcaacatcgccatggatggcctccgcgaggtcatgccgtacgcacacggcccttcggtgcgcaagctttccaagatcgccacgctgctgctggcgcgcaactacatcctcatgctcaccaactcgctggaggagatgaagcgactggtgagcgagatctacgggggccaccacgctggcttccacccgtcggcctgcggcggcctggcgcactccgcgcccctgcccgccgccaccgcgcacccggcagcagcagcgcacgccgcacatcaccccgcggtgcaccaccccatcctgccgcccgccgccgcagcggctgctgccgccgctgcagccgcggctgtgtccagcgcctctctgcccggatccgggctgccgtcggtcggctccatccgtccaccgcacggcctactcaagtctccgtctgctgccgcggccgccccgctggggggcgggggcggcggcagtggggcgagcgggggcttccagcactggggcggcatgccctgcccctgcagcatgtgccaggtgccgccgccgcaccaccacgtgtcggctatgggcgccggcagcctgccgcgcctcacctccgacgccaagtgagccgactggcgccggcgcgttctggcgacaggggagccaggggccgcggggaagcgaggactggcctgcgctgggctcgggagctctgtcgcgaggaggggcgcaggaccatggactgggggtggggcatggtggggattccagcatctgcgaacccaagcaatgggggcgcccacagagcagtggggagtgaggggatgttctctccgggacctgatcgagcgctgtctggctttaacctgagctggtccagtagacatcgttttatgaaaaggtaccgctgtgtgcattcctcactagaactcatccgacccccgacccccacctccgggaaaagattctaaaaacttctttccctgagagcgtggcctgacttgcagactcggcttgggcagcacttcggggggggagggggtgttatgggagggggacacattggggccttgctcctcttcctcctttcttggcgggtgggagactccgggtagccgcactgcagaagcaacagcccgaccgcgccctccagggtcgtccctggcccaaggccaggggccacaagttagttggaagccggcgttcggtatcagaagcgctgatggtcatatccaatctcaatatctgggtcaatccacaccctcttagaactgtggccgttcctccctgtctctcgttgatttgggagaatatggttttctaataaatctgtggatgttccttcttcaacagtatgagcaagtttatagacattcagagtagaaccacttgtggattggaataacccaaaactgccgatttcaggggcgggtgcattgtagttattattttaaaatagaaactaccccaccgactcatctttccttctctaagcacaaagtgatttggttattttggtacctgagaacgtaacagaattaaaaggcagttgctgtggaaacagtttgggttatttgggggttctgttggctttttaaaattttcttttttggatgtgtaaatttatcaatgatgaggtaagtgcgcaatgctaagctgtttgctcacgtgactgccagccccatcggagtctaagccggctttcctctattttggtttatttttgccacgtttaacacaaatggtaaactcctccacgtgcttcctgcgttccgtgcaagccgcctcggcgctgcctgcgttgcaaactgggctttgtagcgtctgccgtgtaacacccttcctctgatcgcaccgcccctcgcagagagtgtatcatctgttttatttttgtaaaaacaaagtgctaaataatatttattacttgtttggttgcaaaaacggaataaatgactgagtgttgagattttaaataaaatttaaagtaaa

SEQ ID NO: 14512 - DNA, 2578 bp, Homo sapiens; identical to SEQ ID NO: 14509
  source 1..2578: mol_type = unassigned DNA

SEQ ID NO: 14513 - DNA, 575 bp, Homo sapiens; identical to SEQ ID NO: 14510
  source 1..575: mol_type = unassigned DNA

SEQ ID NO: 14514 - DNA, 3262 bp, Homo sapiens; identical to SEQ ID NO: 14511
  source 1..3262: mol_type = unassigned DNA

SEQ ID NO: 14515 - DNA, 2092 bp, Homo sapiens
  source 1..2092: mol_type = unassigned DNA
ccccacagtgagaggaaggaaggcaacagtcgccagcagccgatgtgaagaccggactccgtgcgcccctcgccgcctctgcctggccacatcgatgttgtgtccgccgcctgctcgcccggatcacgatgaacgcgcagctgaccatggaagcgatcggcgagctgcacggggtgagccatgagccggtgcccgcccctgccgacctgctgggcggcagcccccacgcgcgcagctccgtggcgcaccgcggcagccacctgccccccgcgcacccgcgctccatgggcatggcgtccctgctggacggcggcagcggcggcggagattaccaccaccaccaccgggcccctgagcacagcctggccggccccctgcatcccaccatgaccatggcctgcgagactcccccaggtatgagcatgcccaccacctacaccaccttgacccctctgcagccgctgcctcccatctccacagtctcggacaagttcccccaccatcaccaccaccaccatcaccaccaccacccgcaccaccaccagcgcctggcgggcaacgtgagcggtagcttcacgctcatgcgggatgagcgcgggctggcctccatgaataacctctataccccctaccacaaggacgtggccggcatgggccagagcctctcgcccctctccagctccggtctgggcagcatccacaactcccagcaagggctcccccactatgcccacccgggggccgccatgcccaccgacaagatgctcacccccaacggcttcgaagcccaccacccggccatgctcggccgccacggggagcagcacctcacgcccacctcggccggcatggtgcccatcaacggccttcctccgcaccatccccacgcccacctgaacgcccagggccacgggcaactcctgggcacagcccgggagcccaacccttcggtgaccggcgcgcaggtcagcaatggaagtaattcagggcagatggaagagatcaataccaaagaggtggcgcagcgtatcaccaccgagctcaagcgctacagcatcccacaggccatcttcgcgcagagggtgctctgccgctcccaggggaccctctcggacctgctgcgcaaccccaaaccctggagcaaactcaaatccggccgggagaccttccggaggatgtggaagtggctgcaggagccggagttccagcgcatgtccgcgctccgcttagcagcatgcaaaaggaaagaacaagaacatgggaaggatagaggcaacacacccaaaaagcccaggttggtcttcacagatgtccagcgtcgaactctacatgcaatattcaaggaaaataagcgtccatccaaagaattgcaaatcaccatttcccagcagctggggttggagctgagcactgtcagcaacttcttcatgaacgcaagaaggaggagtctggacaagtggcaggacgagggcagctccaattcaggcaactcatcttcttcatcaagcacttgtaccaaagcatgaaggaagaaccacaaactaaaacctcggtggaaaagctttaaattaaaaaaaatttttaaaagaccaggacctcaagatagcaggtttatacttagaaatatttgaagaaaaaaaagcgttatttatagtccaaagaaaccaaagacttagctcacctgcattctgactttgtttggagacacacacttcagcagggcggcgacttggcaagacaaatgatgagcaggaaaacaccactggatctcacaccttcaatccatgaccatcctcgctgtgcttggctgtttagtggtttggagcatagtgattttgagccattgagcggacatcttttaagatcgaactttctcatctgttctaccatgccacgaaggtgtatggtgtctcagtactaccaccaccagtggttacagacttaggcagagctggtcttcagaaatggttgttctataggagtgcaaccaacatggtatggggttgtctgagttcattggattaggagtgtgattttgctcgtctagcctaacgtttgaacctgccaggcccgcaacctaaatgcagattca

SEQ ID NO: 14516 - DNA, 583 bp, Homo sapiens
  source 1..583: mol_type = unassigned DNA
ttaattatgagctgagcgggagaaggagccaggcggcgggggacagtgagcatgcaaaaggaaagaacaagaacatgggaaggatagaggcaacacacccaaaaagcccaggttggtcttcacagatgtccagcgtcgaactctacatgcaatattcaaggaaaataagcgtccatccaaagaattgcaaatcaccatttcccagcagctggggttggagctgagcactgtcagcaacttcttcatgaacgcaagaaggaggagtctggacaagtggcaggacgagggcagctccaattcaggcaactcatcttcttcatcaagcacttgtaccaaagcatgaaggaagaaccacaaactaaaacctcggtggaaaagctttaaattaaaaaaaatttttaaaagaccaggacctcaagatagcaggtttatacttagaaatatttgaagaaaaaaaagcgttatttatagtccaaagaaaccaaagacttagctcacctgcattctgactttgtttggagacacacacttcagcagggcggcgacttggcaagacaaatgatgagcaggaaaacaccactgg

SEQ ID NO: 14517 - DNA, 996 bp, Homo sapiens
  source 1..996: mol_type = unassigned DNA
ggtcccttgccttgaggggggcccaagggctcagatcttcccataccttcaggcattggcattctgatctgcacttggacagcaattacacttcttggctccacatcagtgcctgccttgctatttcaaagattgcctgtaactcaaattttagggctctgcactaaaaagtaataaattgaccaaaacagagtatataggctgggagttgtctagagggcatcttgcaatttctgtcaaacactgcatgtttccagtcaccatgtgtttctcatcttcctttgcatatgccgccacgggatattcagaatcgacggtttctgaaatcactgctttcgttttcacatctggtgatgatctcatagtcccaaagagaggttatcgaaggaacgcaataaactatgtgctttttgctttctttcctgttgtcttctaaaacagatcaatggggaaaattaaataaacaaacgagcgaagcgcgccacctagtgacctctgtgctcgctgcagattctgcgactgaagtgcgtgagaggagtggctaaagcgattcgagtattgatggagtcacaaaaatcgttcattaagcatgcaaaaggaaagaacaagaacatgggaaggatagaggcaacacacccaaaaagcccaggttggtcttcacagatgtccagcgtcgaactctacatgcaatattcaaggaaaataagcgtccatccaaagaattgcaaatcaccatttcccagcagctggggttggagctgagcactgtcagcaacttcttcatgaacgcaagaaggaggagtctggacaagtggcaggacgagggcagctccaattcaggcaactcatcttcttcatcaagcacttgtaccaaagcatgaaggaagaaccacaaactaaaacctcggtggaaaagctttaaattaaaaaaaatttttaaaagaccaggacctcaagatagcaggtttatacttagaaatatttgaagaaaaaaaa

SEQ ID NO: 14518 - DNA, 1638 bp, Homo sapiens
  source 1..1638: mol_type = unassigned DNA
cctctataccccctaccacaaggacgtggccggcatgggccagagcctctcgcccctctccagctccggtctgggcagcatccacaactcccagcaagggctcccccactatgcccacccgggggccgccatgcccaccgacaagatgctcacccccaacggcttcgaagcccaccacccggccatgctcggccgccacggggagcagcacctcacgcccacctcggccggcatggtgcccatcaacggccttcctccgcaccatccccacgcccacctgaacgcccagggccacgggcaactcctgggcacagcccgggagcccaacccttcggtgaccggcgcgcaggccatcttcgcgcagagggtgctctgccgctcccaggggaccctctcggacctgctgcgcaaccccaaaccctggagcaaactcaaatccggccgggagaccttccggaggatgtggaagtggctgcaggagccggagttccagcgcatgtccgcgctccgcttagcagggacagcgagggaagctcgtacggcctgaggcggagagaaatccccgcacctggtgagacactctgcgccacctctcagttcagcgatccgggtttgggaagagggatgcaacgcgtgcgtggaatcgcacgcaaatgttcctcgcaggtacctctgacacatcccaggcgctgggctggagcgtgccggagcagcgtcgatgtttggccgaactggctgctgtgaccccctcccgcgctcattcttttggcgctggctggggtgacctcaatctaagagtatgggcaaaaagtttcagagccattgggcggtgggtgtgtagcacagacgagttgtaagggttaggacgctctctgcgcatggaattggctgtggaaaggagagggaggctgaccgtcccaaggtcccagtgagagctgcaaagcaatagccatgtcctgggaccgactccgctgccgactccctgaggactttgcattttgttttattattcctcttcgcgattttcgtctgaatccccgtgcgggaggggggtttggggatgagagtgtgtaaatgacccccaagtctaggagcagaggtctcctgcccgaaaccccaagccccaggtgtttctgagttcagctggaagctctccttggcgcagcgcagacaccgcgcctggctccccgagaccgcggataggcagagaagaaagctgagcccagcccgaaccccaccggggatttcaggaggattcggcgacccttgaggctcttgtgctaccggcaccatatctccacccgtgggctgcccgcgagcaactgaggttccggagggagtgggcgaaggggctgctcctcgtcctgactgctccgtctctccagagcccaagcgggagagtggtggcttctccacgcccctctgtcctccagttgccggcagcctgttgcagagggtcaaaaccctcttgcacgtggcgctgtgtttggggaggcgccttccggtcacgaaataacagcggctggtggaagaagggcgacaggaggaaattcccaccaaattaactaccttttaaaaatcaatatatgttccctccatgtactacttgctgctgccccattaaagagcagagcgaca

SEQ ID NO: 14519 - DNA, 16121 bp, Homo sapiens
  source 1..16121: mol_type = unassigned DNA
gcccccgccgcccccgggccctgatggactgaatgaaggctgcctacaccgcctatcgatgcctcaccaaagacctagaaggctgcgccatgaacccggagctgacaatggaaagtctgggcactttgcacgggccggccggcggcggcagtggcgggggcggcggcgggggcggcgggggcggcggcgggggcccgggccatgagcaggagctgctggccagccccagcccccaccacgcgggccgcggcgccgctggctcgctgcggggccctccgccgcctccaaccgcgcaccaggagctgggcacggcggcagcggcggcagcggcggcgtcgcgctcggccatggtcaccagcatggcctcgatcctggacggcggcgactaccggcccgagctctccatcccgctgcaccacgccatgagcatgtcctgcgactcgtctccgcctggcatgggcatgagcaacacctacaccacgctgacaccgctccagccgctgccacccatctccaccgtgtctgacaagttccaccaccctcacccgcaccaccatccgcaccaccaccaccaccaccaccaccagcgcctgtccggcaacgtcagcggcagcttcaccctcatgcgcgacgagcgcgggctcccggccatgaacaacctctacagtccctacaaggagatgcccggcatgagccagagcctgtccccgctggccgccacgccgctgggcaacgggctaggcggcctccacaacgcgcagcagagtctgcccaactacggtccgccgggccacgacaaaatgctcagccccaacttcgacgcgcaccacactgccatgctgacccgcggtgagcaacacctgtcccgcggcctgggcaccccacctgcggccatgatgtcgcacctgaacggcctgcaccacccgggccacactcagtctcacgggccggtgctggcacccagtcgcgagcggccaccctcgtcctcatcgggctcgcaggtggccacgtcgggccagctggaagaaatcaacaccaaagaggtggcccagcgcatcacagcggagctgaagcgctacagtatcccccaggcgatctttgcgcagagggtgctgtgccggtctcaggggactctctccgacctgctccggaatccaaaaccgtggagtaaactcaaatctggcagggagaccttccgcaggatgtggaagtggcttcaggagcccgagttccagcgcatgtccgccttacgcctggcagcgtgcaaacgcaaagagcaagaaccaaacaaagacaggaacaattcccagaagaagtcccgcctggtgttcactgacctccaacgccgaacactcttcgccatcttcaaggagaacaaacgcccgtcaaaggagatgcagatcaccatttcccagcagctgggcctggagctcacaaccgtcagcaacttcttcatgaacgcccggcgccgcagcctggagaagtggcaagacgatctgagcacagggggctcctcgtccacctccagcacgtgtaccaaagcatgatggaaggactctcacttgggcacaagtcacctccaaatgaggacaacagataccaaaagaaaacaaaggaaaaagacaccggattcctagctggggcccttcactggtgatttgaaagcacaattctcttgcaaagaaacttatattctagctgtaatcataggccaggtgttcttcttttgtttttaatggctatggagtccaagtgcaagctgaaaaattaatctcttagaaccagacactgttctctgagcatgctaagcatcccagaaacccaaatggggccttcctggagcgagttaattccagtatggtgtcaaccaagctcgggattgcttaaaatatcatccatcccacttcaggtcctgtcagcttcttgcagtcagagttcctatgagtaacaataggagtttggcctatgtaaggactctgagtttaggcttccaagatacaacaataagagaagaatctagcaacgagaatgacctcatttgctttccacatgcttagcctcattataccatgttatgtccaagttcacagccacaacatcagaatggtaattactgagcacaagttttaaatatggacgttaaaaaaaaaaatccaaggacctgtttttccaacccagacatcttttcattgaatgatttagaaagctttaagttgatccagcttacaattttttttttctttacctcctggaaatctcatatggtcttggatccgtcaaaaaaaccagtcagttcacttgcgctcaaagtatcaagcacaacaaagataaacagaagtgaggaaggttctgggttcactacatctggattttcaagacacctattgtgaagtcattagggaattgatgagaatatggcttcaagcacattttgcagtttgctacaaattctgttgtacataatgcagacgcacactcaggaggccaatttaactgttaacagtgcatggagcgaatgcagcattttaaaagatctaggtttttttaggtcattaatgtgtccttggttgatcagtcatctggtccctcctactgtgtgttatgaccaccacgtaatccattctcgctctttctgatttggggtttttcctcatccatcccattagtagggatgttttctgtgttttctagcaagaaaaaaaaatcaatcaatcaaacctgcatacatgttactcatgactgtcatctagtcctaaatctcttctgttgttgaatcatccttgcaaaacagctgaatacatctggagaaaacacagcacaccaaagaagcagaatactgcaaaccaaagacatttatgacttgtcattttctagcctaaaaatactgtgattacttttagaaatcagaaaacctctgcaactccgaatggcattcagctcttgcatttggcgcatcatcgggctgagcggaccagctacaccaaggacattagccaagccacccagaggggtggctttgccacaccagttgtcaccttcccatagcaagtggaagagcgcccacagaactctgggagattgcaaaggtcacaatgtgcatatttaccagtgaatggccccgggtggggccacgtgggggtgttcaaagcaagccaaacgctgcaatcattctttacagacacttgagactgacttttttatgaattacttagtcgaaaccaaagaaactttttctgcacctacttctgcaacaaacaaaactgtcccattaaaatgaataaataaatccgtaaatcaatggaaatcaccaccaataagaaggaagcacgccagaaaataaacgaaaacaaaaacagggagacacactgtgttcaaacagacctcttgggacattttttggaagcagattttaaagaaagggttgagacaaagatagaaataaggaagagcctcagtggctgctgcttcatttgacaactcacacggtaatcttaaagctgaagattgtctttaatttgtgcctatgcagtttttcaaaagaacacggaacagagcaacagaaacctcaacagctacaataccaaagatgaggatttctcacaccttttgtttcagttcattatctcctcttgcctggctaaaatactaatagcgccattgaactgtataaaggtaatcaattatgtttctctgagcaacaaaaggaaagggccatttatttgattttattgtttcatttcaattttgtcttatggttttttgccccaacatggaatctctcaaaagtttccatggactccaagtttaagatgttgggatattgaacagttctctctgctcagcagagggtagggaataacattatcacttgaatgttctttgcttaacccttagacttggttccttctatgttcagagtctcatcatcaggggaaggaaagggagtgagggtcagggataggggtcttggtgatgcatcctctcccgagccacagaaccaaagagtttatagaggaatttacagcctcgttttcatgtgattgctacatcctaacagggcttcatttgggggtggggggaaacatgtaaaaataattgccagtttctacttttctattagctttttaaaaatcagctgtaaagttgcatttctaaagaaagatatatataatatataaaatacatatatagatcaacttgacattggtgataaccaaaattattgctgtccaaattcatgtcttgttttggtccagtgcttcatttgctaagtattcggttcagaatttttctcatttctcatgccattccagagttaatttgccactgtggatgatttgaagtattcagatctctatggaagtttctgggacaggtttaaagtcaagatcaagcattttagcatttaacctgttgataaatggatccatggtgtacatgagttttatttgtattcggagtcatctctattctatccctcagcctcgattaaggtggtgagtgaagtgcatccaacagactcggcccagaactgggtcctgacagtggggtgctcatcttctgtaactgttgggaaggctcggtggtccattttcaccagttaaagaatatgaggccagcccagaaatctgttctccaggagctgccctgtcccatctgggtgtgccagaccccctcagtgagcaggtccaccaaagggacttctcacaggggaagcccaactcctgttgcaatgggttgatagatttcctcagggtggtaattaccaattcgtattttgacaagcctatgtgcaaccacagctggcactggggtgggcagtggtgttgggtgggatgggggagagtgtctcaatcctgaagagaaaatataaagcaggttttggggagacttctggagtcctgcccctagagagccccattgttgttctttgtgccccctcctcattccccctatgtgggtctccctatgcaggagctgtgagagaatgtgactctccacaatttttataattcatccttcctaggagattgttcattggctcttcccttgtgtccctttgtcccttgctcatactccatgtttcctttgtcaaaggactaagaaaagagcatatttcagcagaggagtgttcccatgtgggttgatttcaacttgggtatttctaaaagagtccttgtgacatgtgtccagtggaaatggttgctcttttccagactggattgaggaatggagcctgtttgatttggttagtgattctttgacatactaatctcagcgtttgggtctccagcatcctctgaagatgtctagactagtagaggctgcctttgtgacctgacattacaacattggtcaaaccagtcctctgataatcagaagaacatgtcataattgtttaaaaaaaaaaaaaaggcaagaatttctctccaaggagctttaataaatgtctcattccagataatgtcataccagagaaaagtgcttgcttttagaaaattatttacatacatatataaatatatatgtgtatctatacagttatgtatcaaaattttaagccctgcagaatttcaatttgttagaaatctaacagaaaaaaatttctatattgaaaggtaatagaatttaacccagtgagtttactcaaggatttttaaatttaagttaataatttcagagaaaataaccatttgggtgtggttatagtttagtatccattacctcaatccaaggaaaattccaggcattcctcaaccatcaggaaaaggtacagtgtgaaggaacagttctcagccaaatttcacattcttgaggcaacagaaatcaaaacactcagagccattgagtggaaaaacaatttactttattcctttacacaaataggcttgcattgtttttgttttaatgtgattttggtactagggatataattatttcattccaggaaataataaaaaaaaacagacagagccaatacatttctttttttaaaggaaacagcaacaacaataaaaactcagcaccaatatttaaaagcttttccaaaatgtaaaagaagtgtttagcttgcaccatgcataaaggtgcaggctagttgaaccaggaagcatggcacttcctctggagaaatccagaaagagttgcttctaagctcccttttccccctgcaggctcttggcaattgtaggctttagcaaatccagaataattttcaattcaagctaaaataaaatcaacatttggaatgtaaatctgatacacacacacttttctaagtcaaacaacatatttcaaaaccaaaaataaataccttttagataatcagttattttctttgtctatactgggcacccacctactagtgccagtaaattcaagttgaacagatttttaaaatcactattatctgggtatgggggaaacttccccacttttgaaaatgttggtagaattataggaatgtctgtttgattatcattaccaaagtgtcatgacagtatgcctttgtagtgaactcggattttcaggagtttgaatagttggatattttaaaatctaagaagaaaaggcctgtttccaatgttgttgaagaataatgaactctattaaaaagtggagaaaaagataatacatgtggtcaaggttgaccacaaggcccaggcacaactaccttggcgataatcttctagattcgtaacaggttagagctgactttttgtttttgttgttgctgatgctgtgtgattcagacttctcagcctaaccaggaagagtaagtggaaatggtagatgaagaaggggtagagctggtgtatctataactttctgatatttgtctgccaaacttgatatattagtaatttttttatctttagctaagatcaagtcacccctgaaacaacaggagattctagttttaaaataaggccacaaaaatccttacggaatgaagaatggcaccccagttggttgtataagtctcataagataatgatgttgattttaaatatggatgtctcaatgcctgttttctatcaatgatttgtttgtttccaaggtcggggagggaaagaggggagggtttatctgttttagaaagtctcagaatacttataaaatacagaagtagttattaaaatatataggacctcacataggtagatacagaacttaccattgaggctgatgggctgttgtgtgaatcacacaggaccttaaatgaggctcattattctcacacaccaaaatgactctgacagcctgaagcagttattgctagagcccaagctttccttggaggttttggagttaggttgattggaagtaaccagctaataccttttctagtggagaaaaagacattgctaccagcttgttcatcccatagaagtcttccactctgctccatttttagcagcaagcatttcatgtagcataaaccttggcagataagtgtgcctaaggtttatacagtctgtccgcttggatgtatacaaatttagatacatattttaacatgtgttctcatagatgactttataacaacacacattacctataggtgtctagactgtgtacatacaagtgtgtacagacaagcttcatacgtatatactgtaatccgttacaacaaataaattttaaatcatcgtttaacatgtatgtggtacttctacagtgtacattgttttcattatttattgtaacattgaaaaccacagtgcagggaaaacaaaagtatcccagcatcttcatcctgtacacttggaattaatttcatttgggcatatccaagataaactcaactttcaagaaatcttgtatattatttaatcatctgtgttaggatgacacctatgattgatgacttcggttgaatagctttattctggatttttcataactaaagctaaatccaaagacctgaaaaaggacaaaaagaaaaaaaaaaaaagaaaaaacaaagaaaaagaagaaaaaataataaagtcaagcgcaaactgatggggagacagtgggctctggtttccaggattgagacaatggtactgcggtcttggggagactgcgttagctagtggggagtggtgatttttttcatgcttgtcacatctaaatggtctttaacatgagaaagttttagaggttataatttcctgctttgtttttatttagactatcaaatgaagttatacatgttgtcagtcaaaaaatgaagacaccctctgccccaccccacagaatgctttttatcttgtctctttgggttatgacccaacaagctaagtaccattaatgtaattaacttatttaaattagttcctagtacataaatgtataggatttgggtaattatttaatcatccttccttagtttgattctactccttgtacttatttatcaaaacctagaccaatggtgcatcagagatgcaaaattctacttggaatactcttgaagtttagtttgctttataaagcagtgaaattctgttacagacagggaagaaatacaggttacaaaaagagaatttgggatattcttccctcttaaattaacttttaaaatagtctaagtaacaatttttaaattatttaacttaagttcgcagccccacctggtaccaggcgaacttcacctcttaattattgtggccctcggagccttcatattgtaacttatttatttaacttattcagcatctgtgaaaggtgcactgtatagtttatatttttaatttaaaacaacagagagcactgcagtttgtttgctgtcagaacaacagagcaaattttgtggacaagcaatgactattcagcctgaacctgtgcattcagaaaacataagctgagaccctgcttcaccagcctggatttcggggcttctatacagaaactggaaaaataaattttaaaaaaatcgtaaacaaaaagagagaaacccttacactagctgcttccaagaatgaactctgtgtgtatgtaaagcaacaaaacaaaaaaggaaaaaaacaaaaagcagaaaaaagaaaaaaaaaatgaaaaactttctatttctagtgagaaccaaagaaggctacctcactgactttttccatttgtaattttaatcgtgttgatgacaccaaagataccaaagatttctttctctgtgcggtctgcattttgcttgtgctcttttataatttgaacgattttctctgacatatggtatgtacagccacagctcagataccccaaagaaataattatctatgcgacggcggctgctaatttggaaagggatattttctgtgtttctcttatatgtttgctgtctgctcgacatgttcaagatgcgagttcagatgctgctgtaattggattccttaaattctgattacaaattgaggaaggaaactggttggaaatggccttcagtcctagccatggcctctatccccgctgggacctgtcacagtaaagactgccaattactgaaccacagaagctctgaccattgagtagttgagctggaagagaccttaggaatcatttagtccaagccccggtggcccagaggaatgaaatagttatccaaatcaaataactcttgagagtgaaagcccacacatgcctcctggttcctgccccagtgctccgcttattgtacagtgctacctctgcatgagagcggtcccacattgacaaataggatggtggcaatcctttagcaatgagcagggactggggtttatctcttaacattttcagctgtaaaattagtcacaagcattttcagtgtcccattagtacatagtcacatatggtcggttgcttcgtgaaggtggcctgtcttgaaatactagggctcatacgggatttttgccctaggaaaaacatgttgatcccaatgatgtgatcacttttgaacctttccattacaaagcattgtatagataactttttaattcagtaggaggagaaagttcattcttggcctgttggctttgattattatgggtactttaaagtcagtatttatcaagaaagggaacttgaccaccattggcacatgtgacatttaagctcttcagccttttcctttttagttgtaggtgtttacatttcatttctaagccaactctgtatttatgagagaagtttaagccttacatcatttgatactaaagggttatttgtggtaaatgaaaaatgaccccaaaattacagaggaatatgccagtttaagaaatggctacttaaagttgcttctctctttccttcttactcatgaaattaattggtcttcttcaagtttctttagattccattaaatgattaaatcactattaagagccattcatcaacgtgatttgtgtgttagccaatgaatctgtctcagcttttgaccaaatgggttttagacaaatgcaaagatctgcctctagtccatatggctctttttgagtgctagtattttgcatttcacataatgtagttattttgagcttttaaagagagcatttagacaaagaagcaaagagaggaagggaccaatcaactcatcagttccatgcatcaacaaagcatagctagtagaggaatataaatgacagattgacaaactgtaggaaacactgttactctctttctgaagttttcaagcaccatcctatgtgaaagttccctcctgtccaaacaagctcaaggcccatcttctccctatacaaggcaaacctgtaaggccttccttccaaagagtacattgctttggttttcttcctaaattcctattggaattagaactctcagaatccctgggagacagagcaaagatgacttaattcattgagcagcagagctccctataagtgaacatcaccttccccatctttcctactgccacacccatacgagagaggatctagaaagagcgatggcagcctgaacacagaaaacatccccacttggcagacctctcctcagcaatccccccagcctcatgcttcacttgcaaagtgtgacataaccacgggacgagtgccttgcttgaaccaaagcaacgatttagccagtctggacctctctgtgctttttttaattcttcctgtgaatacctcagcttcaactgggcctccatacagtcagttggtgggcttattgtactgtggtgctttgcaatgcaaccctgcaaagaacaagatttgtactaataccaaaggttctttctctatgtctcctcctctgcctccctcgttcttcccttttttctagttcttcacggttccaaagctttactatgaacctgggcatgttggcaatgcagaccgcgcaattccttaccgaattttctcagatatacctcatagacaatagtgtttagagtaatgttattatagcgtatgtaataaattattcactgtttcttttggtaactgtgatttaaaaaaagaaaaaagaaaaaaaagctttatacgttttaggttgtgcttttgtaatagatgaaaaaaggtgcgcttaaaaagaaaatgtatgtttttttccccctttggattttatttatgctggattggggaaagttgcagaatgagcccaaagtttacagtttcatattttgctgaagaaacaatctgtgttcatttgctctgttgaaaagaataattattttctacatttgtgccacttggtctgaacaattaattgttccgtgttaacagtgtagtattatgattagcaactgccaatcagtgctataattttatgcatgaggctaaaaatttagcagtgtgatgcattgtggtcttaatagcaacatttttcattttgaactagatcttcccctttggttcaatggactttatttatgcatgggcgcctattgtttgttagcagttgtggaacagttgtgtatacattaaactgtgaaaatgtacacagttcagcctcagacggtggtaatattggttttattgggagatgtgtcacctcgaaaataccctttacatctgttgggatctgaaaatgagtcacattgaattgggttccagctttataatgagaaacgttattcctaatttttgagttagccaatttgcattccacaaattgggatcctcataacccaaatatatcaccgtatgtgagagggatttgaaagcgagtattgaaaaactcacctttgcatatttaatttccaccaaaaggagttattttggctttatgctcatgaacttagacctaactggccatgtatatgtagatgcaaattcatctagctgtggccctctttgatctctgcttgggaatggctatttttgactatgcgtggtttcttctcgtattttgtgatcaggtcagctcccagtagaaactcaaatggcatcaatattactaactcttctctgcccacttctcttttgtccactctcctagacattcccaccaactgttccagtgatttgggcaaaaatacgcagccatttcccaaaacttcacatgtgcagctatcatggctgtccctccctagacttggaggtgactctcacttaatttttacctgcccaacaatgttccatctaccatctaaaaggtaatataagaagaagttttgaaacccactttaggaaaaccatcttctttaaatccttcaattatctgaggcctctatatgtcaaaactatttttcagttgcaggggattgggcaaacttgttctttcttatacttgggttcaaagacccattctccagtttcatatttcccaaaccaaaatgcttgacataaagccaaatcaactgccaagcacactttattttgcataggagtatgcagcctagggaaccttggttgaaaagcagcagtctgctatgcaaaatattggaaatcactgacagtgtagcattcatattatctgtcaatgagggtatattgggaacgtgctctcgtgaataataaaaagcaacatatttttatttggccttataaattaggttgtggtaatgtaaactttgatatatagtctttttatttttctcttattaatctgccaaagatgggaacagatacaagaatttttcaaattggcttttgtaagacaattgatgattgtaatagtgtttaatcttccagaaagctttatatgttgttccacaataaaattgatatttgtttcagcaaagttttcctgacactcacaaacccacaaactgttcctcttaatgcagatattgtagaatctacaaagttcaaatccatttttgatccaaagaaagtagaggagtatttgagacatgagtgtacccagccctttttttaatcacaggcaatgcatgggtctggctggttacactttgccaagaagacttgtcttatgaaacccaaggtatattttgttatgccattttatgtccttttcttttaacattgtggaaagtggtatgttgaatcaagtgtaagctgagttttccagacaactgaagtagctacatcatgaatgttattttgttattaaagggtttttactcagtgctttgtgccaatggatgtccttttccttggagacacataactacaaaattacctcagcttggcctggttttctctcctgccctcttggggaaacatgggcctggcctgggaaaaggcaggtcatgggctggaaggtaggttttggtactaggaagaaatctctgtatctgtcagctttaaagagaactgggccaaaaatctctaacctcactctctctggactccaacacttccctgcaatcctttggtcttgagcatgtgccagcatgaaggcagactccagttcatacatgaaaggcaagaaaaagaaaatagtaaccttgaatcttctgtgggccaccaggcactcacctttccccaccttgcacactatccagtcaaggctattgcagcccatctggtggctttacatgggacattaccaaaggcttcttcctccatcctggggttgcaaaggatccaggtcccctccatccagtggggctcttccacatcagaagtccccctcccaccatcctctgcatcctgtttagctatcccatctataccttttggagatgattatttagaaaacaaagaaaggtatggaatggggtttcctattgtttgctaggttatattttagcaattctcaattctttgatctggaaaaatacaagagggaaaaggagaccccactatctccctgtgctttgctcccatctcagggggcaggggcagtgcacattgcctatgctgttgatctgtcttgggcgacaggctgaatcacagctattgccccagccaaaaacatggcccatcaatgcctactttatctctgcttgaaaatcctattcaaaaagttgtagagtttgaggtttttatccccccatatcctttgctttggtccagtttggcctttagcataagagtcagctttatctctaggaaagttttttcagattatgacaaggaacctgccacctgggaagaaaagagtccgaagactagcaatcggataggtagtcataccattaacagatacttccttgaaggtagaatattatttcctttctttacagttttgtgttacacaagtccaagtggtgccagcaaacttcttaccgtgaaatgttgtaaaacacctggcatactgaaatttctgaaacaaaaacacaagctccacattgataacttgataaataaccactaaagtttagatgcagggactgagatgatacaggcaaaatcttggtgttggtttctcttttaattcgtatcttcgatcacctaacctttctcaatccaagagcagttcagtcttttctccccaagtctaggatgccaaagagcatcataggaaaagataattagggattgaccagcatttcaattagttctcttcttcatctttgcatttctcaaaagtgttctcctggaccagagggaaagagctggtccattttttttcattctttctattcaaatttttccacccagacaatactttattaacacagatactgtagatccttccttggtcagtgaattattacaagaggagctatccttccaccaaagtgagtgaaaacaagttccagtatcttttcttccatccagttttgttctcagaatccaagtcagtcctgggtcttttctcactttagaccctggcctcagatgtgtttattcttgctatttaaaaatacctttaaatttcacatgctggcctgcagaacttgcatcctttgttctatactgttgactgcttgatggtattgaaaggtgactataatgagggaagaaaggaggaggtaaagagagaagaatttgtcccagatctgtttaaagtttcaaaatttaaaaagggacccattaaattatgggaaaatggctatagagtgtgagcctccgttgaccatatgctcaaagaccgtactctgccacctgccttccaggtagctattctagaaactcagtcctttgtggaaacccaactaccttttaaaagtctctttccagattccaaaaggacaagagatcagagagtcacatatacgcctcttgttttattttcttgctttcacgggtattattgccaagaaaatcgtagggaaaaactttaaacttttcttttcagttgatccctttgacatcacctctcatgtttaaaatcaggaaaacacacccctaaaatttgcactctcttccgttttgaaaaagaaaacccacacacaaatgcacactattaccgtctttcaccctgcgctatatttccaaagtgtattataatccagatattgccccatctcaaacatgttaagtcagactgtgctgaaagactttccagggacggtcaacagggtatatgttcagtggctgccctgaaatcctggtggggatgaggatcacgcttcatcatcaaggggatgcccatcccctgataagctcccagtccttttggaagatttctttgaatgttaattgcattttcagttttgctcatttcccaccccaatgttttgtctgcaacatcgcttacactggattctttctatttttattcctatcattaaatggtagtgctgtaaattctgcaattaatgttaaataaactgctttaattcattg

SEQ ID NO: 14520 - DNA, 437 bp, Homo sapiens
  source 1..437: mol_type = unassigned DNA
atttggagaggccacaggcagcagcagctccttgagttccagcaggatctggagaatgtctttgaagcttgggaacacagaatggtcgctgtgcggtctgcctccagccgacacgtgcaaacgcaaagagcaagaaccaaacaaagacaggaacaattcccagaagaagtcccgcctggtgttcactgacctccaacgccgaacactcttcgccatcttcaaggagaacaaacgcccgtcaaaggagatgcagatcaccatttcccagcagctgggcctggagctcacaaccgtcagcaacttcttcatgaacgcccggcgccgcagcctggagaagtggcaagacgatctgagcacagggggctcctcgtccacctccagcacgtgtaccaaagcatgatggaaggactctcacttgggcacaagtcacctccaaa

SEQ ID NO: 14521 - DNA, 3557 bp, Homo sapiens
  source 1..3557: mol_type = unassigned DNA
ccagcctcagcctcatgtaacccattgtttccaaagggctgcaggctgcagaagcccccaagctctcaggccagctgtggcttctttgctgagatggaggtatagccaagaaagcagcctgaaaagtaaggacagaaaatcaaggcaaagagggtgggtgaaccaggccatacacgtcggccatgcagcagcagcccatctttcccgagggatggactgagggcttggctactcccctgaccataaatggcttggccagggttctcttggagccacctctcagcctgcctctgcagctttgtcagttaactgttcctacaaatgaaagacacaagccaataaagccagtgagaaaggagcttaccaaaggcagtgtacgaagaaggttcctgggagactgtcagaaatgagtttttcactgaacttcaccctgccggcgaacacaacgtcctctcctgtcacaggtgggaaagaaacggactgtgggccctctcttggattagcggcgggcataccattgctggtggccacagccctgctggtggctttactatttactttgattcaccgaagaagaagcagcattgaggccatggaggaaagtgacagaccatgtgaaatttcagaaattgatgacaatcccaagatatctgagaatcctaggagatcacccacacatgagaagaatacgatgggagcacaagaggcccacatatatgtgaagactgtagcaggaagcgaggaacctgtgcatgaccgttaccgtcctactatagaaatggaaagaaggaggggattgtggtggcttgtgcccagactgagcctggaatgatgcagctcagtcaaggagcagcagacctggcactggaacagggttgaaaacccagggttttgtacttggagaggaaagatgccaagctgcttcttaatcaatccaaatttcatttacagctctggaacactttggggctgatttgtctctttaggggacatccccaacatggttaattccaactctcagatcttgtgctttagttagtacatgtgactcaccagatggggtccttagatcctattcctgctcccagtgggaatttgcttttctttgtcattttgggaaaggggcttggtttctgagtgtcttgccttctcatctttttttttcatatcctttttctcaaaaaagccatcagatctgactttcatggaagtgttgctgaggtcagcctggtgcaagttgggatacaaatgaaacttatgcaggatgtgtgagaggaagcagttaattgtttctgaatatctcagggtaggaaccatgtggagccacacattccctgaccacagggaagcacctggctcaatcatgtcacacagcagtggaaagaatacggactcttaagtcacacctaccactgagcagctgtacgactttggagaagttgtttaacattttcaagcctcagtttttgcttttttaaaggaggggaaatatttgcctcatgtcataattgaaaagattaaataagaaataaagggaagtgtctgctacttagttgccagtcaaaatgttagttctctctctctaccaccttcttcctacctcttcccatattgcttgcctgataaaacagctaatcaccagcatttgttccccatagtcacagggccacacaagggaacatttaggacaaactttctccatggcctatgatccaaattgttatctaaagatgattctaggtgttgctggtagtatgtgaatcttccaatctaggtgtgatcgtgtcctcatatgaatcaggaaaaggcagtttcttacaagttccgaattccaaatacagagactggtggtgttacatttaaccttaaagatgttaatgttgatggaaattcatgtttcatattaaaacaacactttgtctttacaatgaaacattttgcttaatttttaaagtaagacattatgatacctctgatggcagttcctcaaataactttaacttttgtgctttagggatagttgttaaagttacaacttcttttattttattttttaaaggcttcagattaaacaagagcccttaagcccacgcatagcattgccgcttcagcttgctgaggactgtctccaaggaggccaaatggaaaaggagaggctacttcaagtggtgttggcccattgagcctattgggcaaactataaccaggttgccttattttgggtggattactccaggagaggccaccctccagctttctcttatcccagtaactcctcttcccattttccaatccatccccagccttttttttttttcttctgtactcttcttttgccttcaatatgagtttcatttcctctgtgtctttgggcagacttccttctaacatgtgtcagctaccctaccacacacctggcctaggagacacatcattcattgctcctacttgtgtctgtaatcagagagtatttaaggagggcagttctgcgacggactgtgtgtgtgttgaaagtaaagatggggggccgcggggaaggcaagagtttttccaaaagattattagaaatgagggctgtatctactctgtggagtagaaccaagtctacttggagaaaagaaccaagtccttggatatctaggggaaagctgtttggcagaaagaaaaatcaagaggacccaaggggatggagacaggaccacaggaatgggccaaggagcaacgtgcctgccattcagccagcttgggacaggctttcactttcactcccatgaggaggcttccaggcagcctggttcccccatgtatagccattgccctctagcaggccaggcctcccagtgggaaggcctgggtccagggcatcttaagttcatccagcagctccatgagccacacagatatcctagaaaatattcctttctcacacagggcttctgattactcagaaacatgcccctcttccctgaataaccaagaacatgttctatgaacccaatctctgccacatgtcaatacctgctcttcaaagccccttttgaaactcagttttgtgccaagtcctctggatctaattaccttaaacaagcagatttagccatttttaaacagacattcccagtcatcctggtgcttgtacttctcctacatgtcatgaaggaccttggatttactgagaactcagccgtggccttggctttgatacttataggtgtcagcccttgggccgattgttgatcatccagagcctcagttctgtacttgtaaagtggagacagcagttctcatcctccatccttttagcccatggggtggttgtaaggctggattgaaatatgcatgtgactaagccatgtagctataaagtgagggatgacttgtgttttggatcacttattttaattctacttataatccacggcttagaatatttaaacattgtttctattaaactagaaaggttcagcatttctgtcatttacttctgctatgatacacaagaacttatgttggaatgaagtgaaaagtaaaatggccattcttatgaacctacaaaa

SEQ ID NO: 14522 - DNA, 3115 bp, Homo sapiens
  source 1..3115: mol_type = unassigned DNA
atgcggatgacgtcctctcctgtcacaggtgggaaagaaacggactgtgggccctctcttggattagcggcgggcataccattgctggtggccacagccctgctggtggctttactatttactttgattcaccgaagaagaagcagcattgaggccatggaggaaagtgacagaccatgtgaaatttcagaaattgatgacaatcccaagatatctgagaatcctaggagatcacccacacatgagaagaatacgatgggagcacaagaggcccacatatatgtgaagactgtagcaggaagcgaggaacctgtgcatgaccgttaccgtcctactatagaaatggaaagaaggaggggattgtggtggcttgtgcccagactgagcctggaatgatgcagctcagtcaaggagcagcagacctggcactggaacagggttgaaaacccagggttttgtacttggagaggaaagatgccaagctgcttcttaatcaatccaaatttcatttacagctctggaacactttggggctgatttgtctctttaggggacatccccaacatggttaattccaactctcagatcttgtgctttagttagtacatgtgactcaccagatggggtccttagatcctattcctgctcccagtgggaatttgcttttctttgtcattttgggaaaggggcttggtttctgagtgtcttgccttctcatctttttttttcatatcctttttctcaaaaaagccatcagatctgactttcatggaagtgttgctgaggtcagcctggtgcaagttgggatacaaatgaaacttatgcaggatgtgtgagaggaagcagttaattgtttctgaatatctcagggtaggaaccatgtggagccacacattccctgaccacagggaagcacctggctcaatcatgtcacacagcagtggaaagaatacggactcttaagtcacacctaccactgagcagctgtacgactttggagaagttgtttaacattttcaagcctcagtttttgcttttttaaaggaggggaaatatttgcctcatgtcataattgaaaagattaaataagaaataaagggaagtgtctgctacttagttgccagtcaaaatgttagttctctctctctaccaccttcttcctacctcttcccatattgcttgcctgataaaacagctaatcaccagcatttgttccccatagtcacagggccacacaagggaacatttaggacaaactttctccatggcctatgatccaaattgttatctaaagatgattctaggtgttgctggtagtatgtgaatcttccaatctaggtgtgatcgtgtcctcatatgaatcaggaaaaggcagtttcttacaagttccgaattccaaatacagagactggtggtgttacatttaaccttaaagatgttaatgttgatggaaattcatgtttcatattaaaacaacactttgtctttacaatgaaacattttgcttaatttttaaagtaagacattatgatacctctgatggcagttcctcaaataactttaacttttgtgctttagggatagttgttaaagttacaacttcttttattttattttttaaaggcttcagattaaacaagagcccttaagcccacgcatagcattgccgcttcagcttgctgaggactgtctccaaggaggccaaatggaaaaggagaggctacttcaagtggtgttggcccattgagcctattgggcaaactataaccaggttgccttattttgggtggattactccaggagaggccaccctccagctttctcttatcccagtaactcctcttcccattttccaatccatccccagccttttttttttttcttctgtactcttcttttgccttcaatatgagtttcatttcctctgtgtctttgggcagacttccttctaacatgtgtcagctaccctaccacacacctggcctaggagacacatcattcattgctcctacttgtgtctgtaatcagagagtatttaaggagggcagttctgcgacggactgtgtgtgtgttgaaagtaaagatggggggccgcggggaaggcaagagtttttccaaaagattattagaaatgagggctgtatctactctgtggagtagaaccaagtctacttggagaaaagaaccaagtccttggatatctaggggaaagctgtttggcagaaagaaaaatcaagaggacccaaggggatggagacaggaccacaggaatgggccaaggagcaacgtgcctgccattcagccagcttgggacaggctttcactttcactcccatgaggaggcttccaggcagcctggttcccccatgtatagccattgccctctagcaggccaggcctcccagtgggaaggcctgggtccagggcatcttaagttcatccagcagctccatgagccacacagatatcctagaaaatattcctttctcacacagggcttctgattactcagaaacatgcccctcttccctgaataaccaagaacatgttctatgaacccaatctctgccacatgtcaatacctgctcttcaaagccccttttgaaactcagttttgtgccaagtcctctggatctaattaccttaaacaagcagatttagccatttttaaacagacattcccagtcatcctggtgcttgtacttctcctacatgtcatgaaggaccttggatttactgagaactcagccgtggccttggctttgatacttataggtgtcagcccttgggccgattgttgatcatccagagcctcagttctgtacttgtaaagtggagacagcagttctcatcctccatccttttagcccatggggtggttgtaaggctggattgaaatatgcatgtgactaagccatgtagctataaagtgagggatgacttgtgttttggatcacttattttaattctacttataatccacggcttagaatatttaaacattgtttctattaaactagaaaggttcagcatttctgtcatttacttctgctatgatacacaagaacttatgttggaatgaagtgaaaagtaaaatggccattcttatgaacct

SEQ ID NO: 14523 - DNA, 3545 bp, Homo sapiens
  source 1..3545: mol_type = unassigned DNA
aatgactccatcattatcagtaacatggttaatgtggactcccgtcagctggggatggagtggccagcctcagcctcatgtaacccattgtttccaaagggctgcaggctgcagaagcccccaagctctcaggccagctgtggcttctttgctgagatggaggtatagccaagaaagcagcctgaaaagtaaggacagaaaatcaaggcaaagagggtgggtgaaccaggccatacacgtcggccatgcagcagcagcccatctttcccgagggatggactgagggcttggctactcccctgaccataaatggcttggccagggttctcttggagccacctctcagcctgcctctgcagctttgtcagttaactgttcctacaaatgaaagacacaagccaataaagccagtgagaaaggagcttaccaaaggcagtgtacgaagaaggttcctgggagactgtcagaaatggactgtgggccctctcttggattagcggcgggcataccattgctggtggccacagccctgctggtggctttactatttactttgattcaccgaagaagaagcagcattgaggccatggaggaaagtgacagaccatgtgaaatttcagaaattgatgacaatcccaagatatctgagaatcctaggagatcacccacacatgagaagaatacgatgggagcacaagaggcccacatatatgtgaagactgtagcaggaagcgaggaacctgtgcatgaccgttaccgtcctactatagaaatggaaagaaggaggggattgtggtggcttgtgcccagactgagcctggaatgatgcagctcagtcaaggagcagcagacctggcactggaacagggttgaaaacccagggttttgtacttggagaggaaagatgccaagctgcttcttaatcaatccaaatttcatttacagctctggaacactttggggctgatttgtctctttaggggacatccccaacatggttaattccaactctcagatcttgtgctttagttagtacatgtgactcaccagatggggtccttagatcctattcctgctcccagtgggaatttgcttttctttgtcattttgggaaaggggcttggtttctgagtgtcttgccttctcatctttttttttcatatcctttttctcaaaaaagccatcagatctgactttcatggaagtgttgctgaggtcagcctggtgcaagttgggatacaaatgaaacttatgcaggatgtgtgagaggaagcagttaattgtttctgaatatctcagggtaggaaccatgtggagccacacattccctgaccacagggaagcacctggctcaatcatgtcacacagcagtggaaagaatacggactcttaagtcacacctaccactgagcagctgtacgactttggagaagttgtttaacattttcaagcctcagtttttgcttttttaaaggaggggaaatatttgcctcatgtcataattgaaaagattaaataagaaataaagggaagtgtctgctacttagttgccagtcaaaatgttagttctctctctctaccaccttcttcctacctcttcccatattgcttgcctgataaaacagctaatcaccagcatttgttccccatagtcacagggccacacaagggaacatttaggacaaactttctccatggcctatgatccaaattgttatctaaagatgattctaggtgttgctggtagtatgtgaatcttccaatctaggtgtgatcgtgtcctcatatgaatcaggaaaaggcagtttcttacaagttccgaattccaaatacagagactggtggtgttacatttaaccttaaagatgttaatgttgatggaaattcatgtttcatattaaaacaacactttgtctttacaatgaaacattttgcttaatttttaaagtaagacattatgatacctctgatggcagttcctcaaataactttaacttttgtgctttagggatagttgttaaagttacaacttcttttattttattttttaaaggcttcagattaaacaagagcccttaagcccacgcatagcattgccgcttcagcttgctgaggactgtctccaaggaggccaaatggaaaaggagaggctacttcaagtggtgttggcccattgagcctattgggcaaactataaccaggttgccttattttgggtggattactccaggagaggccaccctccagctttctcttatcccagtaactcctcttcccattttccaatccatccccagccttttttttttttcttctgtactcttcttttgccttcaatatgagtttcatttcctctgtgtctttgggcagacttccttctaacatgtgtcagctaccctaccacacacctggcctaggagacacatcattcattgctcctacttgtgtctgtaatcagagagtatttaaggagggcagttctgcgacggactgtgtgtgtgttgaaagtaaagatggggggccgcggggaaggcaagagtttttccaaaagattattagaaatgagggctgtatctactctgtggagtagaaccaagtctacttggagaaaagaaccaagtccttggatatctaggggaaagctgtttggcagaaagaaaaatcaagaggacccaaggggatggagacaggaccacaggaatgggccaaggagcaacgtgcctgccattcagccagcttgggacaggctttcactttcactcccatgaggaggcttccaggcagcctggttcccccatgtatagccattgccctctagcaggccaggcctcccagtgggaaggcctgggtccagggcatcttaagttcatccagcagctccatgagccacacagatatcctagaaaatattcctttctcacacagggcttctgattactcagaaacatgcccctcttccctgaataaccaagaacatgttctatgaacccaatctctgccacatgtcaatacctgctcttcaaagccccttttgaaactcagttttgtgccaagtcctctggatctaattaccttaaacaagcagatttagccatttttaaacagacattcccagtcatcctggtgcttgtacttctcctacatgtcatgaaggaccttggatttactgagaactcagccgtggccttggctttgatacttataggtgtcagcccttgggccgattgttgatcatccagagcctcagttctgtacttgtaaagtggagacagcagttctcatcctccatccttttagcccatggggtggttgtaaggctggattgaaatatgcatgtgactaagccatgtagctataaagtgagggatgacttgtgttttggatcacttattttaattctacttataatccacggcttagaatatttaaacattgtttctattaaactagaaaggttcagcatttctgtcatttacttctgctatgatacacaagaacttatgttggaatgaagtgaaaagtaaaatggccattcttatgaacct

SEQ ID NO: 14524 - DNA, 3392 bp, Homo sapiens
  source 1..3392: mol_type = unassigned DNA
agtgcagcgaccatccagtgtccttgcagcacgtgttggtctggtgctagcgtgaagagcagtggttaggtcccttgagcaagaggaccctgacctaagaggcccagacgtccctgtgttccaccgtcatcccagaagcagaggtgcacagtgctgtcagcctgggtgctctgattcatccacagagactactggagttgcttggaagccttgcagagtggtggaaagaggttgtcaccgggacactcagagtttttcactgaacttcaccctgccggcgaacacaacgtcctctcctgtcacaggtgggaaagaaacggactgtgggccctctcttggattagcggcgggcataccattgctggtggccacagccctgctggtggctttactatttactttgattcaccgaagaagaagcagcattgaggccatggaggaaagtgacagaccatgtgaaatttcagaaattgatgacaatcccaagatatctgagaatcctaggagatcacccacacatgagaagaatacgatgggagcacaagaggcccacatatatgtgaagactgtagcaggaagcgaggaacctgtgcatgaccgttaccgtcctactatagaaatggaaagaaggaggggattgtggtggcttgtgcccagactgagcctggaatgatgcagctcagtcaaggagcagcagacctggcactggaacagggttgaaaacccagggttttgtacttggagaggaaagatgccaagctgcttcttaatcaatccaaatttcatttacagctctggaacactttggggctgatttgtctctttaggggacatccccaacatggttaattccaactctcagatcttgtgctttagttagtacatgtgactcaccagatggggtccttagatcctattcctgctcccagtgggaatttgcttttctttgtcattttgggaaaggggcttggtttctgagtgtcttgccttctcatctttttttttcatatcctttttctcaaaaaagccatcagatctgactttcatggaagtgttgctgaggtcagcctggtgcaagttgggatacaaatgaaacttatgcaggatgtgtgagaggaagcagttaattgtttctgaatatctcagggtaggaaccatgtggagccacacattccctgaccacagggaagcacctggctcaatcatgtcacacagcagtggaaagaatacggactcttaagtcacacctaccactgagcagctgtacgactttggagaagttgtttaacattttcaagcctcagtttttgcttttttaaaggaggggaaatatttgcctcatgtcataattgaaaagattaaataagaaataaagggaagtgtctgctacttagttgccagtcaaaatgttagttctctctctctaccaccttcttcctacctcttcccatattgcttgcctgataaaacagctaatcaccagcatttgttccccatagtcacagggccacacaagggaacatttaggacaaactttctccatggcctatgatccaaattgttatctaaagatgattctaggtgttgctggtagtatgtgaatcttccaatctaggtgtgatcgtgtcctcatatgaatcaggaaaaggcagtttcttacaagttccgaattccaaatacagagactggtggtgttacatttaaccttaaagatgttaatgttgatggaaattcatgtttcatattaaaacaacactttgtctttacaatgaaacattttgcttaatttttaaagtaagacattatgatacctctgatggcagttcctcaaataactttaacttttgtgctttagggatagttgttaaagttacaacttcttttattttattttttaaaggcttcagattaaacaagagcccttaagcccacgcatagcattgccgcttcagcttgctgaggactgtctccaaggaggccaaatggaaaaggagaggctacttcaagtggtgttggcccattgagcctattgggcaaactataaccaggttgccttattttgggtggattactccaggagaggccaccctccagctttctcttatcccagtaactcctcttcccattttccaatccatccccagccttttttttttttcttctgtactcttcttttgccttcaatatgagtttcatttcctctgtgtctttgggcagacttccttctaacatgtgtcagctaccctaccacacacctggcctaggagacacatcattcattgctcctacttgtgtctgtaatcagagagtatttaaggagggcagttctgcgacggactgtgtgtgtgttgaaagtaaagatggggggccgcggggaaggcaagagtttttccaaaagattattagaaatgagggctgtatctactctgtggagtagaaccaagtctacttggagaaaagaaccaagtccttggatatctaggggaaagctgtttggcagaaagaaaaatcaagaggacccaaggggatggagacaggaccacaggaatgggccaaggagcaacgtgcctgccattcagccagcttgggacaggctttcactttcactcccatgaggaggcttccaggcagcctggttcccccatgtatagccattgccctctagcaggccaggcctcccagtgggaaggcctgggtccagggcatcttaagttcatccagcagctccatgagccacacagatatcctagaaaatattcctttctcacacagggcttctgattactcagaaacatgcccctcttccctgaataaccaagaacatgttctatgaacccaatctctgccacatgtcaatacctgctcttcaaagccccttttgaaactcagttttgtgccaagtcctctggatctaattaccttaaacaagcagatttagccatttttaaacagacattcccagtcatcctggtgcttgtacttctcctacatgtcatgaaggaccttggatttactgagaactcagccgtggccttggctttgatacttataggtgtcagcccttgggccgattgttgatcatccagagcctcagttctgtacttgtaaagtggagacagcagttctcatcctccatccttttagcccatggggtggttgtaaggctggattgaaatatgcatgtgactaagccatgtagctataaagtgagggatgacttgtgttttggatcacttattttaattctacttataatccacggcttagaatatttaaacattgtttctattaaactagaaaggttcagcatttctgtcatttacttctgctatgatacacaagaacttatgttggaatgaagtgaaaagtaaaatggccattcttatgaacct

SEQ ID NO: 14525 - DNA, 3581 bp, Homo sapiens
  source 1..3581: mol_type = unassigned DNA
aatgactccatcattatcagtaacatggttaatgtggactcccgtcagctggggatggagtggccagcctcagcctcatgtaacccattgtttccaaagggctgcaggctgcagaagcccccaagctctcaggccagctgtggcttctttgctgagatggaggtatagccaagaaagcagcctgaaaagtaaggacagaaaatcaaggcaaagagggtgggtgaaccaggccatacacgtcggccatgcagcagcagcccatctttcccgagggatggactgagggcttggctactcccctgaccataaatggcttggccagggttctcttggagccacctctcagcctgcctctgcagctttgtcagttaactgttcctacaaatgaaagacacaagccaataaagccagtgagaaaggagcttaccaaaggcagtgtacgaagaaggttcctgggagactgtcagaaatgagtttttcactgaacttcaccctgccggcgaacacagactgtgggccctctcttggattagcggcgggcataccattgctggtggccacagccctgctggtggctttactatttactttgattcaccgaagaagaagcagcattgaggccatggaggaaagtgacagaccatgtgaaatttcagaaattgatgacaatcccaagatatctgagaatcctaggagatcacccacacatgagaagaatacgatgggagcacaagaggcccacatatatgtgaagactgtagcaggaagcgaggaacctgtgcatgaccgttaccgtcctactatagaaatggaaagaaggaggggattgtggtggcttgtgcccagactgagcctggaatgatgcagctcagtcaaggagcagcagacctggcactggaacagggttgaaaacccagggttttgtacttggagaggaaagatgccaagctgcttcttaatcaatccaaatttcatttacagctctggaacactttggggctgatttgtctctttaggggacatccccaacatggttaattccaactctcagatcttgtgctttagttagtacatgtgactcaccagatggggtccttagatcctattcctgctcccagtgggaatttgcttttctttgtcattttgggaaaggggcttggtttctgagtgtcttgccttctcatctttttttttcatatcctttttctcaaaaaagccatcagatctgactttcatggaagtgttgctgaggtcagcctggtgcaagttgggatacaaatgaaacttatgcaggatgtgtgagaggaagcagttaattgtttctgaatatctcagggtaggaaccatgtggagccacacattccctgaccacagggaagcacctggctcaatcatgtcacacagcagtggaaagaatacggactcttaagtcacacctaccactgagcagctgtacgactttggagaagttgtttaacattttcaagcctcagtttttgcttttttaaaggaggggaaatatttgcctcatgtcataattgaaaagattaaataagaaataaagggaagtgtctgctacttagttgccagtcaaaatgttagttctctctctctaccaccttcttcctacctcttcccatattgcttgcctgataaaacagctaatcaccagcatttgttccccatagtcacagggccacacaagggaacatttaggacaaactttctccatggcctatgatccaaattgttatctaaagatgattctaggtgttgctggtagtatgtgaatcttccaatctaggtgtgatcgtgtcctcatatgaatcaggaaaaggcagtttcttacaagttccgaattccaaatacagagactggtggtgttacatttaaccttaaagatgttaatgttgatggaaattcatgtttcatattaaaacaacactttgtctttacaatgaaacattttgcttaatttttaaagtaagacattatgatacctctgatggcagttcctcaaataactttaacttttgtgctttagggatagttgttaaagttacaacttcttttattttattttttaaaggcttcagattaaacaagagcccttaagcccacgcatagcattgccgcttcagcttgctgaggactgtctccaaggaggccaaatggaaaaggagaggctacttcaagtggtgttggcccattgagcctattgggcaaactataaccaggttgccttattttgggtggattactccaggagaggccaccctccagctttctcttatcccagtaactcctcttcccattttccaatccatccccagccttttttttttttcttctgtactcttcttttgccttcaatatgagtttcatttcctctgtgtctttgggcagacttccttctaacatgtgtcagctaccctaccacacacctggcctaggagacacatcattcattgctcctacttgtgtctgtaatcagagagtatttaaggagggcagttctgcgacggactgtgtgtgtgttgaaagtaaagatggggggccgcggggaaggcaagagtttttccaaaagattattagaaatgagggctgtatctactctgtggagtagaaccaagtctacttggagaaaagaaccaagtccttggatatctaggggaaagctgtttggcagaaagaaaaatcaagaggacccaaggggatggagacaggaccacaggaatgggccaaggagcaacgtgcctgccattcagccagcttgggacaggctttcactttcactcccatgaggaggcttccaggcagcctggttcccccatgtatagccattgccctctagcaggccaggcctcccagtgggaaggcctgggtccagggcatcttaagttcatccagcagctccatgagccacacagatatcctagaaaatattcctttctcacacagggcttctgattactcagaaacatgcccctcttccctgaataaccaagaacatgttctatgaacccaatctctgccacatgtcaatacctgctcttcaaagccccttttgaaactcagttttgtgccaagtcctctggatctaattaccttaaacaagcagatttagccatttttaaacagacattcccagtcatcctggtgcttgtacttctcctacatgtcatgaaggaccttggatttactgagaactcagccgtggccttggctttgatacttataggtgtcagcccttgggccgattgttgatcatccagagcctcagttctgtacttgtaaagtggagacagcagttctcatcctccatccttttagcccatggggtggttgtaaggctggattgaaatatgcatgtgactaagccatgtagctataaagtgagggatgacttgtgttttggatcacttattttaattctacttataatccacggcttagaatatttaaacattgtttctattaaactagaaaggttcagcatttctgtcatttacttctgctatgatacacaagaacttatgttggaatgaagtgaaaagtaaaatggccattcttatgaacct

SEQ ID NO: 14526 - DNA, 3578 bp, Homo sapiens
  source 1..3578: mol_type = unassigned DNA
aatgactccatcattatcagtaacatggttaatgtggactcccgtcagctggggatggagtggccagcctcagcctcatgtaacccattgtttccaaagggctgcaggctgcagaagcccccaagctctcaggccagctgtggcttctttgctgagatggaggtatagccaagaaagcagcctgaaaagtaaggacagaaaatcaaggcaaagagggtgggtgaaccaggccatacacgtcggccatgcagcagcagcccatctttcccgagggatggactgagggcttggctactcccctgaccataaatggcttggccagggttctcttggagccacctctcagcctgcctctgcagctttgtcagttaactgttcctacaaatgaaagacacaagccaataaagccagtgagaaaggagcttaccaaaggcagtgtacgaagaaggttcctgggagactgtcagaaatgacgtcctctcctgtcacaggtgggaaagaaacggactgtgggccctctcttggattagcggcgggcataccattgctggtggccacagccctgctggtggctttactatttactttgattcaccgaagaagaagcagcattgaggccatggaggaaagtgacagaccatgtgaaatttcagaaattgatgacaatcccaagatatctgagaatcctaggagatcacccacacatgagaagaatacgatgggagcacaagaggcccacatatatgtgaagactgtagcaggaagcgaggaacctgtgcatgaccgttaccgtcctactatagaaatggaaagaaggaggggattgtggtggcttgtgcccagactgagcctggaatgatgcagctcagtcaaggagcagcagacctggcactggaacagggttgaaaacccagggttttgtacttggagaggaaagatgccaagctgcttcttaatcaatccaaatttcatttacagctctggaacactttggggctgatttgtctctttaggggacatccccaacatggttaattccaactctcagatcttgtgctttagttagtacatgtgactcaccagatggggtccttagatcctattcctgctcccagtgggaatttgcttttctttgtcattttgggaaaggggcttggtttctgagtgtcttgccttctcatctttttttttcatatcctttttctcaaaaaagccatcagatctgactttcatggaagtgttgctgaggtcagcctggtgcaagttgggatacaaatgaaacttatgcaggatgtgtgagaggaagcagttaattgtttctgaatatctcagggtaggaaccatgtggagccacacattccctgaccacagggaagcacctggctcaatcatgtcacacagcagtggaaagaatacggactcttaagtcacacctaccactgagcagctgtacgactttggagaagttgtttaacattttcaagcctcagtttttgcttttttaaaggaggggaaatatttgcctcatgtcataattgaaaagattaaataagaaataaagggaagtgtctgctacttagttgccagtcaaaatgttagttctctctctctaccaccttcttcctacctcttcccatattgcttgcctgataaaacagctaatcaccagcatttgttccccatagtcacagggccacacaagggaacatttaggacaaactttctccatggcctatgatccaaattgttatctaaagatgattctaggtgttgctggtagtatgtgaatcttccaatctaggtgtgatcgtgtcctcatatgaatcaggaaaaggcagtttcttacaagttccgaattccaaatacagagactggtggtgttacatttaaccttaaagatgttaatgttgatggaaattcatgtttcatattaaaacaacactttgtctttacaatgaaacattttgcttaatttttaaagtaagacattatgatacctctgatggcagttcctcaaataactttaacttttgtgctttagggatagttgttaaagttacaacttcttttattttattttttaaaggcttcagattaaacaagagcccttaagcccacgcatagcattgccgcttcagcttgctgaggactgtctccaaggaggccaaatggaaaaggagaggctacttcaagtggtgttggcccattgagcctattgggcaaactataaccaggttgccttattttgggtggattactccaggagaggccaccctccagctttctcttatcccagtaactcctcttcccattttccaatccatccccagccttttttttttttcttctgtactcttcttttgccttcaatatgagtttcatttcctctgtgtctttgggcagacttccttctaacatgtgtcagctaccctaccacacacctggcctaggagacacatcattcattgctcctacttgtgtctgtaatcagagagtatttaaggagggcagttctgcgacggactgtgtgtgtgttgaaagtaaagatggggggccgcggggaaggcaagagtttttccaaaagattattagaaatgagggctgtatctactctgtggagtagaaccaagtctacttggagaaaagaaccaagtccttggatatctaggggaaagctgtttggcagaaagaaaaatcaagaggacccaaggggatggagacaggaccacaggaatgggccaaggagcaacgtgcctgccattcagccagcttgggacaggctttcactttcactcccatgaggaggcttccaggcagcctggttcccccatgtatagccattgccctctagcaggccaggcctcccagtgggaaggcctgggtccagggcatcttaagttcatccagcagctccatgagccacacagatatcctagaaaatattcctttctcacacagggcttctgattactcagaaacatgcccctcttccctgaataaccaagaacatgttctatgaacccaatctctgccacatgtcaatacctgctcttcaaagccccttttgaaactcagttttgtgccaagtcctctggatctaattaccttaaacaagcagatttagccatttttaaacagacattcccagtcatcctggtgcttgtacttctcctacatgtcatgaaggaccttggatttactgagaactcagccgtggccttggctttgatacttataggtgtcagcccttgggccgattgttgatcatccagagcctcagttctgtacttgtaaagtggagacagcagttctcatcctccatccttttagcccatggggtggttgtaaggctggattgaaatatgcatgtgactaagccatgtagctataaagtgagggatgacttgtgttttggatcacttattttaattctacttataatccacggcttagaatatttaaacattgtttctattaaactagaaaggttcagcatttctgtcatttacttctgctatgatacacaagaacttatgttggaatgaagtgaaaagtaaaatggccattcttatgaacct

SEQ ID NO: 14527 - DNA, 7879 bp, Homo sapiens
  source 1..7879: mol_type = unassigned DNA
tgtgcgtcgcgctctcgccctcctcttcccgctgcagtgtctatggagcgaggctacgtttcattgccgccctggcttaacccttccggcgcctaaaaggacggccggccggccggctcccttgcaccaggaagaagtcttagcagccagcgggccctggtcaggaaactctaaggtacaaggaaaacagttgaggaaggagccagagcgctccggtttggtcctcgggcttcgctggggcggggcgcaggcgttggctttaagaaaggggaggggacagtgcaatccgggttgcccgcggagttcggccaaggaagtcttccgctcgctccggagcgaggagcctgtagagaggctgttcccagctccagctctaacctcgcctacaccttgggcgggcccaagtgtcacgtttgcaattgctcaggaaggatccggcccgtctccggaggcaagtcgggctgcggtttttgctgcttatctgggaaggcgatgcctaagggacatgctgcttgctaggcagcaccctgccgggatccgactgcgatagttagctctccctggccctgaagccatcgccggggcgcctgttctctgtccggaccagccagcgctcctcaggagtctcactgaaacagaaccatgggtcatcccccgctggagttcagcgactgctacctggacagccccgatttccgcgagaggctcaagtgttatgagcaggaactggagaggaccaacaaattcatcaaagacgtaatcaaagacggcaacgcgcttatcagcgctatgagaaattattcttctgctgttcagaaattttcccagacgctgcagtcatttcagtttgatttcattggagacactctgactgatgatgaaattaacatcgctgaatccttcaaggaatttgctgaattgctcaacgaggtagaaaatgagaggatgatgatggtacacaatgctagtgatttgctgattaaacccttggaaaatttccggaaggaacaaataggcttcaccaaggagcggaaaaagaaatttgaaaaggatggtgagaggttttattctttactggatcggcacttacacctgtcttcaaaaaagaaagaatctcagttacaagaggcagacctacaggtggacaaggagaggcacaattttttcgagtcctctcttgattatgtttatcaaatccaggaagttcaggagtccaagaagttcaatattgtggagcctgtcttggcctttcttcatagtctgttcatttctaacagcctgactgtggagctcacacaggatttcctcccatacaaacaacagctccaactcagtttacagaatacaagaaatcatttctccagtacccgggaagagatggaagaacttaagaaaaggatgaaagaagctccccagacatgcaaacttccaggacagccaactattgaaggctatctctatacacaagagaaatgggctttaggaatatcctgggtgaaatactattgccagtatgagaaagagaccaaaacactgaccatgacgcctatggagcagaagccaggtgctaagcaggggcccttggacttaacactgaagtactgtgtgagaaggaagacggagtctatcgacaagaggttctgttttgacatagaaactaatgaaaggccaggaaccatcactctgcaggccctttcagaagctaacagaaggctatggatggaagccatggatgggaaagaacctatctaccacagccctataacaaaacagcaagaaatggagctaaatgaagtgggcttcaagtttgtcaggaagtgcatcaatattattgagaccaaagggatcaagacagaagggttgtaccgcactgtgggcagcaatattcaggttcagaagctgctgaatgccttttttgatcctaaatgcccaggagatgttgattttcataatagtgactgggacattaagacaatcaccagctccttgaaattctacctcaggaatctttctgaacctgtcatgacctatagacttcacaaagagctggtctctgctgccaagtctgacaacctggattaccgcctaggagctattcactccctggtatataagctaccagaaaagaaccgagagatgctggaacttctgataagacacttggtcaatgtgtgtgagcacagcaaagagaatcttatgaccccctccaacatgggagtaatctttgggcccaccctgatgagagctcaggaggacactgtggccgccatgatgaacatcaaattccagaacatagtggtggaaatactaatcgagcactttggcaagatctatttaggtccacctgaggaaagcgctgcaccgccagtgcctccgcctcgggtgacagcaagaaggcacaaaccaatcacgatttcaaagcgcttgctgcgagaaaggacggttttctatacttcttccctggatgaaagcgaagatgaaatccaacatcaaacaccgaatggtactatcaccagcagcatagaaccccccaagccaccacaacaccccaaactacctattcagaggagtggggaaactgatcctgggaggaagtccccaagcaggcctattttggatggcaagttggagccctgcccagaggtggacgtggggaagttggtgtctaggctgcaggatggagggaccaagatcaccccaaaggccaccaatggacccatgccaggctctgggcccaccaagaccccctctttccacataaagagaccagctccccggcccctggcccaccacaaggagggggatgctgacagtttcagcaaagtgcggcctccaggagaaaagccaaccatcatccgccccccagtgaggcccccagatcctccctgccgggcagctactccccaaaagccagaaccaaagccagatattgtggctggcaatgcgggggaaatcacatcatctgtggtggcttccaggaccaggttttttgaaacagcttcccggaaaacaggaagttctcaaggcagacttcctggagatgaaagttgaggctacaggttttaaaagccttggcctcagaggaccctttccaggttctgaaagagtctttcttcttcaaacctttgtgtgcggagtcattttgtgttgaagagcagctccttcctagccttgcactttcagactctctctgggaggccataaaataaggagcatatgtcctagacaggtgtttatatctcctttgtattctgtcttcatcccctcagaaggtctgttttgagttcctataacactgtgaagagctggactccctcaagccagactctgccaaaaccaagatatccacttacctgagttgaagaggggagctcagttttcaactcttccctgaacttcctgcttcctcagagggccattgaactctgagagatttggggctaaagactgatctcaggggtcttaccttgaactgaaggccacttgagttggggccattgcttaccttggttggaagggaatagaaatgtttgctgaacattggagaatctcaacatgtctcctactgaggatatggacactggtgccatgtcagcgctctggtgctgcagtatgttgccaagagcccgtctgctcctgcgaggctatgagtgggatgagtgatgcccccacagcacctccatgtggacttaggaaggtggccttcctgctgttacatgcagccacttaggacaaatctgcaaagcatgttttgcatgtaaaagcctaggtctatttggattattctttctccttttttttgacagcttcctgtcaagcaatcaagaaacaaacaaaagctgaacacatttctttttaaaaaaaggagactgtgtttggtcctgtaggagttctattttggggtcaaatgctagaaaaattgttaaggtggattgaggccaggcagctgtcactgctgcttcatgtttgccttctgcacataaactcttttatctcctgaaaaaagcagttcttaacccagtgtccatggactcagaaactccatgatgcccctgagatggtatgcacaattccatgacaatatgccctttctggggagatagtccataatgttctgctaaatttcaaatgggctcgtgacccaaaaaagtcaagaaccacagcacttgagtaaaatactctttttacaatccatataagcccttgattggaagggcttttcaaaatcatttagtctaacaactgcccagtttccagtcgggggaactgaggcagagcaaggtagtgatcacaccagtacaagatctcaggtcccaggctcctatgcaagttttttttccccattatatcacacttatctagcaagggaccttgtggtttgtggctttagtggccatcatttctgggggttggcttttaccctttttcttgaatatttgccaccaagtgaaaaatgttaggacataaacccttgccaggtccctttcatttgctatctctattattggaaaggacctaaaaattggtgtaatggggcagaaatctgaggaatggacatttctaattcctgtttgttgaagggaagttgctggaaagagcatcagtacttgtttctatgcagatgcctgggccgtagcttgtctgtagcgtctgtataattataatgttgcccagtgtgagggaaagagctttcctacttgcactcttctaccaaggccctgttagtgcactgattatagtactgacagataaacctagataaagagatagagagtgagtacatgcacactcatgtgcaaacccactcagagatgcatttggaacagtgctactgaaaggcagtagtcattttcaagactgaattccaaacatggtttattggtgagttaggaacatgtaaggccaagtacactgagagcctttttgaaagtaattgagtggaaacttgatgccattctaaatcaaggcatatccaggtggcccggttgaactcactccactgtacccagtctcaaaggccaggttgctaagaaaccaggagtaaaagagtcaagtgaccatcatttcacctgctgcttgcccccaatagtagtctctgtgaggccttactgacctcacctaggaagtgatttttgagcccttgtttcagggctgtggcctccctgctctatcctgaataaagcagacaggtgtgcagattttggccatgaaagcatggctaatagggccacagtccctttaaagaaacatggtttgactctggttttcttgggggaaaataccacaatcaccgatgcaaacattggaagattattgagagccctagaaagctgctgtgatcccagtagaaaatatgtcccagaaatgtcatgagattgctgtgtgttgcctgggacacagatcaagggcctatcttggagagctggggaccagcagtctgcctggaggccagggagcagtggctgagtagctctgcctttgctctggtctataccttaagaatgccaaagaatgaatttcaacgcctgcctttggcactctgacttaaagtgcaaaaagcttctgtggcgaggcatgctatcatggaatgagactggcttgccctaggcttaatggatgggcagtcattttgcagaggctatgggaagagggtgataatagaagagtggcagctataggaaattatcaacataccttggccagcaagttagagaatctggcaatggatgaactgaaagtgatgaactggcagggataacaaagaacctaacatttattaagcacgtatttattaactgctcagtgtttcatattcatgcaagtattctcattttacagagaaagaaattatggcccagggggctaaagtaaacaactcaagggcacatagaaagtaaataaaaggactgtgatttgaatccaggccactcttagcccatgctgttttccctttgccacactgtggtaggtgtttgaacagaggccacattactagagttggcatgactcttgactcttgcctgcctaacaaaatattgaaaggcaaacatttgaaggagggagggggtgcaggttcagtttatatggaaatgcaaactgggctggaagatattcctgagttaggctttctcttcatattcagcttgcacatttggtaatgtttttaagatgatcatctaattttattttgtgaagtgaaggatttgtgttttagttggcagttgttaagtccttggcttgccatttttcaaaaagtaaaaaggtcctcacaggtgtctccatacttcgccaaggttgtagcatgggcagtttcagtttcagcctaagagactggtgacatccacaaatgcagttttagaagcagaaaaggtcttggtgcctctgcagtacttgatgtattggggtcaaatctctacaaatttttctgtggtgatagcaaaatcaagagatggcttacaaaaagaaatattgaatttttatttttgaagtttttgttttttaaaaggttgggggtgttcagccactgagggacaaaacttagcatctaatttcaattatagtgtcatgcagagtatttctaaagtaattggttatcatgggaaagtattctcttttcaagaagttctttgattctgtaataactagaacaaataaagtagtaaaagaagaaatagttctgtgactaggaaaaaattgcttttgagagaacatagatcaattatactacttctaaggtagctgcagataagtggccttgacacattacaagcctggaaaaaaacatcagaaataataaaaaatttcagagagaatcaagatacctttttttttcttttttttttcttttttttattatactctaagttttagggtacatgtgcacattgtgcaggttagttacatatgtatacatgtgccatgctggtgcgctgcacccactaatgtgtcatctagcattaggtatatctcccagtgctatccctcccccctcccccgaccccaccacagtccccagagtgtgatattccccttcctgtgtccatgtgatctcattgttcaattcccacctatgagtgagaatatgcggtgtttggttttttgttcttgcgatagtttactgagaatgatggtttccaatttcatccatgtccctacaaaggatatgaactcatcattttttatggctgcatagtattccatggtgtatatgtgccacattttcttaatccagtctatcattgttggacatttgggttggttccaagtctttgctattgtgaatagtgccgcaataaacatacgtgtgcatgtgtctttatagcagcatgatttatactcatttgggtatatacccagtaatgggatggctgggtcaaatggtatttctagttctagatccctgaggaatcgccacactgacttccacaatggttgaactagtttacagtccaaccaacagtgtaaaagtgttcctatttctccgcatcctctccagcacctgttgtttcctgactttttaatgattgccattctaactggtgtgagatgatatctcatagtggttttgatttgcatttctctgatggccagtgatgatgagcatttcttcatgtgttttttggctgcataaatgtcttcttttgagaagtgtctgttcatgtccttcgcgaaggacaagataccttaaagataagttttcgataaagaaaagccttcattttcctgggggaaatgaagcacttgatgccaaggacattagtagagggctagaaagattgcctgtgtgaaagacatatgctatatccaaataataaaacaaacgagatcctggggctcattcatgtgactttcaataaagtatgtagactgtctaatataa

SEQ ID NO: 14528 - DNA, 774 bp, Homo sapiens
  source 1..774: mol_type = unassigned DNA
gtggatgggaataggtttccagctggaagtttatctagtctgacaacctggattaccgcctaggagctattcactccctggtatataagctaccagaaaagaaccgagagatgctggaacttctgataagacacttggtcaatgtgtgtgagcacagcaaagagaatcttatgaccccctccaacatgggagtaatctttgggcccaccctgatgagagctcaggaggacactgtggccgccatgatgaacatcaaattccagaacatagtggtggaaatactaatcgagcactttggcaagatctatttaggtccacctgaggaaagcgctgcaccgccagtgcctccgcctcgggtgacagcaagaaggcacaaaccaatcacgatttcaaagcgcttgctgcgagaaaggacggttttctatacttcttccctggatgaaagcgaagatgaaatccaacatcaaacaccgaatggtactatcaccagcagcatagaaccccccaagccaccacaacaccccaaactacctattcagaggagtggggaaactgatcctgggaggaagtccccaagcaggcctattttggatggcaagttggagccctgcccagaggtggacgtggggaagttggtgtctaggctgcaggatggagggaccaagatcaccccaaaggccaccaatggacccatgccaggctctgggcccaccaagaccccctctttccacataaagagaccagctccccggcccctggcccaccacaaggagg

SEQ ID NO: 14529 - DNA, 737 bp, Homo sapiens
  source 1..737: mol_type = unassigned DNA
ctccagtacccgggaagagatggaagaacttaagaaaaggatgaaagaagctccccagacatgcaaacttccaggacagccaactattgaaggctatctctatacacaagagaaatgggctttaggaatatcctgggtgaaatactattgccagtatgagaaagagaccaaaacactgaccatgacgcctatggagcagaagccaggtgctaagcaggggcccttggacttaacactgaagtactgtgtgagaaggaagacggagtctatcgacaagaggttctgttttgacatagaaactaatgaaaggccaggaaccatcactctgcaggccctttcagaagctaacagaaggctatggatggaagccatggatgggaaagaacctatctaccacagccctataacaaaacagcaagaaatggagctaaatgaagtgggcttcaagtttgtcaggaagtgcatcaatattattgagaccaaagggatcaagacagaagggttgtaccgcactgtgggcagcaatattcaggttcagaagctgctgaatgccttttttggtaacaattttactttgataattcttattgggagtactttatgtgttacaaagaaatgtgactggaagagaaaggagacactgctaaaatgtggtagaatagttgaaaaaagtattttctaaagtaaaacatacacatacttgcccaccctgggcagagtcaatcgtaccttgaaaa

SEQ ID NO: 14530 - DNA, 120 bp, Homo sapiens
  source 1..120: mol_type = unassigned DNA
cttcccaagtagctgggactacagattattcttctgctgttcagaaattttcccagacgctgcagtcatttcagtttgatttcattggagacactctgactgatgatgaaattaacatcg

SEQ ID NO: 14531 - DNA, 377 bp, Homo sapiens
  source 1..377: mol_type = unassigned DNA
gcaaacggaaagactacatctcccaggccgccacgctttccagctggagtcctagggcgctgactgctccccagtttccgtagggaagcgctgggctaccgcggctattgtgcgtcgcgctctcgccctcctcttcccgctgcagtgtctatggagcgaggctacgtttcattgccgccctggcttaacccttccggcgcctaaaaggacggccggccggccggctcccttgcaccaggaagaagtcttagcagccagcgggccctggtcaggaaactctaagaaccatgggtcatcccccgctggagttcagcgactgctacctggacagccccgatttccgcgagaggctcaagtgttatgagcaggaactggag

SEQ ID NO: 14532 - DNA, 4031 bp, Homo sapiens
  source 1..4031: mol_type = unassigned DNA
ggagcgcaggcagagccgaccgcgagcgaccgagccggagccgagcgccagtttttccagggctaccagctgaagagctcctgtgggactccagccccaccaccatgggcagccccgagggccgcttccactttgccatcgaccgtgggggtaccttcacagacgtctttgcccagtgcccaggggggcacgtgcgggtcttaaaactgctctcagaggaccctgccaactatgcggacgcgccaaccgaaggcatccgccgcatcctggagcaggaggccggcatgctcctgccccgggaccagccgctggactccagtcatatcgccagcatccgcatgggcaccacagtggccaccaacgcactgctggagcggaagggggagcgggtggcgctgctggtgacacgtggcttccgagacctgctgcacattggcacccaagcccgtggggacctctttgacctggccgtgcccatgcctgaggtgctgtatgaagaggtgctggaggtggacgaacgcgtggtgctgcaccgtggagaggcgggcaccgggacgcctgtgaaaggccgcacgggggacctgctggaagtgcagcagcctgtggacctgggggccctgcgtgggaagctggaggggctgctatctcgaggcatccgcagcctggctgtggtgctcatgcactcgtacacgtgggcccagcatgagcagcaggtgggtgtgctggcccgggagctgggcttcacgcacgtgtcactgtcctcggaggccatgcccatggtgcgcatcgtccctcgggggcacacggcctgtgccgacgcctacctcacgcccgccatccagcgctacgtgcagggcttctgccgtggcttccagggccaactcaaggatgtgcaggtgttgttcatgcgctccgatggcggcctggcgcccatggacaccttcagcggctccagtgctgtgctctcgggcccggccggcggcgtggtgggctactcagccaccacctaccagcaggagggtggccagcctgtcatcggctttgacatgggaggcacgtccacggatgtgagccgctatgctggggaattcgagcacgtcttcgaggccagcacagctggcgtcaccctccaggccccgcagctggacatcaacaccgtggcagcgggagggggttcccgcctcttcttcaggtctggcctctttgtggttgggcccgagtcagcaggagcccacccaggacccgcctgctaccgcaaagggggccctgtgacagtgacggatgctaatctggtcctgggtcgcctgctgcctgcctccttcccctgcatttttgggccgggagagaaccaaccactttcccctgaggcctcccgcaaagccctggaggctgtggccactgaggtcaacagcttcctgaccaacgggccctgcccggcctccccgctgagcctggaggaggtggccatggggttcgtgcgcgtggccaacgaggccatgtgccggcccatccgtgcactcacgcaggcaagaggccatgacccctcagcccatgtgctggcctgctttgggggagctggtgggcagcatgcatgtgccatcgcccgggccctgggcatggacacggtgcacatccacaggcacagtgggctgctgtcggccctggggctggccctggctgacgtggtgcatgaggcacaggaaccctgctccctgctctacgcgcctgagaccttcgtgcagctggaccagaggctgagccgcctggaggagcagtgtgtggatgctctgcaggcccagggcttccccaggtcccagatcagcactgagagcttcctgcacctgcgctaccagggcacggactgtgctctgatggtgtctgcccaccagcacccagccacagcccgctcgccccgtgcgggggacttcggggcagcctttgtggagcggtacatgagggagtttggctttgtcatacctgagcggccggtggtcgtggacgatgtgcgagtgcggggcaccggccgcagtggtcttcgcctcgaggatgcccccaaagcccagaccgggcctccccgggtggacaagatgacccagtgctactttgaggggggctaccaggagacccctgtgtacctgctggcagagctgggctatgggcacaagctccatgggccctgcctcatcatcgacagtaacagcaccatcctggtggagccaggttgccaggcagaggtgaccaagacaggggacatctgcatctccgtgggggccgaagtccccggcacagtgggcccccagctggaccctatccagctgtccatcttctcacaccgcttcatgagcattgctgagcagatgggccgcatcctgcagcgcacagccatctccaccaacatcaaggagcgtctggacttctcctgtgccctctttgggcccgatggggggctggtgtccaatgccccccacatccctgtgcacctgggtgccatgcaggagacggtgcagttccagattcagcacctgggggccgatctccaccctggcgacgtgctactgagcaaccatcccagtgccgggggcagccacctgccagacctgactgttatcacaccggtgttttggccgggtcagacgcggcctgtgttctatgtggccagccgagggcaccacgcagacatcgggggcatcacaccaggctccatgcccccccactccaccatgctgcaacaggagggtgccgtctttctgtccttcaaacttgtccaggggggcgtcttccaggaggaggcggtgacggaggccctgcgggcgccaggcaaggtccccaactgcagcggaaccagaaacctgcacgacaacctgtcggacctccgtgcccaggtggcagccaaccagaagggcatccagctggtgggggagctcattgggcagtacggcctggacgtggtgcaggcctacatgggccatattcaggcaaacgctgagctggccgtgcgagacatgttgcgtgcctttggaacctcccggcaggcccggggcctgcccctggaggtgtcctcggaagaccacatggacgacggttcccccatccgcctccgtgtgcagatcagcctgagtcagggcagcgccgtgtttgacttcagcggcactgggccggaggtgtttggtaatctcaacgcaccgcgggccgtaaccctgtccgccctcatctactgcctgcgctgtctggtgggccgcgacatcccactcaaccagggctgcctggcgccagtgcgcgtggtcattccccgaggctccatcctggacccgtcgcccgaggcggcggtggtgggcggcaacgtgctcacgtcgcagcgcgtggtggatgtcatcctgggggcctttggggcctgcgccgcctcccagggctgcatgaacaacgtgaccctgggcaacgcccacatgggctactacgagacggtggcgggcggcgcgggcgcgggtcccagctggcacgggcgcagcggtgtgcacagccacatgaccaacacacgcatcaccgaccctgagatcctggagagccggtacccggtcatcctgcgccgcttcgagctgcggcggggctcggggggcagaggccgcttccgaggcggcgacggcgtcacccgcgagctgctctttcgtgaggaggcgctgctgtcagtgctgaccgagcgccgcgccttccggccatacgggctccacgggggcgagcctggcgcccgcggcctaaacctgctgatccgcaaaaacggccggacggtgaatctgggcggcaagacgtcggtgaccgtgtaccccggggatgtgttctgtctccacacgcccggcggcggtggctatggggacccggaggaccccgccccaccgccggggtcgcccccgcaagcactggcctttcccgagcacggcagcgtctatgagtatcgccgggcccaggaggccgtgtgaggatcccgcaataaagatgccttaagtctcccggttctggggacgcagctacggcgccta

SEQ ID NO: 14533 - DNA, 635 bp, Homo sapiens
  source 1..635: mol_type = unassigned DNA
gctccatgcccccccactccaccatgctgcaacaggagggtgccgtctttctgtccttcaaacttgtccaggggggcgtcttccaggaggaggcggtgacggaggccctgcgggcgccaggcaaggtccccaactgcagcggaaccagaaacctgcacgacaacctgtcggacctccgtgcccaggtggcagccaaccagaagggcatccagctggtgggggagctcattgggcagtacggcctggacgtggtgcaggcctacatgggccatattcaggtgggcctgggcacaggagtgtgggcggcagggccatcctgcaggtgacctggccaccactgatcctgctccctgccaggcaaacgctgagctggccgtgcgagacatgttgcgtgcctttggaacctcccggcaggcccggggcctgcccctggaggtgtcctcggaagaccacatggacgacggttcccccatccgcctccgtgtgcagatcagcctgagtcagggcagcgccgtgtttgacttcagcggcactgggccggaggtgtttggtaatctcaacgcaccgcgggccgtaaccctgtccgccctcatctactgcctgcgctgtctggtgggccgcgacatcccactcaa

SEQ ID NO: 14534 - DNA, 500 bp, Homo sapiens
  source 1..500: mol_type = unassigned DNA
acgtgctactgagcaaccatcccagtgccgggggcagccacctgccagacctgactgttatcacaccggtgaggggtgctgcccgcctgcctctgctggggcagtggtggccgatgcagctgaccgtggctctccacccgctaggtgttttggccgggtcagacgcggcctgtgttctatgtggccagccgagggcaccacgcagacatcgggggcatcacaccaggctccatgcccccccactccaccatgctgcaacaggagggtgccgtctttctgtccttcaaacttgtccaggggggcgtcttccaggaggaggcggtgacggaggccctgcgggcgccaggcaaggtccccaactgcagcggaaccagaaacctgcacgacaacctgtcggacctccgtgcccaggtggcagccaaccagaagggcatccagctggtgggggagctcattgggcagtacggcctggacgtggtgcaggcctacatgggccatat

SEQ ID NO: 14535 - DNA, 792 bp, Homo sapiens
  source 1..792: mol_type = unassigned DNA
ccccgccagctgccgccgctggctgccaggcatgtccctcctcagcagctatgagggcctgcggcaggagatccagcggctggcacaggagaacgaagagctgcggcggctggtgcagctcatccaggagaaccaggagctgaagctggtgctcaggaaccgcggcagcagcctgggcttctgcagctccgggttcctggctgaggtggctgccagtccctggctacccaggcggagaacgatcaaattcaagaatgctgagagagtttttccagggctaccagctgaagagctcctgtgggactccagccccaccaccatgggcagccccgagggccgcttccactttgccatcgaccgtgggggtaccttcacagacgtctttgcccagtgcccaggggggcacgtgcgggtcttaaaactgctctcagaggaccctgccaactatgcggacgcgccaaccgaaggcatccgccgcatcctggagcaggaggccggcatgctcctgccccgggaccagccgctggactccagtcatatcgccagcatccgcatgggcaccacagtggccaccaacgcactgctggagcggaagggggagcgggtggcgctgctggtgacacgtggcttccgagacctgctgcacattggcacccaagcccgtggggacctctttgacctggccgtgcccatgcctgaggtgctgtatgaagaggtgctggaggtggacgaacgcgtggtgctgcaccgtggagaggcgggcaccgggacgcctgtgaaaggccgcacggg

SEQ ID NO: 14536 - DNA, 9345 bp, Homo sapiens
  source 1..9345: mol_type = unassigned DNA
ccgaggagcctgcggctgctcctggctcacagcgctccgggcgaggagagcgggcggacgccgggggctgggccggtgcgggcggcgaggcaggcggacgaggcgcagagacagcggggcggccggggcgcggcagccggcggcgtcggggccgcggcctctgccttgccgctcccctcgcgtcggatccccgcgcccagggcgcacggtggagagggacgcggcggagccggccggcagccatggaaccggccccctccgccggcgccgagctgcagcccccgctcttcgccaacgcctcggacgcctaccctagcgcctgccccagcgctggcgccaatgcgtcggggccgccaggcgcgcggagcgcctcgtccctcgccctggcaatcgccatcaccgcgctctactcggccgtgtgcgccgtggggctgctgggcaacgtgcttgtcatgttcggcatcgtccggtacactaagatgaagacggccaccaacatctacatcttcaacctggccttagccgatgcgctggccaccagcacgctgcctttccagagtgccaagtacctgatggagacgtggcccttcggcgagctgctctgcaaggctgtgctctccatcgactactacaatatgttcaccagcatcttcacgctcaccatgatgagtgttgaccgctacatcgctgtctgccaccctgtcaaggccctggacttccgcacgcctgccaaggccaagctgatcaacatctgtatctgggtcctggcctcaggcgttggcgtgcccatcatggtcatggctgtgacccgtccccgggacggggcagtggtgtgcatgctccagttccccagccccagctggtactgggacacggtgaccaagatctgcgtgttcctcttcgccttcgtggtgcccatcctcatcatcaccgtgtgctatggcctcatgctgctgcgcctgcgcagtgtgcgcctgctgtcgggctccaaggagaaggaccgcagcctgcggcgcatcacgcgcatggtgctggtggttgtgggcgccttcgtggtgtgttgggcgcccatccacatcttcgtcatcgtctggacgctggtggacatcgaccggcgcgacccgctggtggtggctgcgctgcacctgtgcatcgcgctgggctacgccaatagcagcctcaaccccgtgctctacgctttcctcgacgagaacttcaagcgctgcttccgccagctctgccgcaagccctgcggccgcccagaccccagcagcttcagccgcgcccgcgaagccacggcccgcgagcgtgtcaccgcctgcaccccgtccgatggtcccggcggtggcgctgccgcctgaccaggccatccggcccccagagcgcccctccctagtgacccggaggccacatgagtcccagtgggaggcgcgagccatgatgtggagtggggcagtagaaggtcggaggcttgggaccgccagatggggcctctgtttcggagacgggaccgggccgctagatgggcatggggtgggcctctggtttggggcgaggcagaggacagatcaatggcgcagtgcctctggtctgggtgccccgtccacggctctaggtggggcgggaaagccagtgactccaggagaggagcgggacctgtggctctacaactgagtccttaaacagggcatctccaggaaggcggggcttcaaccttgagacagcttcggtttctaacttggagccggactttcggagttgggggtccgggcccaggacccagaaagggcagtggtggggacagttgcttgaaaactgagctgcaagactgggcctctgtgtagtagggaggagcctcctgtgaggggagacccagagacaggacagctgggtgtggctacagctgaagatttggtcaccagatagggcgcctgtgcaaagggcctgtggcctcatctttggatacgggatacagtcccagccctgagttctagcaaggggcaaggctcgctgaggtccaggtccgacttgacacctttataaatagaatataaaagactgaggggccaggcgtggtggctcaagcctgtaatcccagcactttgggaggccgaggcaggtggatggacatgagcccaggagttcgagactagtctgggcaacatgggagaccctgtcgctacaaaaaatacaaaattagccaggcatggtggtgtgtacctgcaggcctagctccttggaaggtgagaggatcacttgatcccaggagtttgaagctgcagtgagctatggtggtgccactgcactccagcctgggggacagagtaagactctgtctctcaaaaaggagagagagggagaatgagggaagaagagataggaagagagagaaacagtataccttttatctctttgacaggcatgtatttccttggaatgggcaggaatccctcagaatcggtggccacagtggggcttgggacaggacagcagagcggggggcagccactccaggatagggtaataagacaggaccttggttggagtagggtccccagaactgagtactaatgggggcccagaggcttgggaaggagaaggcttccaaaaccagttcgaaaacccagacccggagtggacctccgtgccaaggggtggtggtgggtgggtggaggaagaggtgggctcctgcttcaaggttaggtcttccagtggaaggtggatgctttctgtgagtccccagggccctagtttctctggcccagatactggaggacagaggaccacctacttagatcccgtagatggtaagtggtgcctgggactcttgagggcggggggcggggtatgagaagcatcagttcgcacttggtgctgggtcctgggccctgataagaacctggatgaaatcctcttccattctcccaacatctggctgcatccatgtgtctggtgtcaatgactccagtgaactggaactgcccatatggggacctgaccttgaaggaactggggggagaagcttttgtaactgcaatgccggcatcagtgtgtgtccccctctgcctttccccccaggctccccaggtcccccacctgctccagcccagctgtccccttcacgctgctgagagtgatatccacctggagttgggtgtagaagtttttcttttcattggttcggcattttattcaggcactcctggatctttgcttcccagaatatcagtgtctgtccttgttctctgtacctcccccgtgcctcatctcctctccctccgctgctgtcccctccctcaccaacactgcctcagtaatgcacccctgactccctattgaagcagtgtgctgacatccttgtaaaaacaaatttaattttcttccttttttgggacagatggaaagaaattgacgtctttgtctcaaacaaaagaaaaaagaaaaagaaacaatatacttcttttccctttgacagccatgtctttggaacaaaagctgggaggctgtcactccagcagggactgaatagcatgcagggggctggggacttaggcaccaagaggggctttgggcacattagggggaagggatgctctcagagggcaaagcacagcccccttctcagggtgaggctcccagcagccccagacccggggatgtgcctcctttgggaaatggctaccccgggtcctggaaagatgtggggccatgcccagcactcacatccagcctgccaagccattgtgacctggggtcccaagccacctagatcactctcactaccttgtgaccacagagacccctgtgtctgagggtgggaggtcgtcagcatggcaggagacacttctcctcatcaggggtcctcctgtgaatgctttgggggtatggcagaaaaagggacaatctaggaactggggaagactcctgaaggaggtgacattggagccaggctgtttactctccctgcaggacctgtgtcccctcccaggataggcctgtttcaaggctgcttgaagcccactcactgccatctcctgtgtctgtaacagatctggctgttttttgccccttctgatatgtaaatctgtcctgaggtcagcagggcccgggtccggaccacgtgtgtttaaggtagtgcaaacttgtattgaaatctacttcatgccaagcatgcactctgggcatcaggactcggaatgagtcagccttggccctgccctcagaaagcctgagccagtgttgggagataaagcatcaacagatgattgcacctcagtgtgatgagtgcggtgacagggagccccagggagggtgtcacagggaagtgccttttctagcttttcactaaaacacatgtttgtcgcagttctgtaagaggtggaaaagggtcggggaccctgaaggatgaataggagttggccaccaaaaagaggaaatagcgtgtgcggaggcatggggatgtttaaatgcttggcaaacccaacaagttgggtgcagctggagcatggggcttaactaagctcttctgtgtgccaggctctctgccaggtgtcttgtgtgcatcagcccacctgatcctcaggacagcctggtgaggaagtagtgttatccccattgaggacaaagagagctgaggctgagagaggtcaggctacttgctcctaagtcacagggcctgttcgtagtggcagaacttgggtccctggaattccagggtccatgtttccagttaattccaggcatcagtgaagtagaaaggccttagaagctggaaccccagaatgaggttttgaagacctaaaaccaaatggaaaaatctaaaggaaacgagcaattttccatgaacttttgttcctcctgaagctctccaaatcttcacgtttcagaatgtactgtgcatggtgcattttaaagctctaaattgacagtgtaattctagatcgtcacagggttctcaaaactgcagagtaggtctgtttcccccaaaatttccatttatctccctccaggaggagggagggaagtttttgcccctgatttcaaaatgtcctactgtttcagatctcttcttcttcatcatcttttttttttttttttcagccagtgtcttgctctgttgcccagtctggagtgcaagtgcagtggtgcagtcatagctcactgcagtctcaaactcctgggctcaagtgatcttcccacctcagcctcctgagaatctgggacgacgggtgtgtgacaccatgcccagcaattttatttttatttttattcatttattttgtttgggtttttttttttctgagacagggtctccctctgtcgcataggctggagtgcagtggcaccatctcggctcattgcaacctccgcctcctgggttcaagtcatcctcccgcctcagcctcctgagtagctgggattacaggtgtgcaccaccataacccagctaatatttttatttttagtagagacggggtttcaccatttggccaaactggtctcgaactcctgacctcaggggatctgcccgcctcagcttcccaaagtgctgggattacaggcgtgagccaccaagcccggccaatttttttttttttcaatagagaccagagtgtctctgtgttgcccagactggtcttgaacttctgtcctcaagcaattctcctgccttggcctcccaaagtactgggtttacaggtgtgagccactgtgcccagctctcatacctcgtcttgatgcagtagaagtagtggttaagcctggaatcagatcttggttttccctctctgagcctcagtttcctcatctgtagagtagacttccttcacgggtggttgtgaggatttaatgtatgtatagggataaggcccagaacgtaagtaaactctaagtacatggtaagtggcagtcactgcttacaagtggagccagggttcagggtcagagctagagacctacagggaagagtaggtgagctgtcggggctagtgatggagagagagaagagactggagatccagcttggggatccccttgcttcctggcccaggagccaccatggagagtgagaagctgccagagaagcaggaggaggatggagagaatgtgctaccatggaaactggaggaggagggcgttcccaggaggagggagtgatggataatgtcaagtgtcataagagaggatgcgagtagggagggcaggagggtgatgggagctctccaatttagttttttacatggcccaggcagcccccaagcctggatcaaatcccagctctcaagctaactggctgtgtgacctagacaagggatttgccttctctgagcttcagtttccttctagagttgagatgtgggaattggtccatctctaatacgatcatcagcctcacttaataagagtcctagctttgccgaattcttggccacgtgctagcagtgtgatcttaggcaagtcacttcacctccacgagagcactctctgaaagctagagatatggtaagcaaagtgccaccaaagtgcctggcacatagtggggcctcgatacaggcttattctctgataattacacgtgtgccagaggcagctgctctaaggaggcttgctgggcttggaattagaaatgctcctcaagggctgggtgcagtggctcacgcctgtaatcctagcactttgggaggccaaggcgggtggatcatgaggtcaggagttcaacaccagcctgaccaacatggtgaaaccctgtctgtactaaaaacacaaaaattagccaggcgtggtggcgtgcacctgtaatcccagctactcaggaggctgaggcgggagaatcgcctgaacccaggaagcagaggttacagtgagccaagatcttgccactgtactccagcctgggcgacagagcgagactctgtctgaaaaaaaaaaaaaattaaaaagaaatgctcctcaagttggagagggcccactagcatcctgagaggacttggaagaacaacagtccaggctgggcacctgctgggtctctgtccaaaggccagccctctctttgtgtcagccgcagatccctcacctagggcatgactactggctgccagctcccactaacacctgctgcagatccagactgaagccggccccagcggccccaaagcccctaggaagtgaccaccccccatccctggcacccagatcctggcccctgcactcacacacaaaacacatacagatgcctctctttcatcatgtatttattcctttatttctgggagccgggaggagtgacgggagcaaatcaggacctggccgccccacgctgagcttgcagatattgagagttgggtgacagatggctgtgtggttcaggctgcaggcagcttgggaattcaaaatggggcttagagaggagctggagggggccctcgaggtggacgtagtgatgcagtagggcatggcactgcgaggttgcccgggttctagtcccagcaccatcaccggggatgagccgtttcagagtgtggcactctgtcacactccatttcattgagaggccactgagacattatcaatgggtaatgtacagcacttccatggcataactcatttaatcttcacagcatgatgatgaggtaggcatagtatcattacctccattttacagatggggaaactgaggctcagagaagggaatgacttgcccaagaccacatggcttctcagtgattggctcagctaggatcccacctttggtccttcaagtccacttcctctgctttcctcttcctgcaccctgagaggaaatgctctgagtataccgagggtcctcaggagactctcacatccagctcacagtcacaggctgagcattccctgtgctgggttctgtacctcatcatgttggcagcagaggcacgtgccagctgctcaaaaaactgctgtaaccttggtagatccctctccccatccatttcttccttgccttggaagtcctgcttgtttgataattttctgactgactgccatgttgttgccttgtgaccttgggcatgtcatttcactctgagccatttctcagtcatggatgacagcacttagctgatgagaagttgagaagattcagaaagaggctatgagtgaaggaccttgtctgttttggtcatgaaagtgttcccaggaaatgcaaatggacacacagtagttatctactgagctaatgaacaatgtccctggtgcatagtaagtgcccaataaaatgcagcttttttcatattatctaatgttttaggccatgcctgcaccaacccatgcttctttttttttttctttctttctttctttttttttttttaagacagagtctcactctgtcacccaggctgaagtgcaatggcgagatctcggctcactgcaacctccgccgcccgggttcaagcaattctcctgcctcagcctgctgagtagctgggattacaggcacgtgcccggctaattttgtatttttagtagagacggggtttcgccgtgttggccaggctggtctcgaactcctgacctcaactgatccacccacctcggcctcccaaagtgctaggattacaggcatgagccaccgtgcccagcccaacccatggttcttaatgctgcaggtgggtccggagaaaggcttttctcttttaaccatctccttgaatttcagaaggtgggacaacatgtgctggaaagcagttcttaagaggacatcttttcccaagctccttagccttagctgtcctctcctgccctcaccaggactgccctctcagggacccaagaggaagggacagcctggaaaggaagaaggtcccgggccatctgcgtcatggggatggagtcccttggcgtgtgccggtgcaaatacactcctgtaacggggctcatctagaatctcctctcggaatgaggagaccgcaaatgtggttttgaatcttcattgtccacttcattgctgtggtgttgggcaggtctctgtccctctctgggcctctgcacgatggaggggtaggagttgatggttctgaaggctctgccatcctggaaaagaactgagacacttccctcatgttcctgggtcccagaaacagacatctgttggtaaaatctactgggcatttgcccagagacagggaaaagaatgcctgggggtctgtaataggagctgccccaattaggggcagggaggcgggcatgtaaaaaaggaagcttaaagctttgttttcaggctttttgcctaccccaggctccatcttggtaccaagtactcaaccttctgttttctcaataaagtgagccctcttctcggtgtctgca

SEQ ID NO: 14537 - DNA, 1217 bp, Homo sapiens
  source 1..1217: mol_type = unassigned DNA
ccgaggagcctgcggctgctcctggctcacagcgctccgggcgaggagagcgggcggacgccgggggctgggccggtgcgggcggcgaggcaggcggacgaggcgcagagacagcggggcggccggggcgcggcagccggcggcgtcggggccgcggcctctgccttgccgctcccctcgcgtcggatccccgcgcccagggcgcacggtggagagggacgcggcggagccggccggcagccatggaaccggccccctccgccggcgccgagctgcagcccccgctcttcgccaacgcctcggacgcctaccctagcgcctgccccagcgctggcgccaatgcgtcggggccgccaggcgcgcggagcgcctcgtccctcgccctggcaatcgccatcaccgcgctctactcggccgtgtgcgccgtggggctgctgggcaacgtgcttgtcatgttcggcatcgtccggtacactaagatgaagacggccaccaacatctacatcttcaacctggccttagccgatgcgctggccaccagcacgctgcctttccagagtgccaagtacctgatggagacgtggcccttcggcgagctgctctgcaaggctgtgctctccatcgactactacaatatgttcaccagcatcttcacgctcaccatgatgagtgttgaccgctacatcgctgtctgccaccctgtcaaggccctggacttccgcacgcctgccaaggccaagctgatcaacatctgtatctgggtcctggcctcaggcgttggcgtgcccatcatggtcatggctgtgacccgtccccgggacggggcagtggtgtgcatgctccagttccccagccccagctggtactgggacacggtgaccaagatctgcgtgttcctcttcgccttcgtggtgtgttgggcgcccatccacatcttcgtcatcgtctggacgctggtggacatcgaccggcgcgacccgctggtggtggctgcgctgcacctgtgcatcgcgctgggctacgccaatagcagcctcaaccccgtgctctacgctttcctcgacgagaacttcaagcgctgcttccgccagctctgccgcaagccctgcggccgcccagaccccagcagcttcagccgcgcccgcgaagccacggcccgcgagcgtgtcaccgcctgcaccccgtccgatggtcccggcggtggcgctgccgcctga

SEQ ID NO: 14538 - DNA, 1359 bp, Homo sapiens
  source 1..1359: mol_type = unassigned DNA
gacagcctccaccagagtccccacctttctggaagctgcagggctctccatccaggatccagaagcattgaaggggaccagccgctgaagggattctcagtcccatctgactccccatgaggctcctggctttcctgagtctgctggccttggtgctgcaggagacagggacagcttctctcccaaggaaggagaggaagaggagagaggagcagatgcccagggaaggcgattcctttgaagttctgcctctgcggaatgatgtcctgaacccagacaactatggtgaagtcattgacctgagcaactatgaggagctcacagattatggggaccaactccccgaggttaaggtgactagcctcgctcctgcaaccagcatcagtcccgccaagagcactacggctccagggacaccctcgtcaaaccccacgatgaccagacctactacagcagggctgctactgagttcccagcccaaccatggtctgcccacctgcctggtctgcgtgtgcctcggttcctctgtgtattgcgatgacattgacctagaggacattcctcctcttcctcggaggactgcctacctgtatgcacgcttcaaccgcatcagccgtatcagggccgaagacttcaaagggctgacaaagttgaagaggattgacctctccaacaacctcatttcctccatcgataatgatgccttccgcctgctacatgccctccaggacctcatcctcccagagaaccagttggaagctctgcccgtgctgcccagtggcattgagttcctggatgtccgcctaaatcggctccagagctcggggatacagcctgcagccttcagggcaatggagaagctgcagttcctttacctgtcagacaacctgctggattctatcccggggcctttgcccctgagcctgcgctctgtacacctgcagaataacctgatagagaccatgcagagagacgtcttctgtgaccccgaggagcacaaacacacccgcaggcagctggaagacatccgcctggatggcaaccccatcaacctcagcctcttccccagcgcctacttctgcctgcctcggctccccatcggccgcttcacgtagctcggagcccttccactcctcccaggtcatctcttggaccagcgggcatcacattctccagcagccgccatctcacacgcctccctcctgtggccgccggcagcatggacaaaggtctccatgcagggggaggaggcctgcttctttccccacagctctcacgtctcccttctccctgcgggtgacaaagaagcccaaggaccacctccttcctgcctcattgtaataaaattccccacactga

SEQ ID NO: 14539 - DNA, 560 bp, Homo sapiens
  source 1..560: mol_type = unassigned DNA
gccgctgaagggattctcagtcccatctgactccccatgaggctcctggctttcctgagtctgctggccttggtgctgcaggagacagggacagcttctctcccaaggaaggagaggaagaggagagaggagcagatgcccagggaaggcgattcctttgaagttctgcctctgcggaatgatgtcctgaacccagacaactatggtgaagtcattgacctgagcaactatgaggagctcacagattatggggaccaactccccgaggttaaggtgactagcctcgctcctgcaaccagcatcagtcccgccaagagcactacggctccagggacaccctcgtcaaaccccacgatgaccagacctactacagcagggctgctactgagttcccagcccaaccatgaggacattcctcctcttcctcggaggactgcctacctgtatgcacgcttcaaccgcatcagccgtatcagggccgaagacttcaaagggctgacaaagttgaagaggattgacctctccaacaacctcatttcctccatcgataatgatgcctt

SEQ ID NO: 14540 - DNA, 5083 bp, Homo sapiens
  source 1..5083: mol_type = unassigned DNA
agaagagcgatgggagggggtgacgtggcagtgacaggcgcataaactgaaatgaatggcggaaacagcagccaatcggcgatcagattggccgggcattccgcattctcccgtcctccctgagcgctggaaacttcaggaaagcaccaatgagcttccccaaaagtctgattggcctttatctgaaccaatcaaaggtgggtctggcggacgcgtcccaccccaggctctcactgggcgctgtagaatgacaggcccgagagaaatgccaatatccgcggggtcttcctcaagtgacactcagcggcaccaatcgacgtccttcttcccggcggccgagccctcctccccgcggctggccgggcggggcggggacgctgcgcggcggtggctgatgcggtagccgtgtggggcgctccgggcggcgacggcggctctcgtaggcggttccggtcttgtatctccaggcggcggcggctcatggcggcgacggagctgagaggagtggtggggccaggcccggcagccattgcagcacttggcggcggcggcgccggtcccccagtggtgggaggaggcggcggccgcggagatgcggggccaggctccggggccgcgtcagggacggtggtcgcggcggcggcgggaggcccgggcccgggggccgggggagtggcggcggctggcccggcccctgcgccgccgactgggggctcgggcggctcgggcgctgggggttcgggctcggctcgagagggctggctcttcaaatggaccaattatatcaaaggctaccagcggcgatggttcgtgctgagcaacgggctcctgagctactacagatcaaaggcagaaatgagacatacctgccgtggtaccatcaacctcgccacagccaacatcaccgtggaggactcctgcaacttcatcatttccaatgggggtgctcagacctaccatctgaaagctagttcagaagttgagcggcagcgctgggtgacggccctggaactggccaaggccaaagctgtgaagatgctggcagagtcagatgaatcaggagatgaagagtctgtctcacaaactgacaagactgagctgcagaatacccttcggaccctctctagcaaagtagaggacttgagcacgtgcaatgacttgatagctaagcatggcacagctctgcagcgttctctcagtgagctggagtccctgaagttgcctgctgagagcaatgaaaagatcaaacaggtcaacgaacgagccacactctttaggataacatccaatgccatgatcaacgcctgcagagatttcctcatgttagcccagacccatagtaaaaaatggcaaaagtcactacagtatgaaagagaccagcgtatccgactggaagaaaccctcgagcagctggcgaagcagcataatcacctggagagggccttccgaggagccacggtgctgccggcaaacactcctggcaatgtgggttctggtaaagatcagtgctgctctggcaaaggggacatgagcgatgaagatgatgagaatgaattttttgatgcacctgagatcatcaccatgcctgaaaatttgggccacaaacgtactggcagcaatatcagtggagccagcagtgacatcagccttgatgaacagtacaagcatcagctggaggagaccaaaaaggaaaagagaaccagaataccatacaagccaaactatagcctcaatttatggagcatcatgaagaactgcattggaaaagaactctctaagatccccatgccggtaaactttaatgagcccttgtccatgcttcagcgccttactgaagatctggaataccatgagctgttagaccgagctgcaaaatgtgagaattctctagaacagctctgttatgttgcagctttcaccgtgtcctcctactccactactgtcttccgcaccagtaagccattcaacccactgcttggggagacctttgagctggaccgattagaggagaatgggtaccgatccctctgtgaacaggtgagtcatcatccccctgctgctgcgcaccatgctgagtccaaaaatggctggacattgcgtcaggaaatcaaaatcaccagcaagtttcgaggcaaatacctctccattatgcccctcggtaccattcattgtattttccatgcaactgggcaccactacacttggaagaaagttaccacaactgtacacaacattattgtgggcaagttgtggatagatcagtctggcgaaattgatattgtgaatcacaagacaggagacaagtgtaatcttaaatttgttccttatagctacttctctcgggatgtagcaagaaaggtgacgggggaagtgacagatccatcaggaaaagtccactttgctcttctggggacgtgggatgagaaaatggaatgtttcaaagtacagccagtcattggggaaaatgggggtgatgctcgacagagaggccatgaagcagaggaaagcagggtcatgctgtggaaaaggaatcctttaccgaagaatgcagaaaacatgtactacttctcagagcttgctctgactctcaatgcttgggaaagtggcactgcccccacagacagccggttacgacctgaccagagactgatggaaaatggacgctgggatgaagcaaatgcggagaagcagcgcctggaggaaaaacaaagactttccagaaagaagagagaagcggaagctatgaaagccacagaggatggcacaccatatgatccctataaggcactgtggtttgagcggaagaaggaccctgttaccaaggagttaacccatatttataggggagaatactgggagtgtaaagaaaaacaggactggagctcatgcccggacattttctgaaacggcagtaacaaaaaagaggagcatataatggagaagaggacagaggatgtgtgggaaagctggaagttgtgactctcttaccaagtgctttcctcaagtttgtctctcttgaccaatcattttttccaaatcaatcaccagaaggagacaccagtggtggtgattggctggttgccttagctgattgaaactgaaatcgacataggagatactatgtctgtaagggagaggtttagtggccgaaggttagtgttattccacatccacgaagtcaagtattcttggctcttctttctccctctgcccccatttaagacaatgtcactcaccctccccttgtagtatcctgctcagccaagatctgcctaagattatgattcaggggcattttggtgctgttaaaagcaagagccgaatttagaagttcccttaaaaagaaacacataagacttaccaatggaggcattgtgaatggttgcagtggagcttaggtataacatcatcaagtgtgttcacacgcggggtcggtttaatggagtgtccacgcggagataactgcgatattggaacacctgtgagagagattgttctatagggctggaatattcagagttacattcttggaagtttctgtttttacttgcatcaaacacccctctgttgttctccatcatctttaatagcaactggagaccactttggtcattggtaagggggtgcattctcctcacaaaggggttttatggacttcctcaggcggagagcttctgagaacacaggcaggatggaaaaagactactagccacttttgctttcccaaccccccttaatgccatccttcattgtctttctggcttctcttcttctggcacagtaccattttgggtctgtgccccagtgtggagcaaaacattgcctgtcccattctgatatacttcagaatttgagagcagaagttaatgtggaacaaaagttttcaccatctctcaagccccaaggactggagccacctctggaataatgtgttaaatatctgtatattatatatatgtagagaaaaatctaattttttggtttgatttccttcccattaagaatcttgttttttgatacccttgtctccctgagactctttcttggacacgtgttgatgtggatggcactcctgctctccatcttttatgggcagagagatttcaaaacctgagcaggatcatgtctggcagttactaaacagggactttgtccatggtttgtatcatggggtgcctactgctgtctaaactctgctctcctaattagctgactcttgaaaatgaaatcctaacctctttcctgcctcttttctttctcttttcaggaagagtgtgggtagaaagtccggagggcaacttccaatttaattctgctctgtccggcgcataggctgaattccaaaagaactttcttcctaggatgtggggcttaaagcaccgtcatgtggggtggatcagataattgctcctgtggggccctggcttccttctctgtttgtgcagtatttgtttttgttgtcttgttgagaaatatcccctgtgcaacccacccttggttgaggatcacaaattgaggtgccttccttgtatgctttttgttagtattttttgtttttgttccttaactgctgagcctcagccagcgtgggtcctgggggaaataccattccaaaggaagccatccctatggggaaattggttttactgggtaaattaatacttttatttcttcccctatcccttccttcctagttgtgataaacatgggagaggagtgactttgactgctggggaatttcctcctaagaaccttattcccaaaataagccagggattatgtcaaggcttctttcaaggaggctcataaaagcagtgacctcatccggggctttggatagagtgagaattccccaactaaattggacttctctgctttatccccttctcttccttcaccatctgcactacatttctggctgatcccaatcagattcccgctaatggaagaagtttagaatctttcaggtggaataaagtcacatgaaaacaaaacacaactatatatattttcagtttttttgccttattgatttttttccaaaaaaaaaaaactactaaattaaataattttttaaaagtca

SEQ ID NO: 14541 - DNA, 991 bp, Homo sapiens
  source 1..991: mol_type = unassigned DNA
tcagtggagccagcagtgacatcagccttgatgaacagtacaagcatcagctggaggagaccaaaaaggaaaagagaaccagaataccatacaagccaaactatagcctcaatttatggagcatcatgaagaactgcattggaaaagaactctctaagatccccatgccggtaaactttaatgagcccttgtccatgcttcagcgccttactgaagatctggaataccatgagctgttagaccgagctgcaaaatgtgagaattctctagaacagctctgttatgttgcagctttcaccgtgtcctcctactccactactgtcttccgcaccagtaagccattcaacccactgcttggggagacctttgagctggaccgattagaggagaatgggtaccgatccctctgtgaacaggtaccattcattgtattttccatgcaactgggcaccactacacttggaagaaagttaccacaactgtacacaacattattgtgggcaagttgtggatagatcagtctggcgaaattgatattgtgaatcacaagacaggagacaagtgtaatcttaaatttgttccttatagctacttctctcgggatgtagcaagaaaggtgacgggggaagtgacagatccatcaggaaaagtccactttgctcttctggggacgtgggatgagaaaatggaatgtttcaaagtacagccagtcattggggaaaatgggggtgatgctcgacagagaggccatgaagcagaggaaagcagggtcatgctgtggaaaaggaatcctttaccgaagaatgcagaaaacatgtactacttctcagagcttgctctgactctcaatgcttgggaaagtggcactgcccccacagacagccggttacgacctgaccagagactgatggaaaatggacgctgggatgaagcaaatgcggagaagcagcgcctggaggaaaaacaaagactttccagaaagaagagagaa

SEQ ID NO: 14542 - DNA, 873 bp, Homo sapiens
  source 1..873: mol_type = unassigned DNA
gagaaccagaataccatacaagccaaactatagcctcaatttatggagcatcatgaagaactgcattggaaaagaactctctaagatccccatgccggtaaactttaatgagcccttgtccatgcttcagcgccttactgaagatctggaataccatgagctgttagaccgagctgcaaaatgtgagaattctctagaacagctctgttatgttgcagctttcaccgtgtcctcctactccactactgtcttccgcaccagtaagccattcaacccactgcttggggagacctttgagctggaccgattagaggagaatgggtaccgatccctctgtgaacaggtaaaggaacctcagaaccataacgcatttcctttctgaagaaagagatgattttttggttaatcccctgggtcttatgtttgcagaaattctagtccctgtcatcccagcttttattctttttcttcagaacgtcagcgttggagaccctggaggttctgggattcacctactgttgtgggtgtaaaaacgtcaagtgtgaattttggtgtttctcaccaatttataggcagtatctttttcttctcctttctgccgtcttaatttgaacctgatttcttcaaggtgagtcatcatccccctgctgctgcgcaccatgctgagtccaaaaatggctggacattgcgtcaggaaatcaaaatcaccagcaagtttcgaggcaaatacctctccattatgcccctcggtaaggttaccatctttgtcagaattaatgctcctggaatgaaaggttttctggcacgatggaggaggtcactggctaaagagtcaggagacaggaggtctgattcgagcactgaccctcacta

SEQ ID NO: 14543 - DNA, 6600 bp, Homo sapiens
  source 1..6600: mol_type = unassigned DNA
catttcccggggatttggagcaggcacgcgcggcccgggcgtccggagctgtagcagcagcagcagccgccgtgccggggccgccaccgcggcgggcacccgcgtcccgggcgcccacggaccatggagagggcagtccagggcacagacggcggcgggggtagcaacagcagcagccgcagcagcagccgtgctacctcggcgggctcctcgccctcctgctctctggcgggccggggggtctccagccggtcggcggcggccgggctcggcggcgggggaagccgcagcagcccgggctctgtggccgctagcccgtccgggggaggcggccgcaggagggagccggcgctcgagggcgtgctcagcaaatacaccaacctcctccagggctggcagaacaggtacttcgtactggatttcgaggctggcatcctgcagtattttgtgaatgagcaaagcaaacaccagaagcctcgaggagtcctgtctttatctggagccatagtgtccctgagcgatgaagctccccacatgctggtggtgtactctgctaatggagagatgtttaaactgagagctgctgatgcaaaagagaaacaattctgggtgactcagcttcgagcttgtgccaaataccacatggaaatgaattctaagagtgctccaagctcccgaagccgaagtctcactttgctcccacatggaacacccaattctgcgtctccctgtagccagagacacctcagtgtgggggcccccggtgttgtcacaatcacgcatcacaagtcgcctgcagccgcccgaagagccaagagtcagtattccggccagcttcacgaagtcagagagatgatgaaccaggtggaagggcagcagaagaaccttgtgcacgccattgagtccctgccagggtccggccccctcactgccttggaccaggacctgctgctcctgaaagctacctctgctgccaccctcagctgccttggggagtgcctcaacttgttacagcagagtgtgcaccaggcgggccagcccagccagaagccaggagcctcggaaaacatcctgggatggcacgggtccaagtcacattccacagagcagctgaaaaatgggacacttggctctttgccatcagccagtgccaacataacctgggcaattttaccaaactctgctgaagacgaacaaacctcacagccagagccagagccaaactcaggctctgaattggttttgtctgaagatgaaaaaagtgacaatgaagataaggaagagacggaattgggcgtcatggaggatcagcgtagtataattcttcatctcatttcacaactcaaacttggaatggatttgaccaaggtggtgcttcccacctttatcctggagaagcgatctttgctggagatgtatgcagatttcatggcgcacccagacctactgctggccatcaccgctggggccacaccagaggagagagtcatttgcttcgttgagtattatctcacagcctttcacgagggccgcaagggcgctttagccaagaagccctacaaccccatcataggcgagacatttcactgctcctgggaagttcccaaggacagggtcaagcctaagaggactgcttcccgctctcctgccagctgtcacgaacacccaatggccgatgacccttccaaaagctacaaactaaggtttgtggctgagcaagtgtcccatcacccacccatctcctgcttctactgtgagtgcgaggagaagagactgtgcgtcaacactcatgtatggaccaaaagcaagttcatgggcatgtccgtgggggtctctatgataggggaaggtgtgttgaggctcctggaacacggggaggagtacgtattcaccctgcctagtgcctacgcccggtccattctcaccatcccgtgggtggagctcggaggaaaagtcagcatcaactgtgccaagactgggtactcagcgacagtgatattccacacgaagcctttctatggagggaaagtccacagggttaccgcagaagtgaagcacaacccaaccaacaccattgtttgtaaagcccatggggaatggaatggtactttagagttcacctacaacaatggagaaaccaaagtcatcgacacaaccacactgccagtgtatcccaagaagatcagacctcttgagaagcagggacccatggagtccaggaacctctggcgggaggtgacccgatacctgcggctgggggacattgacgcagccaccgagcagaagcggcacctggaggagaagcaacgggtggaggaacggaagcgcgagaacctccgcacaccatggaagcccaaatattttatccaggagggcgatggctgggtatacttcaatcccctctggaaagcacactgatggggtggaggtgcagagctttccagtatagccctgtttttgtaggaatattaaagtagtagagtatcagggttttgttggcattcactgagaccttgtattagcatccaagaaatgatgagagagagagaaattatatactatgaaaagtgcacccccacactctgctagaggaatgaatttattcaagagccattcggggcacgtgtgtgtacacaccgtatacgttcacacacatgcactatgtaaacatctgagtatgattacacatttaaatactgcactcaccaaggttaaagtgggtaatcataagctcctttttatcaatgaagtttgaagtttttctatttttcactttgccaaaaatgttttacactcacaaagatattctcacttagtcaactcctgtcaaaatgaaggtgaactggcatggcccgatcactgtccataagggagaaagtggctcattcctggtagaagtatgggtggttatcatttcaaaattattgtgattctcacctccctccccacctcagtgttttgtctgtccgcgcccaagaaagataagcaagtatttcctgctggatgggggttggcaggaagctgttaaagatttatgccagagccttgcaggatggagcacctctgggacaactaagagccaaggcccaccaaggagttttccacccgtctctcatggtcacagcgctagtcattcatttttgagaagttgcttcttttacatcagaaaaccagtcaatcatatggagacttcttttgtgatgaaaaagggctttagaagttaaatacatgcatgcacatgaaaacatgcacaaccacagcctcaatcttgtatttagtttggggaaagagaagagaatttcctgtggattattttttcctcaagtgcacctctctggttaacccaaactctgcaagaaagcactgtgactaaaacatacataacgcctgcataaatattccatggtttcagttaaatttcagtttttagcctttacacatgaggtcaaaggagtgacgaaaatacaaagcaaggaaaaaatgaaatatctggtttttgctgaatgcttaatttattttttactgtgccactccaatatttatcaaatccaaatagcatgaatgcttctctgtagtaatactaattttgtgccttttgtctgctttcttaagaccagttgttcacactttgtagatattagacaaatatatttcgattgaatacatatctgtgtctgtgttttattttcagggattcaacagttctattaaattggtggctctaagtgagctcaacttttcctggttaaatatttctagttattgatatgaagagcaatcatatctatatggaaaaagtatttaacacatttaaaaatgtaccagataaacatttatgaatattttctggtaagtccataagaacatttaactcctacccagtgagtgttgtttcacgagaagagtcactgccagaagtcacaatagaagcctacttaggtccacagtctttaaagcatctgggtgaatcaagtatctggaaccatcttatttctgacagagaaagtggaacaaatgctattttgagaaaaagaagaaaactcaactcaatgagactgaaaagtaatcactgtgttgttggattttccagtctgactacaaagcataaaccatctgggaagtaaaacatggagagggctcacttttcttttgaggccaggggtacatttaaaattgtgaaatgttatgtgtcaggagatttacataaaacatatgtactccaggaataattataaatacccttgtagccactgcttaagcaaagaaacctgtttaccagtaccttaaaagccactattgtgcccctatacaattgtatccctctccatgccttcctggaataaccatccccttatgggttttttgttgttcttttagactatacacactatgtgtgtatttctaaacagtgtgattggttttacccatttttgtaaaaattgaatcataccctagtttgcctatttgagccaatattttctttctagttcaatccttgttgctctatttgttcattttcttgctgagttcatattatgttttattgtggtaaaatatatgtaacaaaatctaccattttaactattttttttttcccagatggagtctcactctgtcacccaggctggagtgcaatggcgcgcaatctctgctcactgcaacctctgccttccgggttcaagcgattctcctgcttcagcctcccgagtagctgggattacaggcgtgtgccaccatgcccagctaatttttgtatttttagtagagatggggtttcaccatgttggccaggctggtctcaaactcctgacctcaggtgattcacccacctgagcctcccaaagtgctgggattacaggtgtgagccactgtgcccagcctggcattttaaaaatatactgagaagtggaattgctatatcatatgaaaattctggtttaagttttaaggaattgccacacagtttctcacaagagctggctgccacattttgcaatgccactagcaatgcacaagggatccaatttctccacatcctcaccaatacctattattttgtttttacttttgttgtttctttaaccccatcctaatggctatgaagtgccatctcaatgtggttttgatttatatttccctaatgattagtgatgttgagcatgtgtttttgtggttttggccatttgtaaatctttggagaaatgtttattcaaatccttttgcccattttaaaattaggttctttttgttgagttttaggagtcctttatgggtattaatcctttctggatattaatcctttatcagatatgatgtgcaaatattttcttctgactctttggttgcctcttcactgttaatggtgtcctctgatgtacaaaagtatttaattttgataatgtctaatttatttttctttgtacttgtgcttttgatgtcatatccaagaaatcattgacaaatacaatgctgtgaagtttttgtcctatgatttcttctaagagttttatagttttaggtcttactggggggtagggggtactttgatccattttgagttggtttttatatatggtgttagataagggtccaacttcattcttttgcatgtggatatccagtttccccaacaccatttgttgaaaagactctgcattccccattgagtgatcttggtaccttgttgaaaatcactggctatatacacgaatgtttatttatggcctattcttttccaatggtcgatgtcagtctttatgccagtaccacactcttttagttactgtagctttgtagcaagttacaagattaggaagtatgagacctccaacttttttattcttttttcaatattgtttcgtctgtacagggtcatttaagattccatgtgaattttaggatgaaattttctatttttgcaaaaaactctgggattttgatagggattgcattgaatctgtagatccctttgagtagcattgtcttaacagtaagtcttccaatctgttaaccagaatatctttccatttatttatctgtcttaatttctttcagcatgttttgtagttttcactgggcaagtcttcctcagttaagtttaattcttaagtattttactctttttggtactactgtaagtagatctttctcagtttcctttttggattgttcaatgttggcatataaaagtgtaagtgccaggcacagtgtcacatgcctatagttccagctactcaggaggctgagacaggaggattgcttgggcccaggagtttgagatttcagcatgctatgattgctcctgtgaatagccactgcactccagcctgggcaacataacaagacctcatttcgtaaaaaacacataatactgatttttgtgcattggttttgtatcctttgctgaatttgtttattctaacagttttttggggggtgtgtgggatctaggattttctagatacaatcatgtcatttgctaacagattttacttcttccaaatttggatgtcttttatttcttgttcttgcctaattgctgtacctagaacttcaaatactgtgttgaaggaaggaggcaaaaaaaaaaaaaaaaaaaaa

SEQ ID NO: 14544 - DNA, 7723 bp, Homo sapiens
  source 1..7723: mol_type = unassigned DNA
gtcagtattccggccagcttcacgaagtcagagagatgatgaaccaggtggaagggcagcagaagaaccttgtgcacgccattgagtccctgccagggtccggccccctcactgccttggaccaggacctgctgctcctgaaagctacctctgctgccaccctcagctgccttggggagtgcctcaacttgttacagcagagtgtgcaccaggcgggccagcccagccagaagccaggagcctcggaaaacatcctgggatggcacgggtccaagtcacattccacagagcagctgaaaaatgggacacttggctctttgccatcagccagtgccaacataacctgggcaattttaccaaactctgctgaagacgaacaaacctcacagccagagccagagccaaactcaggctctgaattggttttgtctgaagatgaaaaaagtgacaatgaagataaggaagagacggaattgggcgtcatggaggatcagcgtagtataattcttcatctcatttcacaactcaaacttggaatggatttgaccaaggtggtgcttcccacctttatcctggagaagcgatctttgctggagatgtatgcagatttcatggcgcacccagacctactgctggccatcaccgctggggccacaccagaggagagagtcatttgcttcgttgagtattatctcacagcctttcacgagggccgcaagggcgctttagccaagaagccctacaaccccatcataggcgagacatttcactgctcctgggaagttcccaaggacagggtcaagcctaagaggactgcttcccgctctcctgccagctgtcacgaacacccaatggccgatgacccttccaaaagctacaaactaaggtttgtggctgagcaagtgtcccatcacccacccatctcctgcttctactgtgagtgcgaggagaagagactgtgcgtcaacactcatgtatggaccaaaagcaagttcatgggcatgtccgtgggggtctctatgataggggaaggtgtgttgaggctcctggaacacggggaggagtacgtattcaccctgcctagtgcctacgcccggtccattctcaccatcccgtgggtggagctcggaggaaaagtcagcatcaactgtgccaagactgggtactcagcgacagtgatattccacacgaagcctttctatggagggaaagtccacagggttaccgcagaagtgaagcacaacccaaccaacaccattgtttgtaaagcccatggggaatggaatggtactttagagttcacctacaacaatggagaaaccaaagtcatcgacacaaccacactgccagtgtatcccaagaagatcagacctcttgagaagcagggacccatggagtccaggaacctctggcgggaggtgacccgatacctgcggctgggggacattgacgcagccaccgagcagaagcggcacctggaggagaagcaacgggtggaggaacggaagcgcgagaacctccgcacaccatggaagcccaaatattttatccaggaggtaactctgccgcctgtcattggtcccttgcccaggagagaacttgtcctgagagggtagatgggtttttcttgctgagcccccaagactggataaataccaggcaggggaagggatggactagggcagctcggttctgactccagctttggacaaggcttcaggacaggttttctgccacaatattcatgaaaccttctggagggcagaactgagcaactgacacttcccctccagtatccctatgtcagaaaagcatgtcagcctgcctgtgagggatcgcgatgggactgcagactggatactgttctatttttaaaaagaaaatcatcatggcacctgttagatcatctttagtaacaaattagttgaggagtgcctcacaggccatctcaacacctgggtgggctggagccctcactgatgaagaattgcctttcagagctttgcctcctgtgggccacaagggctagtcatgcaggggaaggccagcctgagtcctgtgcctaaaatgctgttgctgtcacctgcaaatgtgacactagaagctagaaataatatctgggcaagtgggcagggcactgtgtgcccagctgaagcccttatgctcttgaagttgtggagggattgggaagcactctgagaacagaattggaaattatgaaaatgtaggagccacacgtcttaaagcaggcccacaggaacccagcaacatcaatgaagagcaggccggtgagggctggggcagatgccactcatcttccagtgataaaacagattgtctagttgttcatgaggagccagaaatctaaatttttatgagaaatctcatatttgcatggtcaaagatttaaaaaaatttaaataccagtaggcaatcaaaatgtatctgtgggctttccttagcccaggtgctggtaacccctgacttctgctacaaagagggattattctgtctatatacgaggctgagaagtgagttagggcaacatagtaggtaactggggtggattcatggttaagagcaggaagagcaggaagccaccactgttctccccagagtcaggctgtggactgaaggagatttcaaggttggattctggttcagacaggaaagctgcctggagaagactttgcctttatgggtcactgagtggggaccctgtgtgggagccctgcccaggtgaggtaaaaccttgaaagatccttctgtgaggttagctcccttttctcttgagggagctagtagcttgagagagctagtttgtctggcttctgtggaaggctgtgcattaaacagcaacaacaacaagaaaaaacatttacagttcttcctgagtttaagaaaagccagtatgcccataacagaagggctgggaacatgtaaggaataagagtcatctgaacaccagcacagttattcagtatagtgccttctagtcataactagatggtattaataccattttaattcttgcctttttctcacttgatatttgattgatggtgtttcttgtgtgtgctgatttgtttgtgactactgcctgctggagagagcctttgttgggtgttcccctgtgggctggaagtcactggtatgcacacccttgccttttctttcccctggccattcatctagctactctccttttctcttgtcccactgtcaaagtgcttcttttttttggccaagtaatcagtctcgatggaagccaaccaagctccccttttattttgctcatttcttggggtttcctcctgccatgccagggtaggaaggtcaaggtcatctagatctccaaagagcagctgggctgaggaggggtactgaggccagcagcctggcctgcgtgtgaggtattaagacacggcagacacacagagtggctgcggttatccttgcttccccttttccctgttgagaggtctccatgtaataatgcctcctttcttctcttgcagggcgatggctgggtatacttcaatcccctctggaaagcacactgatggggtggaggtgcagagctttccagtatagccctgtttttgtaggaatattaaagtagtagagtatcagggttttgttggcattcactgagaccttgtattagcatccaagaaatgatgagagagagagaaattatatactatgaaaagtgcacccccacactctgctagaggaatgaatttattcaagagccattcggggcacgtgtgtgtacacaccgtatacgttcacacacatgcactatgtaaacatctgagtatgattacacatttaaatactgcactcaccaaggttaaagtgggtaatcataagctcctttttatcaatgaagtttgaagtttttctatttttcactttgccaaaaatgttttacactcacaaagatattctcacttagtcaactcctgtcaaaatgaaggtgaactggcatggcccgatcactgtccataagggagaaagtggctcattcctggtagaagtatgggtggttatcatttcaaaattattgtgattctcacctccctccccacctcagtgttttgtctgtccgcgcccaagaaagataagcaagtatttcctgctggatgggggttggcaggaagctgttaaagatttatgccagagccttgcaggatggagcacctctgggacaactaagagccaaggcccaccaaggagttttccacccgtctctcatggtcacagcgctagtcattcatttttgagaagttgcttcttttacatcagaaaaccagtcaatcatatggagacttcttttgtgatgaaaaagggctttagaagttaaatacatgcatgcacatgaaaacatgcacaaccacagcctcaatcttgtatttagtttggggaaagagaagagaatttcctgtggattattttttcctcaagtgcacctctctggttaacccaaactctgcaagaaagcactgtgactaaaacatacataacgcctgcataaatattccatggtttcagttaaatttcagtttttagcctttacacatgaggtcaaaggagtgacgaaaatacaaagcaaggaaaaaatgaaatatctggtttttgctgaatgcttaatttattttttactgtgccactccaatatttatcaaatccaaatagcatgaatgcttctctgtagtaatactaattttgtgccttttgtctgctttcttaagaccagttgttcacactttgtagatattagacaaatatatttcgattgaatacatatctgtgtctgtgttttattttcagggattcaacagttctattaaattggtggctctaagtgagctcaacttttcctggttaaatatttctagttattgatatgaagagcaatcatatctatatggaaaaagtatttaacacatttaaaaatgtaccagataaacatttatgaatattttctggtaagtccataagaacatttaactcctacccagtgagtgttgtttcacgagaagagtcactgccagaagtcacaatagaagcctacttaggtccacagtctttaaagcatctgggtgaatcaagtatctggaaccatcttatttctgacagagaaagtggaacaaatgctattttgagaaaaagaagaaaactcaactcaatgagactgaaaagtaatcactgtgttgttggattttccagtctgactacaaagcataaaccatctgggaagtaaaacatggagagggctcacttttcttttgaggccaggggtacatttaaaattgtgaaatgttatgtgtcaggagatttacataaaacatatgtactccaggaataattataaatacccttgtagccactgcttaagcaaagaaacctgtttaccagtaccttaaaagccactattgtgcccctatacaattgtatccctctccatgccttcctggaataaccatccccttatgggttttttgttgttcttttagactatacacactatgtgtgtatttctaaacagtgtgattggttttacccatttttgtaaaaattgaatcataccctagtttgcctatttgagccaatattttctttctagttcaatccttgttgctctatttgttcattttcttgctgagttcatattatgttttattgtggtaaaatatatgtaacaaaatctaccattttaactattttttttttcccagatggagtctcactctgtcacccaggctggagtgcaatggcgcgcaatctctgctcactgcaacctctgccttccgggttcaagcgattctcctgcttcagcctcccgagtagctgggattacaggcgtgtgccaccatgcccagctaatttttgtatttttagtagagatggggtttcaccatgttggccaggctggtctcaaactcctgacctcaggtgattcacccacctgagcctcccaaagtgctgggattacaggtgtgagccactgtgcccagcctggcattttaaaaatatactgagaagtggaattgctatatcatatgaaaattctggtttaagttttaaggaattgccacacagtttctcacaagagctggctgccacattttgcaatgccactagcaatgcacaagggatccaatttctccacatcctcaccaatacctattattttgtttttacttttgttgtttctttaaccccatcctaatggctatgaagtgccatctcaatgtggttttgatttatatttccctaatgattagtgatgttgagcatgtgtttttgtggttttggccatttgtaaatctttggagaaatgtttattcaaatccttttgcccattttaaaattaggttctttttgttgagttttaggagtcctttatgggtattaatcctttctggatattaatcctttatcagatatgatgtgcaaatattttcttctgactctttggttgcctcttcactgttaatggtgtcctctgatgtacaaaagtatttaattttgataatgtctaatttatttttctttgtacttgtgcttttgatgtcatatccaagaaatcattgacaaatacaatgctgtgaagtttttgtcctatgatttcttctaagagttttatagttttaggtcttactggggggtagggggtactttgatccattttgagttggtttttatatatggtgttagataagggtccaacttcattcttttgcatgtggatatccagtttccccaacaccatttgttgaaaagactctgcattccccattgagtgatcttggtaccttgttgaaaatcactggctatatacacgaatgtttatttatggcctattcttttccaatggtcgatgtcagtctttatgccagtaccacactcttttagttactgtagctttgtagcaagttacaagattaggaagtatgagacctccaacttttttattcttttttcaatattgtttcgtctgtacagggtcatttaagattccatgtgaattttaggatgaaattttctatttttgcaaaaaactctgggattttgatagggattgcattgaatctgtagatccctttgagtagcattgtcttaacagtaagtcttccaatctgttaaccagaatatctttccatttatttatctgtcttaatttctttcagcatgttttgtagttttcactgggcaagtcttcctcagttaagtttaattcttaagtattttactctttttggtactactgtaagtagatctttctcagtttcctttttggattgttcaatgttggcatataaaagtgtaagtgccaggcacagtgtcacatgcctatagttccagctactcaggaggctgagacaggaggattgcttgggcccaggagtttgagatttcagcatgctatgattgctcctgtgaatagccactgcactccagcctgggcaacataacaagacctcatttcgtaaaaaacacataatactgatttttgtgcattggttttgtatcctttgctgaatttgtttattctaacagttttttggggggtgtgtgggatctaggattttctagatacaatcatgtcatttgctaacagattttacttcttccaaatttggatgtcttttatttcttgttcttgcctaattgctgtacctagaacttcaaatactgtgttgaaggaaggagg

SEQ ID NO: 14545 - DNA, 2624 bp, Homo sapiens
  source 1..2624: mol_type = unassigned DNA
tttcccggggatttggagcaggcacgcgcggcccgggcgtccggagctgtagcagcagcagcagccgccgtgccggggccgccaccgcggcgggcacccgcgtcccgggcgcccacggaccatggagagggcagtccagggcacagacggcggcgggggtagcaacagcagcagccgcagcagcagccgtgctacctcggcgggctcctcgccctcctgctctctggcgggccggggggtctccagccggtcggcggcggccgggctcggcggcgggggaagccgcagcagcccgggctctgtggccgctagcccgtccgggggaggcggccgcaggagggagccggcgctcgagggcgtgctcagcaaatacaccaacctcctccagggctggcagaacaggtacttcgtactggatttcgaggctggcatcctgcagtattttgtgaatgagcaaagcaaacaccagaagcctcgaggagtcctgtctttatctggagccatagtgtccctgagcgatgaagctccccacatgctggtggtgtactctgctaatggagagatgtttaaactgagagctgctgatgcaaaagagaaacaattctgggtgactcagcttcgagcttgtgccaaataccacatggaaatgaattctaagatgatgaaccaggtggaagggcagcagaagaaccttgtgcacgccattgagtccctgccagggtccggccccctcactgccttggaccaggacctgctgctcctgaaagctacctctgctgccaccctcagctgccttggggagtgcctcaacttgttacagcagagtgtgcaccaggcgggccagcccagccagaagccaggagcctcggaaaacatcctgggatggcacgggtccaagtcacattccacagagcagctgaaaaatgggacacttggctctttgccatcagccagtgccaacataacctgggcaattttaccaaactctgctgaagacgaacaaacctcacagccagagccagagccaaactcaggctctgaattggttttgtctgaagatgaaaaaagtgacaatgaagataaggaagagacggaattgggcgtcatggaggatcagcgtagtataattcttcatctcatttcacaactcaaacttggaatggatttgaccaaggtggtgcttcccacctttatcctggagaagcgatctttgctggagatgtatgcagatttcatggcgcacccagacctactgctggccatcaccgctggggccacaccagaggagagagtcatttgcttcgttgagtattatctcacagcctttcacgagggccgcaagggcgctttagccaagaagccctacaaccccatcataggcgagacatttcactgctcctgggaagttcccaaggacagggtcaagcctaagaggactgcttcccgctctcctgccagctgtcacgaacacccaatggccgatgacccttccaaaagctacaaactaaggtttgtggctgagcaagtgtcccatcacccacccatctcctgcttctactgtgagtgcgaggagaagagactgtgcgtcaacactcatgtatggaccaaaagcaagttcatgggcatgtccgtgggggtctctatgataggggaaggtgtgttgaggctcctggaacacggggaggagtacgtattcaccctgcctagtgcctacgcccggtccattctcaccatcccgtgggtggagctcggaggaaaagtcagcatcaactgtgccaagactgggtactcagcgacagtgatattccacacgaagcctttctatggagggaaagtccacagggttaccgcagaagtgaagcacaacccaaccaacaccattgtttgtaaagcccatggggaatggaatggtactttagagttcacctacaacaatggagaaaccaaagtcatcgacacaaccacactgccagtgtatcccaagaagatcagacctcttgagaagcagggacccatggagtccaggaacctctggcgggaggtgacccgatacctgcggctgggggacattgacgcagccaccgagcagaagcggcacctggaggagaagcaacgggtggaggaacggaagcgcgagaacctccgcacaccatggaagcccaaatattttatccaggagggcgatggctgggtatacttcaatcccctctggaaagcacactgatggggtggaggtgcagagctttccagtatagccctgtttttgtaggaatattaaagtagtagagtatcagggttttgttggcattcactgagaccttgtattagcatccaagaaatgatgagagagagagaaattatatactatgaaaagtgcacccccacactctgctagaggaatgaatttattcaagagccattcggggcacgtgtgtgtacacaccgtatacgttcacacacatgcactatgtaaacatctgagtatgattacacatttaaatactgcactcaccaaggttaaagtgggtaatcataagctcctttttatcaatgaagtttgaagtttttctatttttcactttgccaaaaatgttttacactcacaaagatattctcacttagtc

SEQ ID NO: 14546 - DNA, 584 bp, Homo sapiens
  source 1..584: mol_type = unassigned DNA
tatatcattgggttgctgtgaggattaaagaggtttatgtatgtaaaatgcttagaaatatggcaaatgccatatgtgcctgctaccgttgtttgtagtagtagcagaatgccaactactactattagatttgattcccagaatctccgggccctgagaaaggcatgctgcctggtacaagcggagagtagaaacaacacagaggtggagctgggtagccctgggttcaaatctaggctctcggggtctttgaggtatctgggatgagctaccccagagggggcttgcctggcggcccctcgctgctctggctgctcctggcagagttccgttagcttgcagccagctggcctggctgattgtttcctctcctccacgcatccccaggaacctctggcgggaggtgacccgatacctgcggctgggggacattgacgcagccaccgagcagaagcggcacctggaggagaagcaacgggtggaggaacggaagcgcgagaacctccgcacaccatggaagcccaaatattttatccaggagggcgatggctgggtatacttcaatcccctctggaaagcacact

SEQ ID NO: 14547 - DNA, 538 bp, Homo sapiens
  source 1..538: mol_type = unassigned DNA
gtgggaaagatgaggatttcccctgcaatggcttgtgagcaaataggaaatcacagctttagaagaatgaatcattctttgcttcatgaagcttatggcagcctcagtggagcaattgatttagtatgcagtccattcttgccaaactcaggctctgaattggttttgtctgaagatgaaaaaagtgacaatgaagataaggaagagacggaattgggcgtcatggaggatcagcgtagtataattcttcatctcatttcacaactcaaacttggaatggatttgaccaaggtggtgcttcccacctttatcctggagaagcgatctttgctggagatgtatgcagatttcatggcgcacccagacctactgctggccatcaccgctggggccacaccagaggagagagtcatttgcttcgttgagtattatctcacagcctttcacgagggccgcaagggcgctttagccaagaagccctacaaccccatcataggcgagacatttcactgctcctgggaagttcccaaggacaggg

SEQ ID NO: 14548 - DNA, 481 bp, Homo sapiens
  source 1..481: mol_type = unassigned DNA
ttcactgagatcttcccaaccatctctttagaattggggttatttagagctgattgagaacaccttaggagtatgtctgtggaaaacgtctatttacgttgaagttttaaaaatgcctaccccaggagggaaggaacaccgttattacctctctttggaatgttggaaaggaatggtccgtgtggccaaactcaggctctgaattggttttgtctgaagatgaaaaaagtgacaatgaagataaggaagagacggaattgggcgtcatggaggatcagcgtagtataattcttcatctcatttcacaactcaaacttggaatggatttgaccaaggtggtgcttcccacctttatcctggagaagcgatctttgctggagatgtatgcagatttcatggcgcacccagacctactgctggccatcaccgctggggccacaccagaggagagagtcatttgcttcgttgagtattatctcac

SEQ ID NO: 14549 - DNA, 430 bp, Homo sapiens
  source 1..430: mol_type = unassigned DNA
aaaaaagtgacaatgaagataaggaagagacggaattgggcgtcatggaggatcagcgtagtataattcttcatctcatttcacaactcaaacttggaatggatttgaccaagaagtggaaccaactcttcttggtgctgagtgcaggcaggatgcttcctgaggaacctcaccaacagaaccagtgtcctgaccactaacgtcatggagagggtcccacatacgtcacccctcacctctagtcagtagcttcattctagagaatcatgaatgatggaggaaagagattgtaagagaaattgaaattgccaaggtcagatatggagaagcaagaaaatattgaggggactatattatggcaagctgagtgtctgagcgacttcacgttattcctgtcttgctctaaaataaagaaatatcacaactgtgc

SEQ ID NO: 14550 - DNA, 583 bp, Homo sapiens
  source 1..583: mol_type = unassigned DNA
gactagcttgctgtgtggacatgcgtgtacttggacctgtcaaggataagatccagcttctccatcgggttcccctcacagtggcctcgttgttgaatctacctccaaatggcaagataaggtcccctaaattcgccggtggcctttgaggcacagttggttgcctggctttggaagtggctccatgtagaggatagtacgtgtgcaggagccttcaacagccgccctgcagcagggccaaggggtaccagctataccagacaccagctgaaggcatgtgtccacagcttctgtcttcggcatgacttctgaccaaagtggaacatccaccctttcagctgagataccctctacccaacaaagatggcctacttttggagaattagacacagccaccaaaaagactcttccagaggagaaatctcacctgtgcagtgtgtgggaaggacaccaaactcaggctctgaattggttttgtctgaagatgaaaaaagtgacaatgaagataaggaagagacggaattgggcgtcatggaggatcagcgtagtataattcttcatctcatttcacaactcaaacttg

SEQ ID NO: 14551 - DNA, 1078 bp, Homo sapiens
  source 1..1078: mol_type = unassigned DNA
cccaattctgcgtctccctgtagccagagacacctcagtgtgggggcccccggtgttgtcacaatcacgcatcacaagtcgcctgcagccgcccgaagagccaagagtcagtattccggccagcttcacgaagtcagagagatgatgaaccaggtggaagggcagcagaagaaccttgtgcacgccattgagtccctgccagggtccggccccctcactgccttggaccaggacctgctgctcctgaaagctacctctgctgccaccctcagctgccttggggagtgcctcaacttgttacagcagagtgtgcaccaggcgggccagcccagccagaagccaggagcctcggaaaacatcctgggatggcacgggtccaagtcacattccacagagcagctgaaaaatgggacacttggctctttgccatcagccagtgccaacataacctgggcaattttaccaaactctgctgaagacgaacaaacctcacagccagagccagagaggagacaaattaaaaaatggaagaattgcctggagagacaaaatcagctatgtgcatgcccggcacttctcatgttcttgtgtctggcagctgctgtgggtgaattgtgatcctacgaatgaggaatctcctattttcattgaaatgggagtcactttaacttcaagtgggagaaattcgaacagacccgttaacatggtgcctattgacatgatgggagcagttacaatatattatgtcgctcccctgaataatggcttcttcgtgtggttcctgctgatacaagctcttgcctcacatgctcgactcctgcatgctcctgagccaggccgggatctgtggggccatggccaacactcctcttgggcattgagctgcagcccaggttcaggctgccgaggatatgcactgcctcgtcaggagagcagtccttgcagatcctggtgatcagccaggctccaacaggcttcatggactctctgtcatctgcccgcagcctggctctcctatttctgcctctaagtggccgctggaggggagccaaatgcagtgtttccttttgtcaatttt

SEQ ID NO: 14552 - DNA, 519 bp, Homo sapiens
  source 1..519: mol_type = unassigned DNA
aagtcgcctgcagccgcccgaagagccaagagtcagtattccggccagcttcacgaagtcagagaggtgaaggcttgtatgctcaacaacatgtgtgaggtcacacagagagtcattggcatcgtcaagactcaaacccagttgatctttctgatgatgaaccaggtggaagggcagcagaagaaccttgtgcacgccattgagtccctgccagggtccggccccctcactgccttggaccaggacctgctgctcctgaaagctacctctgctgccaccctcagctgccttggggagtgcctcaacttgttacagcagagtgtgcaccaggcgggccagcccagccagaagccaggagcctcggaaaacatcctgggatggcacgggtccaagtcacattccacagagcagctgaaaaatgggacacttggctctttgccatcagccagtgccaacataacctgggcaattttaccaaactctgctgaagacgaacaaacctcacagccagagccagag

SEQ ID NO: 14553 - DNA, 492 bp, Homo sapiens
  source 1..492: mol_type = unassigned DNA
gggcgtgctcagcaaatacaccaacctcctccagggctggcagaacaggtacttcgtactggatttcgaggctggcatcctgcagtattttgtgaatgagcaaagcaaacaccagaagcctcgaggagtcctgtctttatctggagccatagtgtccctgagcgatgaagctccccacatgctggtggtgtactctgctaatggagagatgtttaaactgagagctgctgatgcaaaagagaaacaattctgggtgactcagcttcgagcttgtgccaaataccacatggaaatgaattctaagatgatgaaccaggtggaagggcagcagaagaaccttgtgcacgccattgagtccctgccagggtccggccccctcactgccttggaccaggacctgctgctcctgaaagctacctctgctgccaccctcagctgccttggggagtgcctcaacttgttacagcagagtgtgcaccaggcgggccagcc

SEQ ID NO: 14554 - DNA, 570 bp, Homo sapiens
  source 1..570: mol_type = unassigned DNA
tttcactgctcccgaaggctggagaaatgatctgctttctagagccataaaagttctcttaacataaaaccttctacagaaatgggtttcacaggcaggctgtcttcagtgacttcagtgacagtttttcaaaatcaagttttacttcactgctgatgcaaaagagaaacaattctgggtgactcagcttcgagcttgtgccaaataccacatggaaatgaattctaagagtgctccaagctcccgaagccgaagtctcactttgctcccacatggaacacccaattctgcgtctccctgtagccagagacacctcagtgtgggggcccccggtgttgtcacaatcacgcatcacaagtcgcctgcagccgcccgaagagccaagagtcagtattccggccagcttcacgaagtcagagagatgatgaaccaggtggaagggcagcagaagaaccttgtgcacgccattgagtccctgccagggtccggccccctcactgccttggaccaggacctgctgctcctgaaagctacctctgctgccaccctcagctgccttggggagtgcct

SEQ ID NO: 14555 - DNA, 669 bp, Homo sapiens
  source 1..669: mol_type = unassigned DNA
ccagagggagaaaacacttcctctctgttggttggatttccagtctttgctccagcccttcctaagacctggccaccttccttggctcctgtgagatgccttgagcctcattcagtacttcgtactggatttcgaggctggcatcctgcagtattttgtgaatgagcaaagcaaacaccagaagcctcgaggagtcctgtctttatctggagccatagtgtccctgagcgatgaagctccccacatgctggtggtgtactctgctaatggagagatgtttaaactgagagctgctgatgcaaaagagaaacaattctgggtgactcagcttcgagcttgtgccaaataccacatggaaatgaattctaagagtgctccaagctcccgaagccgaagtctcactttgctcccacatggaacacccaattctgcgtctccctgtagccagagacacctcagtgtgggggcccccggtgttgtcacaatcacgcatcacaagtcgcctgcagccgcccgaagagccaagagtcagtattccggccagcttcacgaagtcagagagatgatgaaccaggtggaagggcagcagaagaaccttgtgcacgccattgagtccctgccagggtccggccccctcactgccttggaccaggacctgctgctcctgaa

SEQ ID NO: 14556 - DNA, 758 bp, Homo sapiens
  source 1..758: mol_type = unassigned DNA
gaagctgagggtctgagtgacaagcggagtgtggctggatccagccttattttgaaggattcctttggcacccaggggcccagggatgaggtgctgttttgggaggctggtaaaagttcagaagcgatctctgagactccctatctgccagattcccagactgtgagctgcttcaagatcagggaagtttttcggtacttcgtactggatttcgaggctggcatcctgcagtattttgtgaatgagcaaagcaaacaccagaagcctcgaggagtcctgtctttatctggagccatagtgtccctgagcgatgaagctccccacatgctggtggtgtactctgctaatggagagatgtttaaactgagagctgctgatgcaaaagagaaacaattctgggtgactcagcttcgagcttgtgccaaataccacatggaaatgaattctaagagtgctccaagctcccgaagccgaagtctcactttgctcccacatggaacacccaattctgcgtctccctgtagccagagacacctcagtgtgggggcccccggtgttgtcacaatcacgcatcacaagtcgcctgcagccgcccgaagagccaagagtcagtattccggccagcttcacgaagtcagagaggtacacactctcctgacagaggaaagctgtttgctgcactggtttactggatagattaactgggttgaggctgtgtaatttaatatgattttaaataaaccttttacagagtctga

SEQ ID NO: 14557 - DNA, 533 bp, Homo sapiens
  source 1..533: mol_type = unassigned DNA
agtgctaggattacaggcgtgagccaccgtgcccagcgaagccccgtgttttaacgagtgatgttgtagccctcctttgggcagaatatctttctgtgcatgggttgtgttcggtggtttttcctcttccaaaaccctaactgttccagagctgtacttcgtactggatttcgaggctggcatcctgcagtattttgtgaatgagcaaagcaaacaccagaagcctcgaggagtcctgtctttatctggagccatagtgtccctgagcgatgaagctccccacatgctggtggtgtactctgctaatggagagatgtttaaactgagagtttgctgtgtttggaggactctgtggtgacacacattgcctctcttatccctggggtggggagatggagctgacattaggaattacttgtcctaattaactgaggaattaaggacaaaggaaagctgctgatgcaaaagagaaacaattctgggtgactcagcttcgagcttgtgccaaataccacatggaaatgaattctaag

SEQ ID NO: 14558 - DNA, 554 bp, Homo sapiens
  source 1..554: mol_type = unassigned DNA
ctttttccagtggcgtgcccctggaacgttgtgcaccaccattttgactcttttaatgtgcatgcccaggaagctgcttctccctggagtcagtattcaaatcacactttactgcaacaggtgtggaccatcaggaaacggcctctcccctggcgcctggctcccaattcaccacttttagagagctatcccccatcctcatcactttcctatctggctgctgcagcagaaacatttatttaataggaaatagaactactcattctgcaagaagagtctttaaattgcagatgcctgggtacttcgtactggatttcgaggctggcatcctgcagtattttgtgaatgagcaaagcaaacaccagaagcctcgaggagtcctgtctttatctggagccatagtgtccctgagcgatgaagctccccacatgctggtggtgtactctgctaatggagagatgtttaaactgagagctgctgatgcaaaagagaaacaattctgggtgactcagcttcgagcttgtgccaaataccacatggaaatgaattctaag

SEQ ID NO: 14559 - DNA, 485 bp, Homo sapiens
  source 1..485: mol_type = unassigned DNA
aggcatttcccggggatttggagcaggcacgcgcggcccgggcgtccggagctgtagcagcagcagcagccgccgtgccggggccgccaccgcggcgggcacccgcgtcccgggcgcccacggaccatggagagggcagtccagggcacagacggcggcgggggtagcaacagcagcagccgcagcagcagccgtgctacctcggcgggctcctcgccctcctgctctctggcgggccggggggtctccagccggtcggcggcggccgggctcggcggcgggggaagccgcagcagcccgggctctgtggccgctagcccgtccgggggaggcggccgcaggagggagccggcgctcgagggcgtgctcagcaaatacaccaacctcctccagggctggcagaacagctgctgatgcaaaagagaaacaattctgggtgactcagcttcgagcttgtgccaaataccacatggaaatgaattcta

SEQ ID NO: 14560 - DNA, 473 bp, Homo sapiens
  source 1..473: mol_type = unassigned DNA
gggcgtgctcagcaaatacaccaacctcctccagggctggcagaacaggtacttcgtactggatttcgaggctggcatcctgcagtattttgtgaatgagcaaagcaaacaccagaagcctcgaggagtcctgtctttatctggagccatagtgtccctgagcgatgaagctccccacatgctggtggtgtactctgctaatggagagatgtttaaactgagaggtgcgttcttctcccagtaacttttcagacaggcctctagttgctatggtgatggctctcttgttttttgattttttgtttttttaaattgcctttgacagtttgctgtgtttggaggactctgtggtgacacacattgcctctcttatccctggggtggggagatggagctgacattaggaattacttgtcctaattaactgaggaattaaggacaaaggaaaggtgagtgattcccaaagcagcgcg

SEQ ID NO: 14561 - DNA, 6760 bp, Homo sapiens
  source 1..6760: mol_type = unassigned DNA
ggcgcgcgccgagaagttctgggcaaagtactcagaactggccgcgtgctggtggcgcccgccagccggcccgggagaggggacttgagcgcttcgcggccggtgcgcagcgcggctccggccccgcagtctgtctgcaagtggccatccccgcccccgactcctgcggccggtgcgggagctgtcagctgcacgttgcgggggtaccggagaagccggggttgccttctcccggttctgtgcgctaaccccggagcccggccccggggaactagggagcgtctccggctgcacagcgctcaggttttagggtttcctttgggccacccaaaatgttttttaaatactttggataagagctaaaccacctgccactggggacttccatactctcggctcccttgtcatctgatggcattttgattgtctcgaggccaagtgacttgctgtccatgatgagtgatgagaagaaccttggtgtgtcccaaaaattggtatcaccttcaaggagcacaagtagctgctcttccaagcaaggaagtcgacaggacagctgggaagtggtggaaggactgaggggggagatgaattacacccaggagccaccagttcagaaaggatttttgctgaaaaagaggaagtggcccttaaaaggctggcataagagattcttctatctggacaaaggaatcttgaaatatgccaagagccaaaccgatatagagagagagaagctgcatggctgcattgatgtcgggctctcagtgatgtctgtaaagaagtcatcaaaatgcatagaccttgacaccgaggagcacatctaccatctgaaggtcaagtcagaagaagtctttgatgagtgggtatcgaaacttcgccaccacagaatgtatcgtcagaatgaaattgccatgtttccacatgaagttaaccactttttctcagggtccaccatcacagactcttcatctggggtgtttgactccatttcaagtaggaagcgtagcagtatatcaaagcagaatttatttcaaactggaagcaatgtatcattttcttgtggtggtgagacacgagttccattatggttacagtcttcagaggacatggaaaaatgctccaaagacctggcgcactgtcatgcctacctggtagaaatgagccagctcctgcaaagcatggacgtcctgcatcggacatactcggcaccagctatcaacgccatccagggtggatcttttgaaagtcccaaaaaggaaaaaagatcgcacaggaggtggcggtccagagctattggcaaagatgctaaaggaacactgcaggtcccgaaacctttttctggcccagtaagactacactcctccaatcctaatttgtcaacactagattttggagaagagaaaaattattctgatggctctgaaacctcatcagagttttctaaaatgcaagaagatctgtgtcatattgcccataaagtttacttcactttaaggtcagcttttaatatcatgtcagcggagagagagaaactgaagcagctgatggagcaggatgcctcctcctccccgtctgctcaggtcattggtctgaagaacgccctgtcatccgccctagcacaaaacacagatcttaaagaacgcttacgcagaatccatgccgagtctctgctcctcgactcccccgctgtcgccaagtcgggtgacaatctggcagaggaaaactccagagatgaaaaccgagctctagttcatcagctttctaatgaaagtagactctccatcactgactccctttctgagttttttgatgctcaggaagttctgttatctccaagctcttcagaaaacgagatttctgatgatgactcatatgtcagtgacataagtgataatctttccttagataatctcagtaatgatttagataatgagagacagaccttggggcctgtccttgatagtggtcgggaagcgaagtcccggagaagaacgtgcctgccggcgccctgcccgagcagcagtaacatcagcctgtggaacatcctgaggaacaacatcgggaaggacctgtccaaggtggccatgccggtggagctgaacgagcccctgaacacgctgcagaggctctgcgaggagctggagtacagcgagctcctggacaaggccgcgcagattcccagccccctggaaaggatggtatatgtggcagcctttgccatatcagcgtatgcatctagctactaccgagctggaagcaagccatttaatccggttcttggagaaacatatgaatgtattcgggaggacaagggcttccagtttttttcagaacaggtcagccaccatccgcctatctctgcgtgtcatgctgagtctagaaattttgttttctggcaagatgtgagatggaaaaacaaattctggggcaaatccatggaaattgttccaattggcacaacccatgtgactctgccagtttttggggatcattttgagtggaacaaagtgacctcttgcatccataacatcttaagcgggcagaggtggattgagcactatggagagattgtcatcaagaacctgcatgatgattcctgctactgcaaagtgaattttataaaggcaaaatactggagcactaatgcccatgagattgaaggcacagtgtttgacaggagtggaaaagcggttcatcggctgtttgggaaatggcatgaaagcatctactgtggcggcggctcctcttctgcctgtgtatggagagcaaatcctatgccgaaaggctacgagcaatactatagcttcacacagtttgcgctggaattaaatgaaatggatccatcatcaaagtctttattgccacctactgacactcgatttaggccagaccagaggtttctagaggaagggaacttagaagaagctgaaatacaaaagcagaggattgaacaactgcagagagaaaggcggcgggtcttagaagaaaatcatgtggagcaccagcctcggtttttcaggaaatccgacgatgactcttgggtgagcaacggcacctatttggaacttagaaaagatcttggtttttccaaactggaccatcctgtcttatggtgaaaaagtaaagaagaaagataacattagtgtatttctcctgtgcttgccttctgaagtggcacaaacctgtgtttatatatttaaaagatactctaggatgatcacttgtgcttagcttagcattgtaactctttaagtctatattttcctcagtgcgtttctttacaatttcaaatgttaccctgattgtttatatgaatgtagaacaccttgacatttctttttatatataaactatttaataaaaatgaaagattgaatgttcatgtgtgggttaaaaaaagaagctttaacactaattttccaaaggttagggaagattccaattaaatttatgccttataaaattatgttgtagaaaaaaaatcaacctctcccaggtgcattaagaaataagaattcccagggttactcacccatgcgtaagctacccaagtttaatttggtagctgaaatatctttttgcctcagacagctcttgaattgctcatacagaacaattctgctggtgctggagtctgaagaatattttcatttgcattttagtggttagggagaggatataagattaatggaatgtatatttttatataagacgtatacggcaccttcttgaaaaggaagcatttgaacttgttcctccctatagttctattgccttatatgcaaaattgtaccctgttgctcagagaaattattcataagagaaaagaattccaattaattaaatatcacaatagcatcccagagagacagtaggaaatttctccttagtgagagctgagtccttgagaagttaagagactgtttcctgcttcccaccccaccccgttttttgtccctccgtttgatcacctccctgttgagtatggaatgtcccagtttaatataaaacatacagtttattccacacagcagtttgactttgtaaaagtttagcaaaataactgattgttttggataactcaacatgtttttcttaaatgctgttttagtattttctacctcttaataagcaccatattttagatcttgtataaaaagttgccatctgccttatagacaaatgtagagaattgatgttcttgctttgtgttgtgttctggtaaagctttaagtgagtgtcttacccctttcctatactttcttgttatccatatcattcttttgtgagttttgcagcagtcttgaataatacagattataactactgaaaggggaaccttcgtctttttaaatgtgttatttcacattacaataatatgtgtagtagttgaattgtgttatcaaagcatgtccaacttctgtccagatgacattaaaaccaaagcctaattgttaagcctcttattctaaagtccatagcaatgctatggaatatcaagtataatgatgtagtaaaaagatttctccagaaaacactttgagatacttaaagaaattcagagcatatcgaatgttatgaatgaagagtaaaataattacaggaaaagaatgcatgatttttcattgtcacaccaaataaccagttggacaatattgcattttcaaaatggagagttatttaaagtggatgtgtagccttctggaatctgcacgtgactggcattttaaaacaactcattaaatattggattcattttatcgagatgccaagatgaacacaatgtgaatatcatttccatttctaagcagttgaatgacacagtcagattctttggtgtatgctttgttctttccatctcaagcatttatccaaattctgctcacagacatgaggaagcaggctgtagatttaagggcactcaaggggaaaacaaatgtagtttccacagtgtgaggataaatgtagaatcgtggtaatattggctgttaaattggcctgctccagagactggctcaaaaaagaaagaagcaacgaaaacaaaatgcacagcctgaatggacgtagcactgtcatgtggcatttggaaaatctttaattatcctaatgttatttcacttgcccttatgctttattttagagtcccagggacaactggatgaaacattacgtctgtagtcatcttatttgagatgggggtgggaacgaattaaaatatgatagagaactatatgcagattttaaaatctagtcagtactagcatctataaagggcttttctgaaatttaaacagcttggtgatgcatcctgatattataagcttaaaactatcttgagggggaaatgacttcttttctccttctgtcccttttctcaaaagcatctttcccccaaatgtatgtctctaggacattttatagttttaagaggaagaaaacagaaacgtggcatcatttgggaagaaccaaggtagaatttaattttctggactttaaatctcctggttaaataatgctaatcactgtaccatttgagttacatgttttaacctcttttttttttctaattattccatccaaaatttctggtgaattacacagaaatttttggaaatgggactttgtgcaggtaaccaccctgcacttcaggtaatgttcctgtcacagctgtcgactaccccacgctgcaggaaatccattcagaaatgagctaacagtctccagtgtagcaggagagccagtcacttccctccccaggccccaaagcaccccaaggctggtattccttgagtcataggtattaataataaaagcctcaatgcagcttctccatgtagttcctctcctacaagccaggtggattctggtcctaactaaagagatgggagttcacctgagggcaagaagtacccaggatgcccaaacagccgcacaggtgtcctgtgcttcctgtgagacttcctgggggaaatatacaaactaatatattttttaatgtttacgtcatttacactgctgcttttctcatattctgcttttaattacttgtagtaaatcatttgtttgggcttcaagcactgtcttccatctgcatcttccagatttatcatgagtgatcttgttctactgttaaagatgtcaagcctaaaaagtaataaagtttttatttggctgttgaaccttgatgtagcccctactacatacactacaagttatgccttctggctactacagaatctccgcagaccttttagttatgagtagaagcaataagaaggtgtccttatggtcttaggaataatagttccaatgtattggcataatttgtttgaatgtctttattttgatattaacaccggcataaatctatttttgctaccagatgatagctattttcatttgctctattttcctctgcattgtactaatctgttactcagtgttagtcttcatttttctgtgttggaaacctgcgtcatgtaaatatctgcaaatcatgacagtctaaagtgcaaaccattttcagagactttggggaatgcagtgatcagaagtggctaatttattttatttctgattattttatccagagggtacttttttaatggatatttgtaaatcttccacttaaccactgaaaattattttgttttaatcccacccttccatccatacctctgcctccccaaaaagctcctattaatttgcttatccccctcatgtagctagttgaatgtgaataaataacatggaaaaaaag

SEQ ID NO: 14562 - DNA, 3490 bp, Homo sapiens
  source 1..3490: mol_type = unassigned DNA
tggataagagctaaaccacctgccactggggacttccatactctcggctcccttgtcatctgatggcattttgattgtctcgaggccaagtgacttgctgtccatgatgagtgatgagaagaaccttggtgtgtcccaaaaattggtatcaccttcaaggagcacaagtagctgctcttccaagcaaggaagtcgacaggacagctgggaagtggtggaaggactgaggggggagatgaattacacccaggagccaccagttcagaaaggatttttgctgaaaaagaggaagtggcccttaaaaggctggcataagagattcttctatctggacaaaggaatcttgaaatatgccaagagccaaaccgatatagagagagagaagctgcatggctgcattgatgtcgggctctcagtgatgtctgtaaagaagtcatcaaaatgcatagaccttgacaccgaggagcacatctaccatctgaaggtcaagtcagaagaagtctttgatgagtgggtatcgaaacttcgccaccacagaatgtatcgtcagaatgaaattgccatgtttccacatgaagttaaccactttttctcagggtccaccatcacagactcttcatctggggtgtttgactccatttcaagtaggaagcgtagcagtatatcaaagcagaatttatttcaaactggaagcaatgtatcattttcttgtggtggtgagacacgagttccattatggttacagtcttcagaggacatggaaaaatgctccaaagacctggcgcactgtcatgcctacctggtagaaatgagccagctcctgcaaagcatggacgtcctgcatcggacatactcggcaccagctatcaacgccatccaggtcccgaaacctttttctggcccagtaagactacactcctccaatcctaatttgtcaacactagattttggagaagagaaaaattattctgatggctctgaaacctcatcagagttttctaaaatgcaagaagatctgtgtcatattgcccataaagtttacttcactttaaggtcagcttttaatatcatgtcagcggagagagagaaactgaagcagctgatggagcaggatgcctcctcctccccgtctgctcaggtcattggtctgaagaacgccctgtcatccgccctagcacaaaacacagatcttaaagaacgcttacgcagaatccatgccgagtctctgctcctcgactcccccgctgtcgccaagtcgggtgacaatctggcagaggaaaactccagagatgaaaaccgagctctagttcatcagctttctaatgaaagtagactctccatcactgactccctttctgagttttttgatgctcaggaagttctgttatctccaagctcttcagaaaacgagatttctgatgatgactcatatgtcagtgacataagtgataatctttccttagataatctcagtaatgatttagataatgagagacagaccttggggcctgtccttgatagtggtcgggaagcgaagtcccggagaagaacgtgcctgccggcgccctgcccgagcagcagtaacatcagcctgtggaacatcctgaggaacaacatcgggaaggacctgtccaaggtggccatgccggtggagctgaacgagcccctgaacacgctgcagaggctctgcgaggagctggagtacagcgagctcctggacaaggccgcgcagattcccagccccctggaaaggatggtgaggagtcagccttcccttgccactgtccagcctcggtccccaagccacgaggccattcacggggcccatcagagagacagcccctgttccctccggtttcattttgattgttccgtaaacaggttcattactcagagctgtctggcttcctccgcctggctgtttccagtcaccttgtgaggatttggagacggggttggggtgcttctccgtggcacttggtgcctggggtagttctgttctgtgggtttgtgcttcctctttctccagaagccttctggctgattgttccgatgtgcccggctggaaaacatgtctttagggctgtctgcatgtttatttttacttccctgggtggacagaatttaatttctcgagctgtttttctcatccagggtatatgtggcagcctttgccatatcagcgtatgcatctagctactaccgagctggaagcaagccatttaatccggttcttggagaaacatatgaatgtattcgggaggacaagggcttccagtttttttcagaacaggtcagccaccatccgcctatctctgcgtgtcatgctgagtctagaaattttgttttctggcaagatgtgagatggaaaaacaaattctggggcaaatccatggaaattgttccaattggcacaacccatgtgactctgccagtttttggggatcattttgagtggaacaaagtgacctcttgcatccataacatcttaagcgggcagaggtggattgagcactatggagagattgtcatcaagaacctgcatgatgattcctgctactgcaaagtgaattttataaaggcaaaatactggagcactaatgcccatgagattgaaggcacagtgtttgacaggagtggaaaagcggttcatcggctgtttgggaaatggcatgaaagcatctactgtggcggcggctcctcttctgcctgtgtatggagagcaaatcctatgccgaaaggctacgagcaatactatagcttcacacagtttgcgctggaattaaatgaaatggatccatcatcaaagtctttattgccacctactgacactcgatttaggccagaccagaggtttctagaggaagggaacttagaagaagctgaaatacaaaagcagaggattgaacaactgcagagagaaaggcggcgggtcttagaagaaaatcatgtggagcaccagcctcggtttttcaggaaatccgacgatgactcttgggtgagcaacggcacctatttggaacttagaaaagatcttggtttttccaaactggaccatcctgtcttatggtgaaaaagtaaagaagaaagataacattagtgtatttctcctgtgcttgccttctgaagtggcacaaacctgtgtttatatatttaaaagatactctaggatgatcacttgtgcttagcttagcattgtaactctttaagtctatattttcctcagtgcgtttctttacaatttcaaatgttaccctgattgtttatatgaatgtagaacaccttgacatttctttttatatataaactatttaataaaaatgaaagattgaatgttcatgtgtgggttaaaaaaagaagctttaacactaattttccaaaggttagggaagattccaattaaatttatgccttataaaattatgttgtagaaaaaaaatcaacctctcccaggtgcattaagaaataagaattcccagggttactcacc

SEQ ID NO: 14563 - DNA, 2969 bp, Homo sapiens
  source 1..2969: mol_type = unassigned DNA
tttcctttgggccacccaaaatgttttttaaatactttggataagagctaaaccacctgccactggggacttccatactctcggctcccttgtcatctgatggcattttgattgtctcgaggccaagtgacttgctgtccatgatgagtgatgagaagaaccttggtgtgtcccaaaaattggtatcaccttcaaggagcacaagtagctgctcttccaagcaaggaagtcgacaggacagctgggaagtggtggaaggactgaggggggagatgaattacacccaggagccaccagttcagaaaggatttttgctgaaaaagaggaagtggcccttaaaaggctggcataagagattcttctatctggacaaaggaatcttgaaatatgccaagagccaaaccgatatagagagagagaagctgcatggctgcattgatgtcgggctctcagtgatgtctgtaaagaagtcatcaaaatgcatagaccttgacaccgaggagcacatctaccatctgaaggtcaagtcagaagaagtctttgatgagtgggtatcgaaacttcgccaccacagaatgtatcgtcagaatgaaattgccatgtttccacatgaagttaaccactttttctcagggtccaccatcacagactcttcatctggggtgtttgactccatttcaagtaggaagcgtagcagtatatcaaagcagaatttatttcaaactggaagcaatgtatcattttcttgtggtggtgagacacgagttccattatggttacagtcttcagaggacatggaaaaatgctccaaagacctggcgcactgtcatgcctacctggtagaaatgagccagctcctgcaaagcatggacgtcctgcatcggacatactcggcaccagctatcaacgccatccaggtcccgaaacctttttctggcccagtaagactacactcctccaatcctaatttgtcaacactagattttggagaagagaaaaattattctgatggctctgaaacctcatcagagttttctaaaatgcaagaagatctgtgtcatattgcccataaagtttacttcactttaaggtcagcttttaatatcatgtcagcggagagagagaaactgaagcagctgatggagcaggatgcctcctcctccccgtctgctcaggtcattggtctgaagaacgccctgtcatccgccctagcacaaaacacagatcttaaagaacgcttacgcagaatccatgccgagtctctgctcctcgactcccccgctgtcgccaagtcgggtgacaatctggcagaggaaaactccagagatgaaaaccgagctctagttcatcagctttctaatgaaagtagactctccatcactgactccctttctgagttttttgatgctcaggaagttctgttatctccaagctcttcagaaaacgagatttctgatgatgactcatatgtcagtgacataagtgataatctttccttagataatctcagtaatgatttagataatgagagacagaccttggggcctgtccttgatagtggtcgggaagcgaagtcccggagaagaacgtgcctgccggcgccctgcccgagcagcagtaacatcagcctgtggaacatcctgaggaacaacatcgggaaggacctgtccaaggtggccatgccggtggagctgaacgagcccctgaacacgctgcagaggctctgcgaggagctggagtacagcgagctcctggacaaggccgcgcagattcccagccccctggaaaggatggtatatgtggcagcctttgccatatcagcgtatgcatctagctactaccgagctggaagcaagccatttaatccggttcttggagaaacatatgaatgtattcgggaggacaagggcttccagtttttttcagaacaggtcagccaccatccgcctatctctgcgtgtcatgctgagtctagaaattttgttttctggcaagatgtgagatggaaaaacaaattctggggcaaatccatggaaattgttccaattggcacaacccatgtgactctgccagtttttggggatcattttgagtggaacaaagtgacctcttgcatccataacatcttaagcgggcagaggtggattgagcactatggagagattgtcatcaagaacctgcatgatgattcctgctactgcaaagtgaattttataaaggcaaaatactggagcactaatgcccatgagattgaaggcacagtgtttgacaggagtggaaaagcggttcatcggctgtttgggaaatggcatgaaagcatctactgtggcggcggctcctcttctgcctgtgtatggagagcaaatcctatgccgaaaggctacgagcaatactatagcttcacacagtttgcgctggaattaaatgaaatggatccatcatcaaagtctttattgccacctactgacactcgatttaggccagaccagaggtttctagaggaagggaacttagaagaagctgaaatacaaaagcagaggattgaacaactgcagagagaaaggcggcgggtcttagaagaaaatcatgtggagcaccagcctcggtttttcaggaaatccgacgatgactcttgggtgagcaacggcacctatttggaacttagaaaagatcttggtttttccaaactggaccatcctgtcttatggtgaaaaagtaaagaagaaagataacattagtgtatttctcctgtgcttgccttctgaagtggcacaaacctgtgtttatatatttaaaagatactctaggatgatcacttgtgcttagcttagcattgtaactctttaagtctatattttcctcagtgcgtttctttacaatttcaaatgttaccctgattgtttatatgaatgtagaacaccttgacatttctttttatatataaactatttaataaaaatgaaagattg

SEQ ID NO: 14564 - DNA, 3344 bp, Homo sapiens
  source 1..3344: mol_type = unassigned DNA
tggataagagctaaaccacctgccactggggacttccatactctcggctcccttgtcatctgatggcattttgattgtctcgaggccaagtgacttgctgtccatgatgagtgatgagaagaaccttggtgtgtcccaaaaattggtatcaccttcaaggagcacaagtagctgctcttccaagcaaggaagtcgacaggacagctgggaagtggtggaaggactgaggggggagatgaattacacccaggagccaccagttcagaaaggatttttgctgaaaaagaggaagtggcccttaaaaggctggcataagagattcttctatctggacaaaggaatcttgaaatatgccaagagccaaaccgatatagagagagagaagctgcatggctgcattgatgtcgggctctcagtgatgtctgtaaagaagtcatcaaaatgcatagaccttgacaccgaggagcacatctaccatctgaaggtcaagtcagaagaagtctttgatgagtgggtatcgaaacttcgccaccacagaatgtatcgtcagaatgaaattgccatgtttccacatgaagttaaccactttttctcagggtccaccatcacagactcttcatctggggtgtttgactccatttcaagtaggaagcgtagcagtatatcaaagcagaatttatttcaaactggaagcaatgtatcattttcttgtggtggtgagacacgagttccattatggttacagtcttcagaggacatggaaaaatgctccaaagacctggcgcactgtcatgcctacctggtagaaatgagccagctcctgcaaagcatggacgtcctgcatcggacatactcggcaccagctatcaacgccatccagggtggatcttttgaaagtcccaaaaaggaaaaaagatcgcacaggaggtggcggtccagagctattggcaaagatgctaaaggaacactgcaggtcccgaaacctttttctggcccagtaagactacactcctccaatcctaatttgtcaacactagattttggagaagagaaaaattattctgatggctctgaaacctcatcagagttttctaaaatgcaagaagatctgtgtcatattgcccataaagtttacttcactttaaggtcagcttttaatatcatgtcagcggagagagagaaactgaagcagctgatggagcaggatgcctcctcctccccgtctgctcaggtcattggtctgaagaacgccctgtcatccgccctagcacaaaacacagatcttaaagaacgcttacgcagaatccatgccgagtctctgctcctcgactcccccgctgtcgccaagtcgggtgacaatctggcagaggaaaactccagagatgaaaaccgagctctagttcatcagctttctaatgaaagtagactctccatcactgactccctttctgagttttttgatgctcaggaagttctgttatctccaagctcttcagaaaacgagatttctgatgatgactcatatgtcagtgacataagtgataatctttccttagataatctcagtaatgatttagataatgagagacagaccttggggcctgtccttgatagtggtcgggaagcgaagtcccggagaagaacgtgcctgccggcgccctgcccgagcagcagtaacatcagcctgtggaacatcctgaggaacaacatcgggaaggacctgtccaaggtggccatgccggtggagctgaacgagcccctgaacacgctgcagaggctctgcgaggagctggagtacagcgagctcctggacaaggccgcgcagattcccagccccctggaaaggatggtgaggagtcagccttcccttgccactgtccagcctcggtccccaagccacgaggccattcacggggcccatcagagagacagcccctgttccctccggtttcattttgattgttccgtaaacaggttcattactcagagctgtctggcttcctccgcctggctgtttccagtcaccttgtgaggatttggagacggggttggggtgcttctccgtggcacttggtgcctggggtagttctgttctgtgggtttgtgcttcctctttctccagaagccttctggctgattgttccgatgtgcccggctggaaaacatgtctttagggctgtctgcatgtttatttttacttccctgggtggacagaatttaatttctcgagctgtttttctcatccagggtatatgtggcagcctttgccatatcagcgtatgcatctagctactaccgagctggaagcaagccatttaatccggttcttggagaaacatatgaatgtattcgggaggacaagggcttccagtttttttcagaacaggtcagccaccatccgcctatctctgcgtgtcatgctgagtctagaaattttgttttctggcaagatgtgagatggaaaaacaaattctggggcaaatccatggaaattgttccaattggcacaacccatgtgactctgccagtttttggggatcattttgagtggaacaaagtgacctcttgcatccataacatcttaagcgggcagaggtggattgagcactatggagagattgtcatcaagaacctgcatgatgattcctgctactgcaaagtgaattttataaaggcaaaatactggagcactaatgcccatgagattgaaggcacagtgtttgacaggagtggaaaagcggttcatcggctgtttgggaaatggcatgaaagcatctactgtggcggcggctcctcttctgcctgtgtatggagagcaaatcctatgccgaaaggctacgagcaatactatagcttcacacagtttgcgctggaattaaatgaaatggatccatcatcaaagtctttattgccacctactgacactcgatttaggccagaccagaggtttctagaggaagggaacttagaagaagctgaaatacaaaagcagaggattgaacaactgcagagagaaaggcggcgggtcttagaagaaaatcatgtggagcaccagcctcggtttttcaggaaatccgacgatgactcttgggtgagcaacggcacctatttggaacttagaaaagatcttggtttttccaaactggaccatcctgtcttatggtgaaaaagtaaagaagaaagataacattagtgtatttctcctgtgcttgccttctgaagtggcacaaacctgtgtttatatatttaaaagatactctaggatgatcacttgtgcttagcttagcattgtaactctttaagtctatattttcctcagtgcgtttctttacaatttcaaatgt

SEQ ID NO: 14565 - DNA, 3219 bp, Homo sapiens
  source 1..3219: mol_type = unassigned DNA
tggataagagctaaaccacctgccactggggacttccatactctcggctcccttgtcatctgatggcattttgattgtctcgaggccaagtgacttgctgtccatgatgagtgatgagaagaaccttggtgtgtcccaaaaattggtatcaccttcaaggagcacaagtagctgctcttccaagcaaggaagtcgacaggacagctgggaagtggtggaaggactgaggggggagatgaattacacccaggagccaccagttcagaaaggatttttgctgaaaaagaggaagtggcccttaaaaggctggcataagagattcttctatctggacaaaggaatcttgaaatatgccaagagccaaaccgatatagagagagagaagctgcatggctgcattgatgtcgggctctcagtgatgtctgtaaagaagtcatcaaaatgcatagaccttgacaccgaggagcacatctaccatctgaaggtcaagtcagaagaagtctttgatgagtgggtatcgaaacttcgccaccacagaatgtatcgtcagaatgaaattgccatgtttccacatgaagttaaccactttttctcagggtccaccatcacagactcttcatctggggtgtttgactccatttcaagtaggaagcgtagcagtatatcaaagcagaatttatttcaaactggaagcaatgtatcattttcttgtggtggtgagacacgagttccattatggttacagtcttcagaggacatggaaaaatgctccaaagacctggcgcactgtcatgcctacctggtagaaatgagccagctcctgcaaagcatggacgtcctgcatcggacatactcggcaccagctatcaacgccatccagggtggatcttttgaaagtcccaaaaaggaaaaaagatcgcacaggaggtggcggtccagagctattggcaaagatgctaaaggaacactgcaggtcccgaaacctttttctggcccagtaagactacactcctccaatcctaatttgtcaacactagattttggagaagagaaaaattattctgatggctctgaaacctcatcagagttttctaaaatgcaagaagatctgtgtcatattgcccataaagtttacttcactttaaggtcagcttttaatatcatgtcagcggagagagagaaactgaagcagctgatggagcaggatgcctcctcctccccgtctgctcaggtcattggtctgaagaacgccctgtcatccgaaaactccagagatgaaaaccgagctctagttcatcagctttctaatgaaagtagactctccatcactgactccctttctgagttttttgatgctcaggaagttctgttatctccaagctcttcagaaaacgagatttctgatgatgactcatatgtcagtgacataagtgataatctttccttagataatctcagtaatgatttagataatgagagacagaccttggggcctgtccttgatagtggtcgggaagcgaagtcccggagaagaacgtgcctgccggcgccctgcccgagcagcagtaacatcagcctgtggaacatcctgaggaacaacatcgggaaggacctgtccaaggtggccatgccggtggagctgaacgagcccctgaacacgctgcagaggctctgcgaggagctggagtacagcgagctcctggacaaggccgcgcagattcccagccccctggaaaggatggtgaggagtcagccttcccttgccactgtccagcctcggtccccaagccacgaggccattcacggggcccatcagagagacagcccctgttccctccggtttcattttgattgttccgtaaacaggttcattactcagagctgtctggcttcctccgcctggctgtttccagtcaccttgtgaggatttggagacggggttggggtgcttctccgtggcacttggtgcctggggtagttctgttctgtgggtttgtgcttcctctttctccagaagccttctggctgattgttccgatgtgcccggctggaaaacatgtctttagggctgtctgcatgtttatttttacttccctgggtggacagaatttaatttctcgagctgtttttctcatccagggtatatgtggcagcctttgccatatcagcgtatgcatctagctactaccgagctggaagcaagccatttaatccggttcttggagaaacatatgaatgtattcgggaggacaagggcttccagtttttttcagaacaggtcagccaccatccgcctatctctgcgtgtcatgctgagtctagaaattttgttttctggcaagatgtgagatggaaaaacaaattctggggcaaatccatggaaattgttccaattggcacaacccatgtgactctgccagtttttggggatcattttgagtggaacaaagtgacctcttgcatccataacatcttaagcgggcagaggtggattgagcactatggagagattgtcatcaagaacctgcatgatgattcctgctactgcaaagtgaattttataaaggcaaaatactggagcactaatgcccatgagattgaaggcacagtgtttgacaggagtggaaaagcggttcatcggctgtttgggaaatggcatgaaagcatctactgtggcggcggctcctcttctgcctgtgtatggagagcaaatcctatgccgaaaggctacgagcaatactatagcttcacacagtttgcgctggaattaaatgaaatggatccatcatcaaagtctttattgccacctactgacactcgatttaggccagaccagaggtttctagaggaagggaacttagaagaagctgaaatacaaaagcagaggattgaacaactgcagagagaaaggcggcgggtcttagaagaaaatcatgtggagcaccagcctcggtttttcaggaaatccgacgatgactcttgggtgagcaacggcacctatttggaacttagaaaagatcttggtttttccaaactggaccatcctgtcttatggtgaaaaagtaaagaagaaagataacattagtgtatttctcctgtgcttgccttctgaagtggcacaaacctgtgtttatatatttaaaagatactctaggatgatcacttgtgcttagcttagcattgtaactctttaagtctatattttcctcagtgcgtttc

SEQ ID NO: 14566 - DNA, 554 bp, Homo sapiens
  source 1..554: mol_type = unassigned DNA
atgattcctgctactgcaaagtgaattttataaaggcaaaatactggagcactaatgcccatgagattgaaggcacagtgtttgacaggagtggaaaagcggttcatcggctgtttgggaaatggcatgaaagcatctactgtggcggcggctcctcttctgcctgtgtatggagagcaagtttctagaggaagggaacttagaagaagctgaaatacaaaagcagaggattgaacaactgcagagagaaaggcggcgggtcttagaagaaaatcatgtggagcaccagcctcggtttttcaggaaatccgacgatgactcttgggtgagcaacggcacctatttggaacttagaaaagatcttggtttttccaaactggaccatcctgtcttatggtgaaaaagtaaagaagaaagataacattagtgtatttctcctgtgcttgccttctgaagtggcacaaacctgtgtttatatatttaaaagatactctaggatgatcacttgtgcttagcttagcattgtaactctttaagtctatattttcctcagt

SEQ ID NO: 14567 - DNA, 3088 bp, Homo sapiens
  source 1..3088: mol_type = unassigned DNA
tggataagagctaaaccacctgccactggggacttccatactctcggctcccttgtcatctgatggcattttgattgtctcgaggccaagtgacttgctgtccatgatgagtgatgagaagaaccttggtgtgtcccaaaaattggtatcaccttcaaggagcacaagtagctgctcttccaagcaaggaagtcgacaggacagctgggaagtggtggaaggactgaggggggagatgaattacacccaggagccaccagttcagaaaggatttttgctgaaaaagaggaagtggcccttaaaaggctggcataagagattcttctatctggacaaaggaatcttgaaatatgccaagagccaaaccgatatagagagagagaagctgcatggctgcattgatgtcgggctctcagtgatgtctgtaaagaagtcatcaaaatgcatagaccttgacaccgaggagcacatctaccatctgaaggtcaagtcagaagaagtctttgatgagtgggtatcgaaacttcgccaccacagaatgtatcgtcagaatgaaattgccatgtttccacatgaagttaaccactttttctcagggtccaccatcacagactcttcatctggggtgtttgactccatttcaagtaggaagcgtagcagtatatcaaagcagaatttatttcaaactggaagcaatgtatcattttcttgtggtggtgagacacgagttccattatggttacagtcttcagaggacatggaaaaatgctccaaagacctggcgcactgtcatgcctacctggtagaaatgagccagctcctgcaaagcatggacgtcctgcatcggacatactcggcaccagctatcaacgccatccaggtcccgaaacctttttctggcccagtaagactacactcctccaatcctaatttgtcaacactagattttggagaagagaaaaattattctgatggctctgaaacctcatcagagttttctaaaatgcaagaagatctgtgtcatattgcccataaagtttacttcactttaaggtcagcttttaatatcatgtcagcggagagagagaaactgaagcagctgatggagcaggatgcctcctcctccccgtctgctcaggtcattggtctgaagaacgccctgtcatccgaaaactccagagatgaaaaccgagctctagttcatcagctttctaatgaaagtagactctccatcactgactccctttctgagttttttgatgctcaggaagttctgttatctccaagctcttcagaaaacgagatttctgatgatgactcatatgtcagtgacataagtgataatctttccttagataatctcagtaatgatttagataatgagagacagaccttggggcctgtccttgatagtggtcgggaagcgaagtcccggagaagaacgtgcctgccggcgccctgcccgagcagcagtaacatcagcctgtggaacatcctgaggaacaacatcgggaaggacctgtccaaggtggccatgccggtggagctgaacgagcccctgaacacgctgcagaggctctgcgaggagctggagtacagcgagctcctggacaaggccgcgcagattcccagccccctggaaaggatggtgaggagtcagccttcccttgccactgtccagcctcggtccccaagccacgaggccattcacggggcccatcagagagacagcccctgttccctccggtttcattttgattgttccgtaaacaggttcattactcagagctgtctggcttcctccgcctggctgtttccagtcaccttgtgaggatttggagacggggttggggtgcttctccgtggcacttggtgcctggggtagttctgttctgtgggtttgtgcttcctctttctccagaagccttctggctgattgttccgatgtgcccggctggaaaacatgtctttagggctgtctgcatgtttatttttacttccctgggtggacagaatttaatttctcgagctgtttttctcatccagggtatatgtggcagcctttgccatatcagcgtatgcatctagctactaccgagctggaagcaagccatttaatccggttcttggagaaacatatgaatgtattcgggaggacaagggcttccagtttttttcagaacaggtcagccaccatccgcctatctctgcgtgtcatgctgagtctagaaattttgttttctggcaagatgtgagatggaaaaacaaattctggggcaaatccatggaaattgttccaattggcacaacccatgtgactctgccagtttttggggatcattttgagtggaacaaagtgacctcttgcatccataacatcttaagcgggcagaggtggattgagcactatggagagattgtcatcaagaacctgcatgatgattcctgctactgcaaagtgaattttataaaggcaaaatactggagcactaatgcccatgagattgaaggcacagtgtttgacaggagtggaaaagcggttcatcggctgtttgggaaatggcatgaaagcatctactgtggcggcggctcctcttctgcctgtgtatggagagcaaatcctatgccgaaaggctacgagcaatactatagcttcacacagtttgcgctggaattaaatgaaatggatccatcatcaaagtctttattgccacctactgacactcgatttaggccagaccagaggtttctagaggaagggaacttagaagaagctgaaatacaaaagcagaggattgaacaactgcagagagaaaggcggcgggtcttagaagaaaatcatgtggagcaccagcctcggtttttcaggaaatccgacgatgactcttgggtgagcaacggcacctatttggaacttagaaaagatcttggtttttccaaactggaccatcctgtcttatggtgaaaaagtaaagaagaaagataacattagtgtatttctcctgtgcttgccttctgaagtggcacaaacctgtgtttatatatttaaaagatactctaggatgatcacttgtgcttagcttagcat

SEQ ID NO: 14568 - DNA, 2707 bp, Homo sapiens
  source 1..2707: mol_type = unassigned DNA
tggataagagctaaaccacctgccactggggacttccatactctcggctcccttgtcatctgatggcattttgattgtctcgaggccaagtgacttgctgtccatgatgagtgatgagaagaaccttggtgtgtcccaaaaattggtatcaccttcaaggagcacaagtagctgctcttccaagcaaggaagtcgacaggacagctgggaagtggtggaaggactgaggggggagatgaattacacccaggagccaccagttcagaaaggatttttgctgaaaaagaggaagtggcccttaaaaggctggcataagagattcttctatctggacaaaggaatcttgaaatatgccaagagccaaaccgatatagagagagagaagctgcatggctgcattgatgtcgggctctcagtgatgtctgtaaagaagtcatcaaaatgcatagaccttgacaccgaggagcacatctaccatctgaaggtcaagtcagaagaagtctttgatgagtgggtatcgaaacttcgccaccacagaatgtatcgtcagaatgaaattgccatgtttccacatgaagttaaccactttttctcagggtccaccatcacagactcttcatctggggtgtttgactccatttcaagtaggaagcgtagcagtatatcaaagcagaatttatttcaaactggaagcaatgtatcattttcttgtggtggtgagacacgagttccattatggttacagtcttcagaggacatggaaaaatgctccaaagacctggcgcactgtcatgcctacctggtagaaatgagccagctcctgcaaagcatggacgtcctgcatcggacatactcggcaccagctatcaacgccatccagggtggatcttttgaaagtcccaaaaaggaaaaaagatcgcacaggaggtggcggtccagagctattggcaaagatgctaaaggaacactgcaggtcccgaaacctttttctggcccagtaagactacactcctccaatcctaatttgtcaacactagattttggagaagagaaaaattattctgatggctctgaaacctcatcagagttttctaaaatgcaagaagatctgtgtcatattgcccataaagtttacttcactttaaggtcagcttttaatatcatgtcagcggagagagagaaactgaagcagctgatggagcaggatgcctcctcctccccgtctgctcaggtcattggtctgaagaacgccctgtcatccgaaaactccagagatgaaaaccgagctctagttcatcagctttctaatgaaagtagactctccatcactgactccctttctgagttttttgatgctcaggaagttctgttatctccaagctcttcagaaaacgagatttctgatgatgactcatatgtcagtgacataagtgataatctttccttagataatctcagtaatgatttagataatgagagacagaccttggggcctgtccttgatagtggtcgggaagcgaagtcccggagaagaacgtgcctgccggcgccctgcccgagcagcagtaacatcagcctgtggaacatcctgaggaacaacatcgggaaggacctgtccaaggtggccatgccggtggagctgaacgagcccctgaacacgctgcagaggctctgcgaggagctggagtacagcgagctcctggacaaggccgcgcagattcccagccccctggaaaggatggtatatgtggcagcctttgccatatcagcgtatgcatctagctactaccgagctggaagcaagccatttaatccggttcttggagaaacatatgaatgtattcgggaggacaagggcttccagtttttttcagaacaggtcagccaccatccgcctatctctgcgtgtcatgctgagtctagaaattttgttttctggcaagatgtgagatggaaaaacaaattctggggcaaatccatggaaattgttccaattggcacaacccatgtgactctgccagtttttggggatcattttgagtggaacaaagtgacctcttgcatccataacatcttaagcgggcagaggtggattgagcactatggagagattgtcatcaagaacctgcatgatgattcctgctactgcaaagtgaattttataaaggcaaaatactggagcactaatgcccatgagattgaaggcacagtgtttgacaggagtggaaaagcggttcatcggctgtttgggaaatggcatgaaagcatctactgtggcggcggctcctcttctgcctgtgtatggagagcaaatcctatgccgaaaggctacgagcaatactatagcttcacacagtttgcgctggaattaaatgaaatggatccatcatcaaagtctttattgccacctactgacactcgatttaggccagaccagaggtttctagaggaagggaacttagaagaagctgaaatacaaaagcagaggattgaacaactgcagagagaaaggcggcgggtcttagaagaaaatcatgtggagcaccagcctcggtttttcaggaaatccgacgatgactcttgggtgagcaacggcacctatttggaacttagaaaagatcttggtttttccaaactggaccatcctgtcttatggtgaaaaagtaaagaagaaagataacattagtgtatttctcctgtgcttgcc

SEQ ID NO: 14569 - DNA, 2614 bp, Homo sapiens
  source 1..2614: mol_type = unassigned DNA
tggataagagctaaaccacctgccactggggacttccatactctcggctcccttgtcatctgatggcattttgattgtctcgaggccaagtgacttgctgtccatgatgagtgatgagaagaaccttggtgtgtcccaaaaattggtatcaccttcaaggagcacaagtagctgctcttccaagcaaggaagtcgacaggacagctgggaagtggtggaaggactgaggggggagatgaattacacccaggagccaccagttcagaaaggatttttgctgaaaaagaggaagtggcccttaaaaggctggcataagagattcttctatctggacaaaggaatcttgaaatatgccaagagccaaaccgatatagagagagagaagctgcatggctgcattgatgtcgggctctcagtgatgtctgtaaagaagtcatcaaaatgcatagaccttgacaccgaggagcacatctaccatctgaaggtcaagtcagaagaagtctttgatgagtgggtatcgaaacttcgccaccacagaatgtatcgtcagaatgaaattgccatgtttccacatgaagttaaccactttttctcagggtccaccatcacagactcttcatctggggtgtttgactccatttcaagtaggaagcgtagcagtatatcaaagcagaatttatttcaaactggaagcaatgtatcattttcttgtggtggtgagacacgagttccattatggttacagtcttcagaggacatggaaaaatgctccaaagacctggcgcactgtcatgcctacctggtagaaatgagccagctcctgcaaagcatggacgtcctgcatcggacatactcggcaccagctatcaacgccatccaggtcccgaaacctttttctggcccagtaagactacactcctccaatcctaatttgtcaacactagattttggagaagagaaaaattattctgatggctctgaaacctcatcagagttttctaaaatgcaagaagatctgtgtcatattgcccataaagtttacttcactttaaggtcagcttttaatatcatgtcagcggagagagagaaactgaagcagctgatggagcaggatgcctcctcctccccgtctgctcaggtcattggtctgaagaacgccctgtcatccgaaaactccagagatgaaaaccgagctctagttcatcagctttctaatgaaagtagactctccatcactgactccctttctgagttttttgatgctcaggaagttctgttatctccaagctcttcagaaaacgagatttctgatgatgactcatatgtcagtgacataagtgataatctttccttagataatctcagtaatgatttagataatgagagacagaccttggggcctgtccttgatagtggtcgggaagcgaagtcccggagaagaacgtgcctgccggcgccctgcccgagcagcagtaacatcagcctgtggaacatcctgaggaacaacatcgggaaggacctgtccaaggtggccatgccggtggagctgaacgagcccctgaacacgctgcagaggctctgcgaggagctggagtacagcgagctcctggacaaggccgcgcagattcccagccccctggaaaggatggtatatgtggcagcctttgccatatcagcgtatgcatctagctactaccgagctggaagcaagccatttaatccggttcttggagaaacatatgaatgtattcgggaggacaagggcttccagtttttttcagaacaggtcagccaccatccgcctatctctgcgtgtcatgctgagtctagaaattttgttttctggcaagatgtgagatggaaaaacaaattctggggcaaatccatggaaattgttccaattggcacaacccatgtgactctgccagtttttggggatcattttgagtggaacaaagtgacctcttgcatccataacatcttaagcgggcagaggtggattgagcactatggagagattgtcatcaagaacctgcatgatgattcctgctactgcaaagtgaattttataaaggcaaaatactggagcactaatgcccatgagattgaaggcacagtgtttgacaggagtggaaaagcggttcatcggctgtttgggaaatggcatgaaagcatctactgtggcggcggctcctcttctgcctgtgtatggagagcaaatcctatgccgaaaggctacgagcaatactatagcttcacacagtttgcgctggaattaaatgaaatggatccatcatcaaagtctttattgccacctactgacactcgatttaggccagaccagaggtttctagaggaagggaacttagaagaagctgaaatacaaaagcagaggattgaacaactgcagagagaaaggcggcgggtcttagaagaaaatcatgtggagcaccagcctcggtttttcaggaaatccgacgatgactcttgggtgagcaacggcacctatttggaacttagaaaagatcttggtttttccaaactggaccatcctgtcttatggtgaaaaagtaaagaagaaagataacattagtgtatttctcctgtgcttgcc

SEQ ID NO: 14570 - DNA, 636 bp, Homo sapiens
  source 1..636: mol_type = unassigned DNA
tagagatggagtttctccatgttggtcaggctggtcttgaactcccgaccttaggtgatctgcctgccttggtctccaaagtgctgggattacaggcgtgagccaccgtgcccggccactgagagagttaagtgttatcataagtaagtatgtaaggtaatacatatgttaatcagcttgatttagccattccacaatgtatacatgtttcaagacactatgttgtacatgataaatatataaattttttatttgtcggttaaaaaaacggaacccagaactagcaaactaatatgcagtatggagccactcttacagtcctttctctagcttttccttttttctttccttaatatctgtaataagctgatgctaaaggactaagccaacaactcatttgaatcctaggcaaaatactggagcactaatgcccatgagattgaaggcacagtgtttgacaggagtggaaaagcggttcatcggctgtttgggaaatggcatgaaagcatctactgtggcggcggctcctcttctgcctgtgtatggagagcaaatcctatgccgaaaggctacgagcaatactatagcttcacacagtttgcgctggaattaaatgaaatggatccatcatcaaag

SEQ ID NO: 14571 - DNA, 306 bp, Homo sapiens
  source 1..306: mol_type = unassigned DNA
cttggagagcattcaaggaaaaagtccagaaagtgcgctgtcagaccacgtcactaagagtttcatcaagctcttagagatcgctcctgcagggcccactgctgtgcttttctgaaacatccatttattaacagagccccactattttaacatgttccaggccctagcacaaaacacagatcttaaagaacgcttacgcagaatccatgccgagtctctgctcctcgactcccccgctgtcgccaagtcgggtgacaatctggcagaggaaaactccagagatgaaaaccgagctctagttcatca

SEQ ID NO: 14572 - DNA, 534 bp, Homo sapiens
  source 1..534: mol_type = unassigned DNA
acctgtgcttgtcattatgtgcgtcgaggataagccaacctttataggttttagggtttcctttgggccacccaaaatgttttttaaatactttggataagagctaaaccacctgccactggggacttccatactctcggctcccttgtcatctgatggcattttgattgtctcgaggccaagtgacttgctgtccatgatgagtgatgagaagaaccttggtgtgtcccaaaaattggtatcaccttcaaggagcacaagtagctgctcttccaagcaaggaagtcgacaggacagctgggaagtggtggaaggactgaggggggagatgaattacacccaggagccaccagttcagaaaggatttttgctgaaaaagaggaagtggcccttaaaaggctggcataagagattcttctatctggacaaaggaatcttgaaatatgccaagagccaaaccgatatagagagagagaagctgcatggctgcattgatgtcgggctctcagtgatgtctgtaaagaagtcatcaaa

SEQ ID NO: 14573 - DNA, 540 bp, Homo sapiens
  source 1..540: mol_type = unassigned DNA
attatgtgcgtcgaggataagccaacctttataggtaagagtgctagtcattttatggactcataggatcactgaatttgaaagctagacaggatcgtcaggctgaaggaatcttggtaaatgggttttagggtttcctttgggccacccaaaatgttttttaaatactttggataagagctaaaccacctgccactggggacttccatactctcggctcccttgtcatctgatggcattttgattgtctcgaggccaagtgacttgctgtccatgatgagtgatgagaagaaccttggtgtgtcccaaaaattggtatcaccttcaaggagcacaagtagctgctcttccaagcaaggaagtcgacaggacagctgggaagtggtggaaggactgaggggggagatgaattacacccaggagccaccagttcagaaaggatttttgctgaaaaagaggaagtggcccttaaaaggctggcataagagattcttctatctggacaaaggaatcttgaaatatgccaagagccaaaccgat

SEQ ID NO: 14574 - DNA, 568 bp, Homo sapiens
  source 1..568: mol_type = unassigned DNA
agacatttcgcgagggggatggttccagaaagcgaagatctgagcgtggtgaatgaaatgtgaacagaatagctccggaaagagtctcagaaaccttgaattggggtcagtttggagactgaaaatgcgtcgagcgctgcaggtggtggttggcagggggatttaacactgtggagcccttactccgtcccaggcgctgagcccagcgagccacgcgcggtgcccagctcggtgaggttttagggtttcctttgggccacccaaaatgttttttaaatactttggataagagctaaaccacctgccactggggacttccatactctcggctcccttgtcatctgatggcattttgattgtctcgaggccaagtgacttgctgtccatgatgagtgatgagaagaaccttggtgtgtcccaaaaattggtatcaccttcaaggagcacaagtagctgctcttccaagcaaggaagtcgacaggacagctgggaagtggtggaaggactgaggggggagatgaattacacccaggagccaccagttcagaaaggatttttgctgaaaaag

SEQ ID NO: 14575 - DNA, 3298 bp, Homo sapiens
  source 1..3298: mol_type = unassigned DNA
gcgcacgcgcagcaccccatttaagtttctcgtctttgcagtggctttgcttagatccggtgccgccttgaaggcggggctgggtcccagccgtagccaatggagccccgggtgagggttgaggggtggaaggtgcctactagccggtgcaggtttcttctagcgcgtgtgctggggtacctggtcgtcatggaggcggtattgaccgaagagcttgatgaggaagagcagctgctgagaaggcatcgcaaagagaagaaggagttgcaagccaaaattcagggcatgaagaatgctgttcccaagaatgacaagaagaggaggaagcaactcaccgaagatgtggccaagttggaaaaagaaatggaacagaaacatagagaggaactggagcaattgaagctgactactaaggagaataagatagattctgttgctgttaacatttcaaacttggtgcttgagaatcagccacctcggatatcaaaagcacaaaagagacgggaaaagaaagctgcattggaaaaggagcgagaagaacggatagctgaagctgaaattgaaaacttaacaggagccagacatatggaaagtgagaaacttgctcaaatattggcagctagacagttagaaattaaacagattccatctgatggccactgtatgtataaagccattgaagatcaactgaaagaaaaggattgtgctctgactgtggttgccttgagaagtcagaccgctgagtatatgcaaagccatgtggaagactttctgccatttttaacaaaccctaatacaggagatatgtatactccagaagaatttcagaagtactgtgaagatattgtaaacacagctgcatggggaggtcagcttgagctaagagctctgtctcacattttacaaacaccaatagagataatacaggcagattctcctcccattatagttggtgaagaatattcaaaaaaaccactaatacttgtatatatgagacatgcatatggcttaggagaacattataattcggttacacggttggtaaacatagttactgaaaattgcagctaatttatacaatgttgtacaattatgttttaatacagtgtgctgaactgagtatttctaccaagtgttgggttgttctaaatgctactgaaaaacacaactaccttatatcagttttatggcaaagctactaacaggtgtttttagaaatatgtcagagataaactttaaccagtgtcttcttagtggaattttaaaaatttgttaagttcattgtagagaacaccattcatagaccaagatggtcccctattagctgatattttcatttatgtaagatcctggacattctgttttgtgttggaacaaattttcaatgtttttaattctcccttttctgcctgttcctaaaaactttcaaaataaccatttcaatgtaatttgtcttgaagaagtttacccaatatctttgtcattgcaataatgtagtatggtgatggtcaatttaattattgcttataaaatgaacttgattgcagtaaccatggtatcgatgagactaatgcagtgaagctttattactaatatatatagccttatcaaagcaagctaagaagcttgctttaataattaataatttaaaaatatttatttagatgggattcagttgtttaaagaagtgagataaattcaaaggtaaataggtattctctgtcaaatttaaatctctaaagaattagagattagttttttatttgtgtataatttaaaaaagacctaataggttactgtctttttaatgcatttgttattctttcgtattttttaagcatcggactggagttagtaccatcatctcttgagtctttcataactacacatttttatatttccttttgtgttttctactttgctttccttgaaggaacaagcattttgtggcctttaccttgtgcaattttagggagtagcagtgtaaaaggtccaagaccacatttacttgaaattcttcctcttttctgatttgtcttaccagatatttcccttcttgcctcattctctaggatttgaataaaacctttgccacttattttattagccttattaatgtcacctttccttcaactcaaatatttgagaaattttatgttacatatatgaatgaagttgaaagctactgtttggaagctaagacttgtatagagtagttttgtatatgaatggttgttctagctcagatttcaggttactcacaacagtattctttctaagaggatatatacaaatgtctctcataatttatgtaaggaaatattatgaaaatgagacttttttagtttgatgtgtgtttcccaaactagagataaaactagtaagatttagtatcgtttataacatttgaatttttgctccatgagtacaactaatttttataagtaaatattgggtttatatgaaaaatggggtgtcagtcttttcacacgcccagcaggtaacaatgtgggaagctggcagggtcattgatagcaagtaagtacttcctgaaggctttccagttcaaaagattacaagccattctgcctgccaaacaaattatattctgaagatgcctgttttgtaacccttgatgtgaattttttggtgtctgaaatttacaaaagaatgaaattgaaattgtaaaacactaaatgctttgggtttattttgaagtaatctgttactttaaaatgtcaacattaggaagccataaaacaagatattatgaaacccagtattataaatgttatctacatctaaagtattttaaaataacttattggcagctttattctttttttccttacaagatttagaatctttttggttatatgtctatttttcaattttgttatatttttaatttaagtggccaatgtggttatgaacaagatttgtatggtcagcttctgttctttcctaaaacttcagataaatatcattttagctataacctaaaaaagtgtttaaataaaatgacagatgttaatttaaaagcagcatatgctaatttactttttcatatgatgatggtctaatggaagttacatatgctttcttttgtcctaactctgaaaagtatatgtcagagttctggaatatgtctttagccaagaattttattcacttaaatttgtttacaacttgtataaagcaaaaaagaatgtgtgtaactatagtgaacgcatagttttgcttatattatgtgatgtttgccaaaaaaagaataaaaaatgaatgaattaaatcaaca

SEQ ID NO: 14576 - DNA, 1631 bp, Homo sapiens
  source 1..1631: mol_type = unassigned DNA
aaggtgcctactagccggtgcaggtttcttctagcgcgtgtgctggggtacctggtcgtcatggaggcggtattgaccgaagagcttgatgaggaagagcagctgctgagaaggcatcgcaaagagaagaaggagttgcaagccaaaattcagggcatgaagaatgctgttcccaagaatgacaagaagaggaggaagcaactcaccgaagatgtggccaagttggaaaaagaaatggaacagaaacatagagaggaactggagcaattgaagctgactactaaggagaataagatagattctgttgctgttaacatttcaaacttggtgcttgagaatcagccacctcggatatcaaaagcacaaaagagacgggtgcctggatagaaggagctctctgtgttgtccttggtccctgctctgctcttaccagctgtatggcctttggaaatctttctgcgtgctgtttcctcagaagaggaaaatgaggggttttggattagatgatatctaaggaaaagaaagctgcattggaaaaggagcgagaagaacggatagctgaagctgaaattgaaaacttaacaggagccagacatatggaaagtgagaaacttgctcaaatattggcagctagacagttagaaattaaacagattccatctgatggccactgtatgtataaagccattgaagatcaactgaaagaaaaggattgtgctctgactgtggttgccttgagaagtcagaccgctgagtatatgcaaagccatgtggaagactttctgccatttttaacaaaccctaatacaggagatatgtatactccagaagaatttcagaagtactgtgaagatattgtaaacacagctgcatggggaggtcagcttgagctaagagctctgtctcacattttacaaacaccaatagagataatacaggcagattctcctcccattatagttggtgaagaatattcaaaaaaaccactaatacttgtatatatgagacatgcatatggcttaggagaacattataattcggttacacggttggtaaacatagttactgaaaattgcagctaatttatacaatgttgtacaattatgttttaatacagtgtgctgaactgagtatttctaccaagtgttgggttgttctaaatgctactgaaaaacacaactaccttatatcagttttatggcaaagctactaacaggtgtttttagaaatatgtcagagataaactttaaccagtgtcttcttagtggaattttaaaaatttgttaagttcattgtagagaacaccattcatagaccaagatggtcccctattagctgatattttcatttatgtaagatcctggacattctgttttgtgttggaacaaattttcaatgtttttaattctcccttttctgcctgttcctaaaaactttcaaaataaccatttcaatgtaatttgtcttgaagaagtttacccaatatctttgtcattgcaataatgtagtatggtgatggtcaatttaattattgcttataaaatgaacttgattgcagtaaccatggtatcgatgagactaatgcagtgaagctttattactaatatatatagccttatcaaagcaagcta

SEQ ID NO: 14577 - DNA, 1330 bp, Homo sapiens
  source 1..1330: mol_type = unassigned DNA
gtgtgctggggtacctggtcgtcatggaggcggtattgaccgaagagcttgatgaggaagagcagctgctgagaaggcatcgcaaagagaagaaggagttgcaagccaaaattcagggcatgaagaatgctgttcccaagaatgacaagaagaggaggaagcaactcaccgaagatgtggccaagttggaaaaagaaatggaacagaaacatagagaggaactggagcaattgaagctgactactaaggagaataagatagattctgttgctgttaacatttcaaacttggtgcttgagaatcagccacctcggatatcaaaagcacaaaagagacgggtgcctggatagaaggagctctctgtgttgtccttggtccctgctctgctcttaccagctgtatggcctttggaaatctttctgcgtgctgtttcctcagaagaggaaaatgaggggttttggattagatgatatctaaggaaaagaaagctgcattggaaaaggagcgagaagaacggatagctgaagctgaaattgaaaacttaacaggagccagacatatggaaagtgagaaacttgctcaaatattggcagctagacagttagaaattaaacagattccatctgatggccactgtatgtataaagccattgaagatcaactgaaagaaaaggattgtgctctgactgtggttgccttgagaagtcagaccgctgagtatatgcaaagccatgtggaagactttctgccatttttaacaaaccctaatacaggagatatgtatactccaggtaatttatttttctttactatgttttattgttgctttgttgtagttgtttttaaataaggtgcttcccagcactgagcgtaagaagaacccagatgatccttatgaggaaaaaacatcacaagatttaggcagaattattttctgtaattttaatagatgttggtgtatttttctctattaagatttcttaattacttagttattttgtaattataatatgctaatcattttatgtaagatagaagtaggaataagagtcatttttgaaaaaaatgtaagttcttatttgacaaagtgaagtattgaggaaggtaagcttcaggaagtatatatagggtctgaagaccataaggagagaatgactaggaaaaccatttcctgcttttatcttataatttgggaactttacttttatttacaataagctataattaggaagattagtgttcaagtaaaacaaatgggttaataacctgctttattctatacaatactatcacagttaagataaaatatttatgaggaagtaaaaaagta

SEQ ID NO: 14578 - DNA, 1089 bp, Homo sapiens
  source 1..1089: mol_type = unassigned DNA
gtgctggggtacctggtcgtcatggaggcggtattgaccgaagagcttgatgaggaagagcagctgctgagaaggcatcgcaaagagaagaaggagttgcaagccaaaattcagggcatgaagaatgctgttcccaagaatgacaagaagaggaggaagcaactcaccgaagatgtggccaagttggaaaaagaaatggaacagaaacatagagaggaactggagcaattgaagctgactactaaggagaataagatagattctgttgctgttaacatttcaaacttggtgcttgagaatcagccacctcggatatcaaaagcacaaaagagacgggaaaagaaagctgcattggaaaaggagcgagaagaacggatagctgaagctgaaattgaaaacttaacaggagccagacatatggaaagtgagaaacttgctcaaatattggcagctagacagttagaaattaaacagattccatctgatggccactgtatgtataaagccattgaagatcaactgaaagaaaaggattgtgctctgactgtggttgccttgagaagtcagaccgctgagtatatgcaaagccatgtggaagactttctgccatttttaacaaaccctaatacaggagatatgtatactccagaagaatttcagaagtactgtgaagatattgtaaacacagctgcatggggaggtcagcttgagctaagagctctgtctcacattttacaaacaccaatagagataatacaggcagattctcctcccattatagttggtgaagaatattcaaaaaaaccactaatacttgtatatatgagacatgcatatggcttaggagaacattataattcggttacacggttggtaaacatagttactgaaaattgcagctaatttatacaatgttgtacaattatgttttaatacagtgtgctgaactgagtatttctaccaagtgttgggttgttctaaatgctactgaaaaacacaactaccttatatcagttttatggcaaagctactaacaggtgtttttagaaatatgtcagagataaactttaaccagtgtcttcttagtgg

SEQ ID NO: 14579 - DNA, 3294 bp, Homo sapiens
  source 1..3294: mol_type = unassigned DNA
gcgcacgcgcagcaccccatttaagtttctcgtctttgcagtggctttgcttagatccggtgccgccttgaaggcggggctgggtcccagccgtagccaatggagccccgggtgagggttgaggggtggaaggtgcctactagccggtgcaggtttcttctagcgcgtgtgctggggtacctggtcgtcatggaggcggtattgaccgaagagcttgatgaggaagagcagctgctgagaaggcatcgcaaagagaagaaggagttgcaagccaaaattcagggcatgaagaatgctgttcccaagaatgacaagaagaggaggaagcaactcaccgaagatgtggccaagttggaaaaagaaatggaacagaaacatagagaggaactggagcaattgaagctgactactaaggagaataagatagattctgttgctgttaacatttcaaacttggtgcttgagaatcagccacctcggatatcaaaagcacaaaagagacgggaaaagaaagctgcattggaaaaggagcgagaagaacggatagctgaagctgaaattgaaaacttaacaggagccagacatatggaaagtgagaaacttgctcaaatattggcagctagacagttagaaattaaacagattccatctgatggccactgtatgtataaagccattgaagatcaactgaaagaaaaggattgtgctctgactgtggttgccttgagaagtcagaccgctgagtatatgcaaagccatgtggaagactttctgccatttttaacaaaccctaatacaggagatatgtatactccagaagaatttcagaagtactgtgaagatattgtaaacacagctgcatggggaggtcagcttgagctaagagctctgtctcacattttacaaacaccaatagagataatacaggcagattctcctcccattatagttggtgaagaatattcaaaaaaaccactaatacttgtatatatgagacatgcatatggcttaggagaacattataattcggttacacggttggtaaacatagttactgaaaattgcagctaatttatacaatgttgtacaattatgttttaatacagtgtgctgaactgagtatttctaccaagtgttgggttgttctaaatgctactgaaaaacacaactaccttatatcagttttatggcaaagctactaacaggtgtttttagaaatatgtcagagataaactttaaccagtgtcttcttagtggaattttaaaaatttgttaagttcattgtagagaacaccattcatagaccaagatggtcccctattagctgatattttcatttatgtaagatcctggacattctgttttgtgttggaacaaattttcaatgtttttaattctcccttttctgcctgttcctaaaaactttcaaaataaccatttcaatgtaatttgtcttgaagaagtttacccaatatctttgtcattgcaataatgtagtatggtgatggtcaatttaattattgcttataaaatgaacttgattgcagtaaccatggtatcgatgagactaatgcagtgaagctttattactaatatatatagccttatcaaagcaagctaagaagcttgctttaataattaataatttaaaaatatttatttagatgggattcagttgtttaaagaagtgagataaattcaaaggtaaataggtattctctgtcaaatttaaatctctaaagaattagagattagttttttatttgtgtataatttaaaaaagacctaataggttactgtctttttaatgcatttgttattctttcgtattttttaagcatcggactggagttagtaccatcatctcttgagtctttcataactacacatttttatatttccttttgtgttttctactttgctttccttgaaggaacaagcattttgtggcctttaccttgtgcaattttagggagtagcagtgtaaaaggtccaagaccacatttacttgaaattcttcctcttttctgatttgtcttaccagatatttcccttcttgcctcattctctaggatttgaataaaacctttgccacttattttattagccttattaatgtcacctttccttcaactcaaatatttgagaaattttatgttacatatatgaatgaagttgaaagctactgtttggaagctaagacttgtatagagtagttttgtatatgaatggttgttctagctcagatttcaggttactcacaacagtattctttctaagaggatatatacaaatgtctctcataatttatgtaaggaaatattatgaaaatgagacttttttagtttgatgtgtgtttcccaaactagagataaaactagtaagatttagtatcgtttataacatttgaatttttgctccatgagtacaactaatttttataagtaaatattgggtttatatgaaaaatggggtgtcagtcttttcacacgcccagcaggtaacaatgtgggaagctggcagggtcattgatagcaagtaagtacttcctgaaggctttccagttcaaaagattacaagccattctgcctgccaaacaaattatattctgaagatgcctgttttgtaacccttgatgtgaattttttggtgtctgaaatttacaaaagaatgaaattgaaattgtaaaacactaaatgctttgggtttattttgaagtaatctgttactttaaaatgtcaacattaggaagccataaaacaagatattatgaaacccagtattataaatgttatctacatctaaagtattttaaaataacttattggcagctttattctttttttccttacaagatttagaatctttttggttatatgtctatttttcaattttgttatatttttaatttaagtggccaatgtggttatgaacaagatttgtatggtcagcttctgttctttcctaaaacttcagataaatatcattttagctataacctaaaaaagtgtttaaataaaatgacagatgttaatttaaaagcagcatatgctaatttactttttcatatgatgatggtctaatggaagttacatatgctttcttttgtcctaactctgaaaagtatatgtcagagttctggaatatgtctttagccaagaattttattcacttaaatttgtttacaacttgtataaagcaaaaaagaatgtgtgtaactatagtgaacgcatagttttgcttatattatgtgatgtttgccaaaaaaagaataaaaaatgaatgaattaaatc

SEQ ID NO: 14580 - DNA, 3434 bp, Homo sapiens
  source 1..3434: mol_type = unassigned DNA
gcgcacgcgcagcaccccatttaagtttctcgtctttgcagtggctttgcttagatccggtgccgccttgaaggcggggctgggtcccagccgtagccaatggagccccgggtgagggttgaggggtggaaggtgcctactagccggtgcaggtttcttctagcgcgtgtgctggggtacctggtcgtcatggaggcggtattgaccgaagagcttgatgaggaagagcagctgctgagaaggcatcgcaaagagaagaaggagttgcaagccaaaattcagggcatgaagaatgctgttcccaagaatgacaagaagaggaggaagcaactcaccgaagatgtggccaagttggaaaaagaaatggaacagaaacatagagaggaactggagcaattgaagctgactactaaggagaataagatagattctgttgctgttaacatttcaaacttggtgcttgagaatcagccacctcggatatcaaaagcacaaaagagacgggtgcctggatagaaggagctctctgtgttgtccttggtccctgctctgctcttaccagctgtatggcctttggaaatctttctgcgtgctgtttcctcagaagaggaaaatgaggggttttggattagatgatatctaaggaaaagaaagctgcattggaaaaggagcgagaagaacggatagctgaagctgaaattgaaaacttaacaggagccagacatatggaaagtgagaaacttgctcaaatattggcagctagacagttagaaattaaacagattccatctgatggccactgtatgtataaagccattgaagatcaactgaaagaaaaggattgtgctctgactgtggttgccttgagaagtcagaccgctgagtatatgcaaagccatgtggaagactttctgccatttttaacaaaccctaatacaggagatatgtatactccagaagaatttcagaagtactgtgaagatattgtaaacacagctgcatggggaggtcagcttgagctaagagctctgtctcacattttacaaacaccaatagagataatacaggcagattctcctcccattatagttggtgaagaatattcaaaaaaaccactaatacttgtatatatgagacatgcatatggcttaggagaacattataattcggttacacggttggtaaacatagttactgaaaattgcagctaatttatacaatgttgtacaattatgttttaatacagtgtgctgaactgagtatttctaccaagtgttgggttgttctaaatgctactgaaaaacacaactaccttatatcagttttatggcaaagctactaacaggtgtttttagaaatatgtcagagataaactttaaccagtgtcttcttagtggaattttaaaaatttgttaagttcattgtagagaacaccattcatagaccaagatggtcccctattagctgatattttcatttatgtaagatcctggacattctgttttgtgttggaacaaattttcaatgtttttaattctcccttttctgcctgttcctaaaaactttcaaaataaccatttcaatgtaatttgtcttgaagaagtttacccaatatctttgtcattgcaataatgtagtatggtgatggtcaatttaattattgcttataaaatgaacttgattgcagtaaccatggtatcgatgagactaatgcagtgaagctttattactaatatatatagccttatcaaagcaagctaagaagcttgctttaataattaataatttaaaaatatttatttagatgggattcagttgtttaaagaagtgagataaattcaaaggtaaataggtattctctgtcaaatttaaatctctaaagaattagagattagttttttatttgtgtataatttaaaaaagacctaataggttactgtctttttaatgcatttgttattctttcgtattttttaagcatcggactggagttagtaccatcatctcttgagtctttcataactacacatttttatatttccttttgtgttttctactttgctttccttgaaggaacaagcattttgtggcctttaccttgtgcaattttagggagtagcagtgtaaaaggtccaagaccacatttacttgaaattcttcctcttttctgatttgtcttaccagatatttcccttcttgcctcattctctaggatttgaataaaacctttgccacttattttattagccttattaatgtcacctttccttcaactcaaatatttgagaaattttatgttacatatatgaatgaagttgaaagctactgtttggaagctaagacttgtatagagtagttttgtatatgaatggttgttctagctcagatttcaggttactcacaacagtattctttctaagaggatatatacaaatgtctctcataatttatgtaaggaaatattatgaaaatgagacttttttagtttgatgtgtgtttcccaaactagagataaaactagtaagatttagtatcgtttataacatttgaatttttgctccatgagtacaactaatttttataagtaaatattgggtttatatgaaaaatggggtgtcagtcttttcacacgcccagcaggtaacaatgtgggaagctggcagggtcattgatagcaagtaagtacttcctgaaggctttccagttcaaaagattacaagccattctgcctgccaaacaaattatattctgaagatgcctgttttgtaacccttgatgtgaattttttggtgtctgaaatttacaaaagaatgaaattgaaattgtaaaacactaaatgctttgggtttattttgaagtaatctgttactttaaaatgtcaacattaggaagccataaaacaagatattatgaaacccagtattataaatgttatctacatctaaagtattttaaaataacttattggcagctttattctttttttccttacaagatttagaatctttttggttatatgtctatttttcaattttgttatatttttaatttaagtggccaatgtggttatgaacaagatttgtatggtcagcttctgttctttcctaaaacttcagataaatatcattttagctataacctaaaaaagtgtttaaataaaatgacagatgttaatttaaaagcagcatatgctaatttactttttcatatgatgatggtctaatggaagttacatatgctttcttttgtcctaactctgaaaagtatatgtcagagttctggaatatgtctttagccaagaattttattcacttaaatttgtttacaacttgtataaagcaaaaaagaatgtgtgtaactatagtgaacgcatagttttgcttatattatgtgatgtttgccaaaaaaagaataaaaaatgaatgaattaaatc

SEQ ID NO: 14581 - DNA, 4275 bp, Homo sapiens
  source 1..4275: mol_type = unassigned DNA
gcagcctcggaattggctagagcgccagagccgagtcagccataaagctacgcgctaggctcttggccctgacgtgaggcgcgcagagatggcgtaacgggaatagttttcaacgtctatttcattccctgcttcagaggacctctttaatctttgattttggtccctgtttctaagaaaagcaactgaaaaggtcgtaataccgcccctgagaaaaaaggagcagcgctaaataatcgagaaaatgcctcctcttgaaacggatatagagatggaaacaagatataagaaggattgagaatcatataatacaggagcttaaacacctatgcgcgatgataaagagggtactattagagcgcttggaaaataccaggaagttgagagagttaacagaagggcgcacgctggattggccacaaaatcgaattactgaaggccactactgattaggacacttatggagaacgtgggtagcactgaagcagcattctagtttccagtgccatcaacctcatacgtatctacctggtctctgatcgaagctaccgtaatgtgttcttgaggtcaacatgttttgtggaagtcactgtatttgcccctttatgtcaattacctattataaaccgagagaaatgggaaaattaaaaacctgttttgaattatttttaatgcagaactattttttcaagtgaaatcttatacagaagtctggtatatgaaacagataaaaatgaaccaatgagattgaagggaatgagtagcatgtaatcctgcccactcttcggagaatttgaggcaactttgtagagccttaggagttcagtttgtatgttactgggtaatttaaagcagaaattttaatctgactgcacttaagaatcatctgaagtgtttgtattggttagtcttatttttaatactgatgtcctggtctctctcccctcaaaaaaactctgctgctgggaccaagcacatagatgctttttaaaaagctcccgaaaatgactctaatatgcagccaggattgaaaataactaccctacacagcatttttcctgattctgagcactcagcttttcattgattttccctagggcaagtccttcatcttattctgggtccttgtgttttctttctgaacctacaatttctccataggtcccatggttttcaaaatttctcattttccattttctgtccttttatattacctacttgaaaaccacagtcatctttcaaaacaaaacactgcctgtttcttaggtctttattgtgggcttgttattcctcaatacaaatttacataaaataataacaattaagacatgggccttggtgtcagaattattttatatctttcttattaactctgcagcttaccagctctggataagttaaaggacagctatagtcttactacatagaatcattataaggaattggtggagtgatccttataaagtgtttgcatggtacctagcacagagaaagtgcttgaagttgttaactgttatggttacaaaatatgtaaataatttttattgtccaattttctctcttcatatacactaaattgttctaattcttgaaccacagtaacaacgtgtgaatgacttatgcattcagtgtgtccactcaactactatttattaagtacctgttatggtctatgaaaggaactggcaagacagtcattattccccttaaatattcccaagtgttagtggtcaaagtttctctctgctgaaaatgaaaagtaccccgtaggatggaggaaacagccatcttgagggctaaatctggtctaacataatatttgttgacctgttactacagtgttgccacatatgctttgttggttttttaatttagcccccaaacattttaaaaatcagatcatttcatgttaaaagaaatctagacttctagttctcttgcaaatgtgagctctgacaaacattgaaattatagagtagcaggggtagtgtgccctttatttggtgcatgtcttctgcaggttcccaagttctgctgttctctgttgttgcctcatcactgaggccaaatgtcagttgctgcttacatgcatttgaacagttgttattttttatagtgaaattaaaggtaaactgttttgatatccatgtttctaccaaaggtaagaaaacacaagccaaaaagacacagatttcaaaaaaaataagagaaagcataattctttatggaagtgaagaatagtctttttatctaagtatgccaaaaaaagcatgtataaaaaaatacaatttaagatgccattatgaaaaaactccaagtcagtgtttactaacatcttttcagttttaggaaggaggcaggttgtcttgcatctcattggatctccggtactacctatttcttgaaataccataagtgctaatatatacttgcaatagataaacatgaggagtattacaaatacaagagatagcaggaactattttaatattaagagatatcaaatatgcacgctaggattaataaatgaaataattattttccttcttctacaatatttacttaatctggaggcagaaatacatgttgtctctcttcctgcttctccatcaaaatcccgaccaagtaatcaggatctttgagaatcacaataagaattacagcctcatgtttggattttttaaatttaaattttaaattactcctttccactgatatttattgagaaactgctatgctccaggtactgcgataaacactgggcaaatgttggagagctaaaaaggcatattcctcttataaagacattatttacttgtaacaaacaagtaaataaatgtattagtcaatatgtaagtaaacaaaaaaatggacaagcacaaattatattaagtactatgtaggaaaccaatagagtactgtaacagaataataaggtatatgggatgggggtgggaatctgttcagagatgatctacctgagaaggtaacatgtaggcagagatctgaatcgtgaggagtcagcctttcagagtaagtggagtaggcacttccaagagaaaagcatattcctggctatttgcctatcaatgtcatcttgaacaagggttagcaatctcctacctgtaccacagatgctatgtgccacctccatgctacctttgccaccaagagattcaatgtgatgcatgatttgaaggttcctcatcctgataccctgtggaaagtaaaatcagtgacaaataaaagcagatcattatctcaggtagagtctgctaaagatgatacttgcttgtcagtacatgagtatccaccctagtaaaaaaccacagaagaagtgggatttatcttcaatgttctctcacttccccttccaagtgcctctcctgccttctgatgctctttcccacaagttgcaggcaaataaagcatgtatattactctctttttatccagagttgctccttgtccttatatgaagtagattccagacctcacaattgtatatgcctacccttctactccaacccctcaaaaaaagaggaagaatgaaagaatgaacaagagaaaaggaaggaagagagggagagaggaaaggagggaaggatggtcctgaagatcacagttcggtgctgaaaaaagcatttctattaaacttcaagacagaatgaatgaccatagctaataatgtaccttaagcttttctagaatctttgtattaaaaaagttgattgttactaaatgtattttaatctcataaaattttaggaatttaaatgaagaatttcacaaagggtaagaaaaattatatattatatttataaatttgtcattatgattctcccattgtggaaaaaaaaacaaaatctcggtaccccaattcacaaagccaaaaggaagaaagtaagctgaacgctgagtcatgcaagaaactgctcgcttttgttcctaagctaatagctacagataaaaggtcagatatctccataggtaggtactctatgttcaccttatgtaaagtgccaatttattgagcgtaagaggattacctaattgactattccccagcctgctccttttctcttgcaacacatggagtcagcaatgggaccatatcctctctctttcccctccagcctgctttccccctttaaatactgaagccctcaaaatcatctttctaaaaaggtatgaaccatagattgttcctgtggatttgtgtttctttcttccgggcatatccttaagcttggcaaaataaaattctaaattgat

SEQ ID NO: 14582 - DNA, 2171 bp, Homo sapiens
  source 1..2171: mol_type = unassigned DNA
gtgaccctgccgtgatgggcggggcggcaggggaggaaccagactgcgagcggagaagcggagtttgcagcctcggaattggctagagcgccagagccgagtcagccataaagctacgcgctaggctcttggccctgacgtgaggcgcgcagagatggcgtaacgggaatagttttcaacgtctatttcattccctgcttcagaggacctctttaatctttgattttggtccctgtttctaagaaaagcaactgaaaaggtcgtaataccgcccctgagaaaaaaggagcagcgctaaataatcgagaaaatgcctcctcttgaaacggatatagagatggaaacaagatataagaaggattgagaatcatataatacaggagcttaaacacctatgcgcgatgataaagagggtactattagagcgcttggaaaataccaggaagttgagagagttaacagaagggcgcacgctggattggccacaaaatcgaattactgaagtaagtgcaaaacgacaaattgtcacagaatacagagaaaaggggaaaagaaattaagaggagaaaaagagagatctagagggccggtccaggagatacaatctatgcataataggaatacctgaaactgaggacagagcaagtggagctgaaacaataaaggatctacttgaaaaaattttccagaattgaagaacgaactagatctacaaatggaaaaggctcataggatacctttaaagtttaatgaaaagaaagcagcatctagacatatccgggtgacgtttttgaatttcaaagacgaaacattttacaagcatccagtcagagaaagcaggttacttacaaaggggcaaaagtcaggctgacctcagatttttctcctgcaattctaaatgccagaagacagtggaacaatatctagagtgttaagggaaaataattttgagccaagaattatatactctgccaagttatcatttctttacaaaggaaactggaagacattcttagatatacaggggttaggaaagtatatcaaccaagaactttccctgaaaattttgctgaaggatttactgcagctaacagagaacctgaattaaaataagaatagggaggcaattgtatgaaagaactgatggtatgcattaaaactagttaaggagcattaagtttaaattgttatgtatagggcattaaaactaaatacaaaaatagaaacataagctgggtgtaaaatttcagtttacgtttaaactggaagggcataccacatgttcaatatattggacaaatactgttttatttttagcatgtagtattgtagatacaaatacgcatgttcttaagctaaacctaagtaaaagggctttgtcactgtagatttgacaaataacattctaaatgtcaaatctgacaattggaaaacagtacagttttatttcccttatttttaagtatagcaggaaaaaaataacaagtttgtccatgttactactgatactgtaaagaaacttccaaatcactggtttgggagggggtggatacatcctcattttctgtacatgatgcatggggaaaaacagtagttactgcatcatatagttccaagtaaatcatatagttccaagtaaatttgacatggaaataagtgttaactacaaaaatagaatatatacattccaatgtttggaaaagaagtggtaaaaagaaaaatagcaaaaagacactaaaattagcaaaaagtagattgacagtacagatgacctataaactggttaaatagccctattacaattgaaattgggtcaaaaatcaatctctaacctgagatacatttgtataaaacaaatgatcaaagagtttaaagataatggaaactataaatcatagaaatggcaacatttttcttaaaatctaaacataagacattttatgtaaaacatacaatataggatgtaacatttaacaaactatatggtaaataatatgacattaatatataaaatatatgttccagatcttgatgtgggtgatagttttacttatgtacatcgatatacatctatttaaaaacatgtacatttaaattgttgcattttatgtatttaaaatttattgagtaatccttctgtatgtattattaaagagaatatagcaaaaaaa

SEQ ID NO: 14583 - DNA, 471 bp, Homo sapiens
  source 1..471: mol_type = unassigned DNA
gaagggctgcagccctaacacggagaagcgcgctaagagcctggaggcgggaccaatttatgactgacgtctacccacacccattgcttttctgattccttctcaaacaaaccaatgaatgcgacgacggagacagcagcgtgccccaggcgctagaagtggctctgccccttctactttgctgccctttggtcgccatgcttagtgtggctactgcctctgtgctacttgaggctctcctacggcttttcgatgccttcgatgaacctctacctaagcacttcttccctttcaccgcgaactcctaccttctcgggtttctagcttgctcactttacatccagccacactggagatggcggccggaggcgggcccgaggtggggcgtgaccagcgcagtgacgtcagcgcgctgcgtgtcggcagggagtggagcaactgctgtagtccaagcagcttattgtgccccta

SEQ ID NO: 14584 - DNA, 1908 bp, Homo sapiens
  source 1..1908: mol_type = unassigned DNA
gtgtcggcaggtggaggaagaggggaaagtttggcccgtgcgtggggctggggtggagggcgggacagaggggctgggcccaggcaaagcttctgtcgctgctgctgcggaggccgaggacaggacgtgggctgggccgggcagtgccggactcggaggagcaggaggcgaggtccgccggagctctgagcccccgctgctctgccgcgcggtgaccccgcgccccggcgccgtccgacccgtggctgttccgagacgattggtgggggcgcggcggcggcggcggcggctgttgggggtggggagacgcgcggcgaggagacgagcgaggtcagcgagtttgagggaggaccgcgagccgctgccgccgtcatgtccgaggactcgagcgccctgccctggtccatcaacagggacgattacgagctgcaggaggtgatcgggagtggagcaactgctgtagtccaagcagcttattgtgcccctaaaaaggagaaagtggcaatcaaacggataaaccttgagaaatgtcaaactagcatggatgaactcctgaaagaaattcaagccatgagtcaatgccatcatcctaatattgtatcttactacacatcttttgtggtaaaagatgagctgtggcttgtcatgaagctgctaagtggaggttctgttctggatattattaagcacattgtggcaaaaggggaacacaaaagtggagtcctagatgaatctaccattgctacgatactccgagaagtactggaagggctggaatatctgcataaaaatggacagatccacagagatgtgaaagctggaaacattcttcttggagaagatggctcagtacagattgcagactttggggttagtgcttttttagcaactggtggtgatattacccgaaataaagtgagaaagacctttgttggcaccccttgttggatggcacctgaagttatggaacaggtccgtggttatgatttcaaagctgatatttggagttttggaattacagcaattgaattggctacaggggcggctccttatcataaatatccaccaatgaaggttttaatgctgacactgcagaacgatcctccttctttggaaactggtgttcaagataaagaaatgctgaaaaaatatggaaaatcatttagaaaaatgatttcattgtgccttcaaaaagatccagaaaaaagaccaacagcagcagaactattaaggcacaaatttttccagaaagcaaagaataaagaatttcttcaagaaaaaacattgcagagagcaccaaccatttctgaaagagcaaaaaaggttcggagagtaccaggttccagtgggcgtcttcataagacagaggatggaggctgggagtggagtgatgatgaatttgatgaagaaagtgaggaagggaaagcagcaatttcacaactcaggtctccccgagtgaaagaatcaatatcaaattctgagctctttccaacaactgatcctgtgggtactttgctccaagttccagaacagatctctgctcatctacctcagccagctgggcagattgctacacagccaactcaagtctctctcccacccaccgcagagccagcaaaaacagctcaggctttgtcttcaggatcaggttcacaagaaaccaagatcccaatcagtctagtactaagattaaggaattccaaaaaagaactaaatgatattcgatttgaatttactcctgggagaggtgaggcatcaaatggattgaaaacaaaatagcttccaatttgtgattcaatgaaatgtgttgtgaagtttctgtcctttgtgaagttttgcttttaaaggataataaaaattttcctggttttggcgagtatatgagtgagataaaaatgcagttcgttg

SEQ ID NO: 14585 - DNA, 4553 bp, Homo sapiens
  source 1..4553: mol_type = unassigned DNA
gtgtcggcaggtggaggaagaggggaaagtttggcccgtgcgtggggctggggtggagggcgggacagaggggctgggcccaggcaaagcttctgtcgctgctgctgcggaggccgaggacaggacgtgggctgggccgggcagtgccggactcggaggagcaggaggcgaggtccgccggagctctgagcccccgctgctctgccgcgcggtgaccccgcgccccggcgccgtccgacccgtggctgttccgagacgattggtgggggcgcggcggcggcggcggcggctgttgggggtggggagacgcgcggcgaggagacgagcgaggtcagcgagtttgagggaggaccgcgagccgctgccgccgtcatgtccgaggactcgagcgccctgccctggtccatcaacagggacgattacgagctgcaggaggtgatcgggagtggagcaactgctgtagtccaagcagcttattgtgcccctaaaaaggagaaagtggcaatcaaacggataaaccttgagaaatgtcaaactagcatggatgaactcctgaaagaaattcaagccatgagtcaatgccatcatcctaatattgtatcttactacacatcttttgtggtaaaagatgagctgtggcttgtcatgaagctgctaagtggaggttctgttctggatattattaagcacattgtggcaaaaggggaacacaaaagtggagtcctagatgaatctaccattgctacgatactccgagaagtactggaagggctggaatatctgcataaaaatggacagatccacagagatgtgaaagctggaaacattcttcttggagaagatggctcagtacagattgcagactttggggttagtgcttttttagcaactggtggtgatattacccgaaataaagtgagaaagacctttgttggcaccccttgttggatggcacctgaagttatggaacaggtccgtggttatgatttcaaagctgatatttggagttttggaattacagcaattgaattggctacaggggcggctccttatcataaatatccaccaatgaaggttttaatgctgacactgcagaacgatcctccttctttggaaactggtgttcaagataaagaaatgctgaaaaaatatggaaaatcatttagaaaaatgatttcattgtgccttcaaaaagatccagaaaaaagaccaacagcagcagaactattaaggcacaaatttttccagaaagcaaagaataaagaatttcttcaagaaaaaacattgcagagagcaccaaccatttctgaaagagcaaaaaaggttcggagagtaccaggttccagtgggcgtcttcataagacagaggatggaggctgggagtggagtgatgatgaatttgatgaagaaagtgaggaagggaaagcagcaatttcacaactcaggtctccccgagtgaaagaatcaatatcaaattctgagctctttccaacaactgatcctgtgggtactttgctccaagttccagaacagatctctgctcatctacctcagccagctgggcagattgctacacagccaactcaagtctctctcccacccaccgcagagccagcaaaaacagctcaggctttgtcttcaggatcaggttcacaagaaaccaagatcccaatcagtctagtactaagattaaggaattccaaaaaagaactaaatgatattcgatttgaatttactcctgggagagatacagcagagggtgtctctcaggaactcatttctgctggcctggtcgacggaagggatttagtaatagtggcagctaatttgcagaaaattgtggaagaacctcagtcaaatcgatctgtcactttcaaactggcatctggtgtcgaaggctcagatattcctgatgatggtaaactgataggatttgcccagctcagcatcagctaaaccacaaccctggaagaggcggcctaaggagattccacacatgcgtatctctgttgcttctattggcctaaacccactactgccaaagaacccagcaacaaacctcccggctaggagctttagaagtctttatgttcttcctgccatcattcctccttttcccacagggaaagaaaagttggatcactagtggccagcatccccagagttccgttagtaaacttacttcatatgtcccctgtcttcctccatctgagaagtggcccatgtgcttcaaggcccaggagggagatctgtcagctcattcttgccttactccaatgatggcccaggtggaaaagtagcagctgtatcgggcttcctcatcctgcctgttcccccacacctgccaggatatggacatcttgggatatctctttaccactgaagtagaattgattgttcagctggagcccagagaatttaatttaatgttttttctttgtacctgatgtgaattctagcaacctttgttaggaaaaagcacagcctcagatggaggcagcctaaactgtgttcttgttttgttcatggtgtttctaagcgttttgctgaagctgctctcaggcacccccttcttcattgctctctccagaaagggttgctagccttaacttcagctggtgcaaaacatctgactgtagccgaacttcagccatcagatccttcaaagtggaactttggattgtttttacagacaacatcgagtaatggcttgtaaatgtgaattttgccagaggtggtttttgaacaggaaaatcataattcatatcattggagaagtatttattttcaaatatcaaattgaagaaaaactcaatcctcccatgaaaatcagttcgcctggcctccaagtcgtgaggaaatgggtatgcaaggctgagatttctacagcaataaaggagacacacactgggccagagaggcctgccttctgcctgctctcctgcactgaccctttggagggggtctctgtgtgctgaagctaactcaagatggaaagtgaaaccacatgtgccgtgacctttaggttttatgagtagacagtgttcatttgattttctacagaaataatataaattattctttaggtttaaaaaagagcactcataatgcaatatgtgaataatcagtgaggttgatttttcttttttcctaccgtttcatagtctttgtctaactgctagtaaccctaccgagttttatatatgagtgggatactcaatctggccttaaaaagatacacaaagatgggctgtgggtccctggaaagggggagagttgccctttacagaatcactcgagccctttccagcactgttggtctgatgaacaaggttgttttaccttattttctcttggaacatatctgaaaaccttccccacaaataacttgtcacaccttttgtttcattctgagtctttagttttagtcatgggctttcttcacctgctctaggtgcaaaggcatgttgggaaagagatggatgttggggaggaagagaggagatggatttcagttgggagttaggaggagagtaggtgagatgatcagacaccggagttcaacgtcccagcagtcttggtaaaaggagggagcctgctgagccaggagggagaaaagaagattgaccagcttgctagaaaaatacttagcttttctttttctttttttgtggaggggggacggagaggaacaaggatggggaggtaggaatgaggtatagaaaagagatagcatcttctttggcacaagactagtggcttaccgcttaccttagagttttgttttttttttttcaaacccatcaaaatctacttatttatgaatccaaggggtggcagcatcactctgttctagcattctttgtggagatggtctggtgcctagctgggagtgagcagcagcccatcccctgttcactttctctagcccatcattacctgtgaactgcagtggggcagtcatggcaaatagaattgggctggggtttctccttcttttcagttcattgtttgccctgctaggaattagaagacagacaccatgtcccaggacagtgttacttcttctgcatgatgtgtggtagactccctttgctggcttgtgcagtgatactgagaaaatacatgaacagaaactgcccaggtggaacagcacgtaacctagtgagtgactgtactcctttctaggaatgctgattcagagtgcacctctttgactaggtcccaggatccccttgtccctggagtagggactaactatagcacaaagtaatatgtgccaatgctatttgtgaaatgtttggtctttctaaacgactaaaggatttgttgggtttttgcttaagttttgaaccaaatcctagagccagctgataatatttaataatctggaggagagaataatgatgtaccaataagtggagattcctccttatgatgtatgctaggttatggaagatgtaaaatattcaactttttcctcctttttttggactttgtattttactgcatgttttcttcatttttaatcaataaagagtaaattgtcctta

SEQ ID NO: 14586 - DNA, 1581 bp, Homo sapiens
  source 1..1581: mol_type = unassigned DNA
agtgccggactcggaggagcaggaggcgaggtccgccggagctctgagcccccgctgctctgccgcgcggtgaccccgcgccccggcgccgtccgacccgtggctgttccgagacgattggtgggggcgcggcggcggcggcggcggctgttgggggtggggagacgcgcggcgaggagacgagcgaggtcagcgagtttgagggaggaccgcgagccgctgccgccgtcatgtccgaggactcgagcgccctgccctggtccatcaacagggacgattacgagctgcaggaggtgatcgggagtggagcaactgctgtagtccaagcagcttattgtgcccctaaaaaggagaaagtggcaatcaaacggataaaccttgagaaatgtcaaactagcatggatgaactcctgaaagaaattcaagccatgagtcaatgccatcatcctaatattgtatcttactacacatcttttgtggtaaaagatgagctgtggcttgtcatgaagctgctaagtggagtgacacactggagaaactggattgctttgttaaaggccctgttcatatgatggttggaagctttgctaacaccaaccacctttcaagatggtggtcaagcatggttctttcagtatggagagatatgggagtattaggttctgttctggatattattaagcacattgtggcaaaaggggaacacaaaagtggagtcctagatgaatctaccattgctacgatactccgagaagtactggaagggctggaatatctgcataaaaatggacagatccacagagatgtgaaagctggaaacattcttcttggagaagatggctcagtacagattgcagactttggggttagtgcttttttagcaactggtggtgatattacccgaaataaagtgagaaagacctttgttggcaccccttgttggatggcacctgaagttatggaacaggtccgtggttatgatttcaaagctgatatttggagttttggaattacagcaattgaattggctacaggggcggctccttatcataaatatccaccaatgaaggttttaatgctgacactgcagaacgatcctccttctttggaaactggtgttcaagataaagaaatgctgaaaaaatatggaaaatcatttagaaaaatgatttcattgtgccttcaaaaagatccagaaaaaagaccaacagcagcagaactattaaggcacaaatttttccagaaagcaaagaataaagaatttcttcaagaaaaaacattgcagagagcaccaaccatttctgaaagagcaaaaaaggtaaatcagaatttaactcagttttcctgaagaatttactttatttttgcattttgaaaacatgttaagtaatacattgttaatagtatatgagaattactggttttctgtcgatcctttctaaagcattctttgatacattcattcagcaaatatctttggtctaccatatgccttggtattactctgctatcttttaggatgaaaagggatgctagacagtaattggtaaattaattctaaactctgtttgataactgttt

SEQ ID NO: 14587 - DNA, 769 bp, Homo sapiens
  source 1..769: mol_type = unassigned DNA
agagatgtgaaagctggaaacattcttcttggagaagatggctcagtacagattgcagactttggggttagtgcttttttagcaactggtggtgatattacccgaaataaagtgagaaagacctttgttggcaccccttgttggatggcacctgaagttatggaacaggtccgtggttatgatttcaaagctgatatttggagttttggaattacagcaattgaattggctacaggggcggctccttatcataaatatccaccaatgaaggttttaatgctgacactgcagaacgatcctccttctttggaaactggtgttcaagataaagaaatgctgaaaaaatatggaaaatcatttagaaaaatgatttcattgtgccttcaaaaagatccagaaaaaaggtaaaatatgagaaaaagtctacttttctctctaataaaacattgtgagaagtctaagaatcacatactcatatgtacaggaaattattttcaaaagaactaaatataaactttaaaaaagtatacagagaccattatactggattggaaatgaattgatttctgccttctttgtagtatacagtgtaccctaaatagttcagctttttccttgttaatttcttacaaagttgtacattgtgaattctgtattaataaatgccaagttagtggagagatttgtttttaatttgcatttaaaatttataaatgaatgtcttaatgccatttacagtattaataaaggaaagacacatagaaaattt

SEQ ID NO: 14588 - DNA, 612 bp, Homo sapiens
  source 1..612: mol_type = unassigned DNA
gagattgtcaacagagagcaggtgatggttggaggatatgaatttgtatgggaacatttatggggaaaatgattatctacttaatggattgaagtgatagaagaagagagaaatatggagttttctacttagtaagcatgaaataccaccataacccacttctctttctaatgagcaggttcggagagtaccaggttccagtgggcgtcttcataagacagaggatggaggctgggagtggagtgatgatgaatttgatgaagaaagtgaggaagggaaagcagcaatttcacaactcaggtctccccgagtgaaagaatcaatatcaaattctgagctctttccaacaactgatcctgtgggtactttgctccaagttccagaacagatctctgctcatctacctcagccagctgggcagattgctacacagccaactcaagtctctctcccacccaccgcagagccagcaaaaacagctcaggctttgtcttcaggatcaggttcacaagaaaccaagatcccaatcagtctagtactaagattaaggaattccaaaaaagaactaaatgatattcgatttgaatttactcctgggagagatacagcaga

SEQ ID NO: 14589 - DNA, 6747 bp, Homo sapiens
  source 1..6747: mol_type = unassigned DNA
acctggcgtggttctcgagggccctagaggctcctgctacggactggtcggctctggggttgtaggcagaaggctctaagcggtcggaagggtttcctgtgtgtcagcaacttcactttgccgagatagctggcggaagagggaaggagcgctcgcgggccaatcgcctgccagcagccaccttggagcgcacccctctccctcgccgccgactccggtagcagcgtgccggcagaggctgaacacactcggcctcggcggagacctgctccccagaagacgcctcctgcttcccactgcgccctggaggacgcgggctggctgctgggcgagctcggcggaggcacgcccctcgcctccccgcggagtgcggactcgccccggtgcccaaactccgcccaccctctagggagctccgctctcccgcctaaccccggcactccggacagagctgggcctggggaaggggttcctgaactacgcggacgccgaacgggacgcgctgcagaagcgcacgagtctgcggccacgcgcgctccgatggctgccaggagctgagctcagggtgggcggaggaagcggttagacgccccgaaactgagctgcacgtttctaaggtagggaggaggaagatgcccccaattaagttgatctttgagccaaggaggctggggagcagcctccccaagctagagccctgcagagcgagtttcccttgacctcgctgcgcctctggcgcgctctgcagcgcggacccgcggcccctcgggaaagcgcagtcggaaagttatccgcggcggttccctgcgcgccctgttgtgtaagctcggcgttgccagcggacggagaagttgctggcttgcccgatagcccagttcggtggcggcccggggcggatttcatggcccgcggcgaacgcggggccagagctggcgtgggcgagcccctgcgcgccccctcccgcggggatccagttcgcctgctcccttccgctcgctggcttttccgatgcttgctgcgcccctggccgccgctgccctctcgccgcctcctacccctcggagccgccgcctaagtcgaggaggagagaatgaccgaggtgctgtggccggctgtccccaacgggacggacgctgccttcctggccggtccgggttcgtcctgggggaacagcacggtcgcctccactgccgccgtctcctcgtcgttcaaatgcgccttgaccaagacgggcttccagttttactacctgccggctgtctacatcttggtattcatcatcggcttcctgggcaacagcgtggccatctggatgttcgtcttccacatgaagccctggagcggcatctccgtgtacatgttcaatttggctctggccgacttcttgtacgtgctgactctgccagccctgatcttctactacttcaataaaacagactggatcttcggggatgccatgtgtaaactgcagaggttcatctttcatgtgaacctctatggcagcatcttgtttctgacatgcatcagtgcccaccggtacagcggtgtggtgtaccccctcaagtccctgggccggctcaaaaagaagaatgcgatctgtatcagcgtgctggtgtggctcattgtggtggtggcgatctcccccatcctcttctactcaggtaccggggtccgcaaaaacaaaaccatcacctgttacgacaccacctcagacgagtacctgcgaagttatttcatctacagcatgtgcacgaccgtggccatgttctgtgtccccttggtgctgattctgggctgttacggattaattgtgagagctttgatttacaaagatctggacaactctcctctgaggagaaaatcgatttacctggtaatcattgtactgactgtttttgctgtgtcttacatccctttccatgtgatgaaaacgatgaacttgagggcccggcttgattttcagaccccagcaatgtgtgctttcaatgacagggtttatgccacgtatcaggtgacaagaggtctagcaagtctcaacagttgtgtggaccccattctctatttcttggcgggagatactttcagaaggagactctcccgagccacaaggaaagcttctagaagaagtgaggcaaatttgcaatccaagagtgaagacatgaccctcaatattttacctgagttcaagcagaatggagatacaagcctgtgaaggcacaagaatctccaaacacctctctgttgtaatatggtaggatgcttaacagaatcaagtacttttcccctctttaactttctagtttagaaaaaaatcaaaccaagaaaatagtgagttaaaaaaataatagaagtagaaatgcccacatccacacttagcttgtttgggtttgctttcacagtctctcttccttctgactagaagtatgtataataaaacaatactacctagttaaacatttactttctcttttgcctttaaaatgtgcaggcttttctgtttaaagtgtgtgtgcacatgagtactggggctgtttttgatattagtaatttctctaagaaaactagccccctgcaacttgagtttgtggtttatctagcctttattgtttttttaaaatccacagtaggaataaaaaatctatattctcagaaatatctagcatggtatataacaaaacactaaactcatcagttcatccggcatcagatcaatggatctctgagcggggtgtttttttcagtgtcttataagcatagatgatagttgactgagtttctttagggcattgaatagacaagtaaagctaatgaatttaaaagcctgaaaagtgattgttttccagttatttctggaaaaggtctcattatatattgggtgctaaatgtttgatggggaaagcctgcatatattatcgtactggtaaaatgcattcaaaataattaaagtgcatgtattttccttgtaaacaccatgagctctcttagacatcttgtgataaagagcatttacttgccccactgctgtgcaatgccttaggactttgtttgtgttccaggacaagtgttcactcacatctgtaaaaacaattttaagaattgcaaataaattacagaccaaagattgagtaaagtcaaataactgttagtaagttgaaggatattggacaggaggacagtatttcagaaaaggagaggttgacagtcatccacaaggcatagcctccaagtatactctcaaatgtatgaagcaactggggtgggcagaagacattttagaatgagggctttagtttaaattaaagtcatggtggagaagactcttgcttcctccaagtgtttgaaaacacaaaatgcgatatgaaaagaagaaatagaatttgtataggttgcattgatagaatgggaagctataatctttgaataaaccttacatctcaatatttaaagaaaaaacatatatatggagggaaatatagagaattaaagtacctagatgccatagcactgaaaagtaaagtactactcaaactactaatagaagactattggtcagtgttttctattatatttgttctctgccaggtgttaatgaaaaatttgtaaaatgcttcaacagtgttaataattttaatgaatattgaattgctgcatgtctagtccttgaaatggtcaaattctatataatgagaataacaaggtgagataatgcaattgacaatcccaaacaaatccagtgtcaaaggaatttttagttttggaagctatccctcataaagtcaacatcagagtttgcaactgatggtggcataacttgtttgaaagcactttacaagtagagcaacatggggctgtatgttaaggcaagaaagaaccttagtgccccgtggaccataatgacaggaaattttcaggtcttgatttcagttcttgcaatgcctatgtagattgaggatttgtgagaccttcagagtagcttcactttacccaatctctggccactaagatcaatgaagaaaagctgtatttaaccttccaaagcagtgattctttttacatgttcagttttaatgcataggattatagaaaccaaatcaagaagaaacctactacacctccttattttgaggaaagagagggttagcaaagttctcacttcatcaggctcaaataacatccgttttagattcctacaagacaaaatctaaaatatgtcattactttattgaccttgttaaacaagatcaatatcattaaactgaccaagatggaaattacaggacttgtaccagacttgaacttgtagcctaatgatacacatttttacaatatttcttcaccatttagttttctttcttttaggtctcaggatgctcagcttaatttagagtatgtgttaagtacattgtttcagcgtccagagaattttgtgagtgtggatccagtgaggaggtgaacagtaactagaaatgcttgtttactacttggcatgttttttccaaagtgtttcttctttagcttcatacatcacatatggacactgatgacatgtgaatgcatgccacatagtaacaagaatgatcttgccaactccttccaagccaaaagaagcctctgggaaggtgtgccaatggtgaaaacgtacagagggtcagggtgaagcagtgatctctattggctgaaaaactgatcaggtcatatgatgattgaagtatgtttattgtaagggcagaaatgtgttggcatttggataaaaaactgctaacattatagaacttattacctaacaaaatttcacaccacaaaaaatattttaatggcaaattcaaggtgttttattgcttacaaatcagcatctttgactctttgaacatcaatttgtgtttacattgaaatgacaaaaagacaaactaagaagaaatacagcatgcaagttggaattcagagttaaaaccatgatgttgccgctcagccagctatgtgactgttgaccctttcaagaacacacatggatttaaaagttggatgacatccattgttggggccttgggggatatggtaaagcatgaaaactaaacagccaggagcctgtgaaatctgctactgtattttccaggacttcattccactccttggctaaaaaaatcttggaagtttcacagattatgatgtggacctgtcacctgtaaattgtctcaatctactcagacaagacactaaactgtctttggatactatagatgtcagtgcttatagcagctggaatttggctagtgacaatgtttaaagatgtaatactagttagtatctattgaagcttaaactttgctggtcaggttgtagctattgtaaaagtatttattgaagaagctcacagtccttcagttgtacagactgaaaaactttcatgaaagatccaacatactaatgtaaattatatttattacaatgtatgatattaatgtgtcaaactggtgtattttacaaaatatataatgcatacataaataagagttgtatattacagtgcttttcaaatatcagtgtcttggaatatttaagtcttcacattttttggtctaaaatatgaaaatgtttcatgatacaagtgattaattttccctagtagtgcttttgcatgtttgcctttttatttaagtttttttctatatagacacaatttggtgtcagactatcataagatcgatagtgaatataaaatatcttagccaaatggggtctgtattgtctacattttatatattaaataaaagtttttgttgtcttttcaggaggtttagagtattgtcactaaatatgatcaaagcttccctttccaaatgcaaaagtcttgtcctacatttaaagttgatctgtcatgttttagcagtcaagtgggatgggcattatataaacaacgttacaatgtaaggaaaatctttaaggagatggggagagaaaaaggcagctggtataatcggttactgctgcttagttctacttaattttttgtgttgcttcttcttaaggtgagatagcataatcttaactgttttgagatggaattttaaagtaacacactaccagcgagttcaacactgctattgattttaatctgtttttttttgtttagttgataacttaaattccaagtttcatagtgataattgtatattatttggctgctgaattctgttagagttttttattctgttgtacattgtattatacacataatcacaaattaatatgaaggtgaatatatgttacatatcaaaatttgtgaatttgaattatagtatgttttagtgctattgcaaaaaatgtttatttttatattatctgtgattttaatatagatgattgaactagatttctttttgagtgatagtgccattgaatgagcagtatggaaacagtgttacttgatattttgagctttctcaggtttatctaaatcagtggtagcttaacaaaacccagactaattgtgtgtaattgtatttttaataaaaggaaagtacatttcctataatagcatagtactgtttgcatgtaagagtatgcaaaaccttgtgtgtgtgtgtgtgtgtgtgtgtgtgtgtgtgtcttagtgtgtgtaaggcatggcagccaactttgtatctgctatttttagtacgagcagagcttcataattgtggtcactagaactgtacttaccatggacagttaaaactgaaaaagactcaataaaactatgaaacatgg

SEQ ID NO: 14590 - DNA, 1766 bp, Homo sapiens
  source 1..1766: mol_type = unassigned DNA
actgttgttacacaacaaacatcatagtgctgaaatgacaaaaatccagggtagtgatcacaatcagaagacaggagctgcagaacagaacactttctcatgtccagggtcagattacaagagcactcaagactttactgacgaaaactcaggaaatcctctatcacaaagaggtttggcaactaaactaagacattaaaaggaaaataccagatgccactctgcaggttgcaataactactacttactggatacattcaaaccctccagaatcaacagttatcaggtaaccaacaagaaatgcaagccgtcgacaacctcacctctgcgcctggtaacaccagtctgtgcaccagagactacaaaatcacccaggtcctcttcccactgctctacactgtcctgttttttgttggacttatcacaaatggcctggcgatgaggattttctttcaaatccggagtaaatcaaactttattatttttcttaagaacacagtcatttctgatcttctcatgattctgacttttccattcaaaattcttagtgatgccaaactgggaacaggaccactgagaacttttgtgtgtcaagttacctccgtcatattttatttcacaatgtatatcagtatttcattcctgggactgataactatcgatcgctaccagaagaccaccaggccatttaaaacatccaaccccaaaaatctcttgggggctaagattctctctgttgtcatctgggcattcatgttcttactctctttgcctaacatgattctgaccaacaggcagccgagagacaagaatgtgaagaaatgctctttccttaaatcagagttcggtctagtctggcatgaaatagtaaattacatctgtcaagtcattttctggattaatttcttaattgttattgtatgttatacactcattacaaaagaactgtaccggtcatacgtaagaacgaggggtgtaggtaaagtccccaggaaaaaggtgaacgtcaaagttttcattatcattgctgtattctttatttgttttgttcctttccattttgcccgaattccttacaccctgagccaaacccgggatgtctttgactgcactgctgaaaatactctgttctatgtgaaagagagcactctgtggttaacttccttaaatgcatgcctggatccgttcatctattttttcctttgcaagtccttcagaaattccttgataagtatgctgaagtgccccaattctgcaacatctctgtcccaggacaataggaaaaaagaacaggatggtggtgacccaaatgaagagactccaatgtaaacaaattaactaaggaaatatttcaatctctttgtgttcagaactcgttaaagcaaagcgctaagtaaaaatattaactgacgaagaagcaactaagttaataataatgactctaaagaaacagaagattacaaaagcaattttcatttacctttccagtatgaaaagctatcttaaaatatagaaaactaatctaaactgtagctgtattagcagcaaaacaaacgacatccaattgtcatgctgcatgcaaaactacacagaattcatgttttgcagagttttgccaaaatgagtaatcatataatatttactgtaatttttaaaatacattatcgttcacaattttattttttcataatcaactaaggaagaacgatcaattggatataatcttcttaccaaaaatgatagttaaaatgtatatatatcctagt

SEQ ID NO: 14591 - DNA, 960 bp, Homo sapiens
  source 1..960: mol_type = unassigned DNA
agaaattcagtgtctgcatagctttgagtccagtgtttgaagacaatctctgattgtgaagccctctttttctctccttctatttctctctagagcactcaagactttactgacgaaaactcaggaaatcctctatcacaaagaggtttggcaactaaactaagacattaaaaggaaaataccagatgccactctgcaggttgcaataactactacttactggatacattcaaaccctccagaatcaacagttatcaggtaaccaacaagaaatgcaagccgtcgacaacctcacctctgcgcctggtaacaccagtctgtgcaccagagactacaaaatcacccaggtcctcttcccactgctctacactgtcctgttttttgttggacttatcacaaatggcctggcgatgaggattttctttcaaatccggagtaaatcaaactttattatttttcttaagaacacagtcatttctgatcttctcatgattctgacttttccattcaaaattcttagtgatgccaaactgggaacaggaccactgagaacttttgtgtgtcaagttacctccgtcatattttatttcacaatgtatatcagtatttcattcctgggactgataactatcgatcgctaccagaagaccaccaggccatttaaaacatccaaccccaaaaatctcttgggggctaagattctctctgttgtcatctgggcattcatgttcttactctctttgcctaacatgattctgaccaacaggcagccgagagacaagaatgtgaagaaatgctctttccttaaatcagagttcggtctagtctggcatgaaatagtaaattacatctgtcaagtcattttctggattaatttcttaattgttattgtatgttatacactcattacaaaagaactgtaccggtcatacgtaagaacgaggggtgtaggtaaagtcc

SEQ ID NO: 14592 - DNA, 2727 bp, Homo sapiens
  source 1..2727: mol_type = unassigned DNA
agcgggctgagggtaggaagtagccgctccgagtggaggcgactgggggctgaagagcgcgccgccctctcgtcccactttccaggtgtgtgatcctgtaaaattaaatcttccaagatgatctggtatatattaattataggaattctgcttccccagtctttggctcatccaggcttttttacttcaattggtcagatgactgatttgatccatactgagaaagatctggtgacttctctgaaagattatattaaggcagaagaggacaagttagaacaaataaaaaaatgggcagagaagttagatcggctaactagtacagcgacaaaagatccagaaggatttgttgggcatccagtaaatgcattcaaattaatgaaacgtctgaatactgagtggagtgagttggagaatctggtccttaaggatatgtcagatggctttatctctaacctaaccattcagagacagtactttcctaatgatgaagatcaggttggggcagccaaagctctgttacgtctccaggatacctacaatttggatacagataccatctcaaagggtaatcttccaggagtgaaacacaaatcttttctaacggctgaggactgctttgagttgggcaaagtggcctatacagaagcagattattaccatacggaactgtggatggaacaagccctaaggcaactggatgaaggcgagatttctaccatagataaagtctctgttctagattatttgagctatgcggtatatcagcagggagacctggataaggcacttttgctcacaaagaagcttcttgaactagatcctgaacatcagagagctaatggtaacttaaaatattttgagtatataatggctaaagaaaaagatgtcaataagtctgcttcagatgaccaatctgatcagaaaactacaccaaagaaaaaaggggttgctgtggattacctgccagagagacagaagtacgaaatgctgtgccgtggggagggtatcaaaatgacccctcggagacagaaaaaactcttttgccgctaccatgatggaaaccgtaatcctaaatttattctggctccagctaaacaggaggatgaatgggacaagcctcgtattattcgcttccatgatattatttctgatgcagaaattgaaatcgtcaaagacctagcaaaaccaaggctgaggcgagccaccatttcaaacccaataacaggagacttggagacggtacattacagaattagcaaaagtgcctggctctctggctatgaaaatcctgtggtgtctcgaattaatatgagaatacaagatctaacaggactagatgtttccacagcagaggaattacaggtagcaaattatggagttggaggacagtatgaaccccattttgactttgcacggaaagatgagccagatgctttcaaagagctggggacaggaaatagaattgctacatggctgttttatatgagtgatgtgtctgcaggaggagccactgtttttcctgaagttggagctagtgtttggcccaaaaaaggaactgctgttttctggtataatctgtttgccagtggagaaggagattatagtacacggcatgcagcctgtccagtgctagttggcaacaaatgggtatccaataaatggctccatgaacgtggacaagaatttcgaagaccttgtacgttgtcagaattggaatgacaaacaggcttccctttttctcctattgttgtactcttatgtgtctgatatacacatttcctagtcttaactttcaggagtttacaattgactaacactccatgattgattcagtcatgaacctcatcccatgtttcatctgtggacaattgcttactttgtgggttcttttaaaagtaacacgaaatcatcatattgcataaaaccttaaagttctgttggtatcacagaagacaaggcagagtttaaagtgaggaattttatatttaaagaactttttggttggataaaaacataatttgagcatccagttttagtatttcactacatctcagttggtgggtgttaagctagaatgggctgtgtgataggaaacaaatgccttacagatgtgcctaggtgttctgtttacctagtgtcttactctgttttctggatctgaagactagtaataaactaggacactaactgggttccatgtgattgccctttcatatgatcttctaagttgatttttttcctcccaagtcttttttaaagaaagtatactgtattttaccaaccccctctcttttcttttagctcctctgtggtgaattaaacgtacttgagttaaaatatttcgattttttttttttttttaatggaaagtcctgcataacaacactgggccttcttaactaaaatgctcaccacttagcctgtttttttatcccttttttaaaatgacagatgattttgttcaggaattttgctgtttttcttagtgctaataccttgcctcttattcctgctacagcagggtggtaatattggcattctgattaaatactgtgccttaggagactggaagtttaaaaatgtacaagtcctttcagtgatgagggaattgattttttttaaaagtctttttcttagaaagccaaaatgtttgtttttttaagattctgaaatgtgttgtgacaacaatgacctatttatgatcttaaatcttttttaaaaaaa

SEQ ID NO: 14593 - DNA, 2727 bp, Homo sapiens
  source 1..2727: mol_type = unassigned DNA
agcgggctgagggtaggaagtagccgctccgagtggaggcgactgggggctgaagagcgcgccgccctctcgtcccactttccaggtgtgtgatcctgtaaaattaaatcttccaagatgatctggtatatattaattataggaattctgcttccccagtctttggctcatccaggcttttttacttcaattggtcagatgactgatttgatccatactgagaaagatctggtgacttctctgaaagattatattaaggcagaagaggacaagttagaacaaataaaaaaatgggcagagaagttagatcggctaactagtacagcgacaaaagatccagaaggatttgttgggcatccagtaaatgcattcaaattaatgaaacgtctgaatactgagtggagtgagttggagaatctggtccttaaggatatgtcagatggctttatctctaacctaaccattcagagacagtactttcctaatgatgaagatcaggttggggcagccaaagctctgttacgtctccaggatacctacaatttggatacagataccatctcaaagggtaatcttccaggagtgaaacacaaatcttttctaacggctgaggactgctttgagttgggcaaagtggcctatacagaagcagattattaccatacggaactgtggatggaacaagccctaaggcaactggatgaaggcgagatttctaccatagataaagtctctgttctagattatttgagctatgcggtatatcagcagggagacctggataaggcacttttgctcacaaagaagcttcttgaactagatcctgaacatcagagagctaatggtaacttaaaatattttgagtatataatggctaaagaaaaagatgtcaataagtctgcttcagatgaccaatctgatcagaaaactacaccaaagaaaaaaggggttgctgtggattacctgccagagagacagaagtacgaaatgctgtgccgtggggagggtatcaaaatgacccctcggagacagaaaaaactcttttgccgctaccatgatggaaaccgtaatcctaaatttattctggctccagctaaacaggaggatgaatgggacaagcctcgtattattcgcttccatgatattatttctgatgcagaaattgaaatcgtcaaagacctagcaaaaccaaggctgagccgagctacagtacatgaccctgagactggaaaattgaccacagcacagtacagagtatctaagagtgcctggctctctggctatgaaaatcctgtggtgtctcgaattaatatgagaatacaagatctaacaggactagatgtttccacagcagaggaattacaggtagcaaattatggagttggaggacagtatgaaccccattttgactttgcacggaaagatgagccagatgctttcaaagagctggggacaggaaatagaattgctacatggctgttttatatgagtgatgtgtctgcaggaggagccactgtttttcctgaagttggagctagtgtttggcccaaaaaaggaactgctgttttctggtataatctgtttgccagtggagaaggagattatagtacacggcatgcagcctgtccagtgctagttggcaacaaatgggtatccaataaatggctccatgaacgtggacaagaatttcgaagaccttgtacgttgtcagaattggaatgacaaacaggcttccctttttctcctattgttgtactcttatgtgtctgatatacacatttcctagtcttaactttcaggagtttacaattgactaacactccatgattgattcagtcatgaacctcatcccatgtttcatctgtggacaattgcttactttgtgggttcttttaaaagtaacacgaaatcatcatattgcataaaaccttaaagttctgttggtatcacagaagacaaggcagagtttaaagtgaggaattttatatttaaagaactttttggttggataaaaacataatttgagcatccagttttagtatttcactacatctcagttggtgggtgttaagctagaatgggctgtgtgataggaaacaaatgccttacagatgtgcctaggtgttctgtttacctagtgtcttactctgttttctggatctgaagactagtaataaactaggacactaactgggttccatgtgattgccctttcatatgatcttctaagttgatttttttcctcccaagtcttttttaaagaaagtatactgtattttaccaaccccctctcttttcttttagctcctctgtggtgaattaaacgtacttgagttaaaatatttcgattttttttttttttttaatggaaagtcctgcataacaacactgggccttcttaactaaaatgctcaccacttagcctgtttttttatcccttttttaaaatgacagatgattttgttcaggaattttgctgtttttcttagtgctaataccttgcctcttattcctgctacagcagggtggtaatattggcattctgattaaatactgtgccttaggagactggaagtttaaaaatgtacaagtcctttcagtgatgagggaattgattttttttaaaagtctttttcttagaaagccaaaatgtttgtttttttaagattctgaaatgtgttgtgacaacaatgacctatttatgatcttaaatcttttttaaaaaaa

SEQ ID NO: 14594 - DNA, 415 bp, Homo sapiens
  source 1..415: mol_type = unassigned DNA
ttttgactttgcacggaaagatgagccagatgctttcaaagagctggggacaggaaatagaattgctacatggctgttttatatgagtgatgtgtctgcaggaggagccactgtttttcctgaagttggagctagtgtttggcccaaaaaaggaactgctgttttctggtataatctgtttgccagtggagaaggagattatagtacacggcatgcagcctgtccagtgctagttggcaacaaatggggtaaatatttcatatattctgcgaagataatgtaatttttgtttcttattttggaactattatctgtgtcttaaaaacaaaagcccccatgtttgcttaatatgattttaacattgtacaggattcagccaaacaagtgcctaatcataatacaaatttgaaatcag

SEQ ID NO: 14595 - DNA, 2790 bp, Homo sapiens
  source 1..2790: mol_type = unassigned DNA
ggggcgctggtgtgatcgagctcacgtagcgagggctgcagtcgcctcctccctggcgctgccatcgcggcctagaggttataaaagggctaacgggctccctctgctgcccagtcgcgccgccagcgggctgagggtaggaagtagccgctccgagtggaggcgactgggggctgaagagcgcgccgccctctcgtcccactttccaggtgtgtgatcctgtaaaattaaatcttccaagatgatctggtatatattaattataggaattctgcttccccagtctttggctcatccaggcttttttacttcaattggtcagatgactgatttgatccatactgagaaagatctggtgacttctctgaaagattatattaaggcagaagaggacaagttagaacaaataaaaaaatgggcagagaagttagatcggctaactagtacagcgacaaaagatccagaaggatttgttgggcatccagtaaatgcattcaaattaatgaaacgtctgaatactgagtggagtgagttggagaatctggtccttaaggatatgtcagatggctttatctctaacctaaccattcagagacagtactttcctaatgatgaagatcaggttggggcagccaaagctctgttacgtctccaggatacctacaatttggatacagataccatctcaaagggtaatcttccaggagtgaaacacaaatcttttctaacggctgaggactgctttgagttgggcaaagtggcctatacagaagcagattattaccatacggaactgtggatggaacaagccctaaggcaactggatgaaggcgagatttctaccatagataaagtctctgttctagattatttgagctatgcggtatatcagcagggagacctggataaggcacttttgctcacaaagaagcttcttgaactagatcctgaacatcagagagctaatggtaacttaaaatattttgagtatataatggctaaagaaaaagatgtcaataagtctgcttcagatgaccaatctgatcagaaaactacaccaaagaaaaaaggggttgctgtggattacctgccagagagacagaagtacgaaatgctgtgccgtggggagggtatcaaaatgacccctcggagacagaaaaaactcttttgccgctaccatgatggaaaccgtaatcctaaatttattctggctccagctaaacaggaggatgaatgggacaagcctcgtattattcgcttccatgatattatttctgatgcagaaattgaaatcgtcaaagacctagcaaaaccaaggctgagccgagctacagtacatgaccctgagactggaaaattgaccacagcacagtacagagtatctaagagtgcctggctctctggctatgaaaatcctgtggtgtctcgaattaatatgagaatacaagatctaacaggactagatgtttccacagcagaggaattacagaaagatgagccagatgctttcaaagagctggggacaggaaatagaattgctacatggctgttttatatgagtgatgtgtctgcaggaggagccactgtttttcctgaagttggagctagtgtttggcccaaaaaaggaactgctgttttctggtataatctgtttgccagtggagaaggagattatagtacacggcatgcagcctgtccagtgctagttggcaacaaatgggtatccaataaatggctccatgaacgtggacaagaatttcgaagaccttgtacgttgtcagaattggaatgacaaacaggcttccctttttctcctattgttgtactcttatgtgtctgatatacacatttcctagtcttaactttcaggagtttacaattgactaacactccatgattgattcagtcatgaacctcatcccatgtttcatctgtggacaattgcttactttgtgggttcttttaaaagtaacacgaaatcatcatattgcataaaaccttaaagttctgttggtatcacagaagacaaggcagagtttaaagtgaggaattttatatttaaagaactttttggttggataaaaacataatttgagcatccagttttagtatttcactacatctcagttggtgggtgttaagctagaatgggctgtgtgataggaaacaaatgccttacagatgtgcctaggtgttctgtttacctagtgtcttactctgttttctggatctgaagactagtaataaactaggacactaactgggttccatgtgattgccctttcatatgatcttctaagttgatttttttcctcccaagtcttttttaaagaaagtatactgtattttaccaaccccctctcttttcttttagctcctctgtggtgaattaaacgtacttgagttaaaatatttcgattttttttttttttttaatggaaagtcctgcataacaacactgggccttcttaactaaaatgctcaccacttagcctgtttttttatcccttttttaaaatgacagatgattttgttcaggaattttgctgtttttcttagtgctaataccttgcctcttattcctgctacagcagggtggtaatattggcattctgattaaatactgtgccttaggagactggaagtttaaaaatgtacaagtcctttcagtgatgagggaattgattttttttaaaagtctttttcttagaaagccaaaatgtttgtttttttaagattctgaaatgtgttgtgacaacaatgacctatttatgatcttaaatctttttt

SEQ ID NO: 14596 - DNA, 2844 bp, Homo sapiens
  source 1..2844: mol_type = unassigned DNA
ggggcgctggtgtgatcgagctcacgtagcgagggctgcagtcgcctcctccctggcgctgccatcgcggcctagaggttataaaagggctaacgggctccctctgctgcccagtcgcgccgccagcgggctgagggtaggaagtagccgctccgagtggaggcgactgggggctgaagagcgcgccgccctctcgtcccactttccaggtgtgtgatcctgtaaaattaaatcttccaagatgatctggtatatattaattataggaattctgcttccccagtctttggctcatccaggcttttttacttcaattggtcagatgactgatttgatccatactgagaaagatctggtgacttctctgaaagattatattaaggcagaagaggacaagttagaacaaataaaaaaatgggcagagaagttagatcggctaactagtacagcgacaaaagatccagaaggatttgttgggcatccagtaaatgcattcaaattaatgaaacgtctgaatactgagtggagtgagttggagaatctggtccttaaggatatgtcagatggctttatctctaacctaaccattcagagacagtactttcctaatgatgaagatcaggttggggcagccaaagctctgttacgtctccaggatacctacaatttggatacagataccatctcaaagggtaatcttccaggagtgaaacacaaatcttttctaacggctgaggactgctttgagttgggcaaagtggcctatacagaagcagattattaccatacggaactgtggatggaacaagccctaaggcaactggatgaaggcgagatttctaccatagataaagtctctgttctagattatttgagctatgcggtatatcagcagggagacctggataaggcacttttgctcacaaagaagcttcttgaactagatcctgaacatcagagagctaatggtaacttaaaatattttgagtatataatggctaaagaaaaagatgtcaataagtctgcttcagatgaccaatctgatcagaaaactacaccaaagaaaaaaggggttgctgtggattacctgccagagagacagaagtacgaaatgctgtgccgtggggagggtatcaaaatgacccctcggagacagaaaaaactcttttgccgctaccatgatggaaaccgtaatcctaaatttattctggctccagctaaacaggaggatgaatgggacaagcctcgtattattcgcttccatgatattatttctgatgcagaaattgaaatcgtcaaagacctagcaaaaccaaggctgaggcgagccaccatttcaaacccaataacaggagacttggagacggtacattacagaattagcaaaagtgcctggctctctggctatgaaaatcctgtggtgtctcgaattaatatgagaatacaagatctaacaggactagatgtttccacagcagaggaattacaggtagcaaattatggagttggaggacagtatgaaccccattttgactttgcacggaaagatgagccagatgctttcaaagagctggggacaggaaatagaattgctacatggctgttttatatgagtgatgtgtctgcaggaggagccactgtttttcctgaagttggagctagtgtttggcccaaaaaaggaactgctgttttctggtataatctgtttgccagtggagaaggagattatagtacacggcatgcagcctgtccagtgctagttggcaacaaatgggtatccaataaatggctccatgaacgtggacaagaatttcgaagaccttgtacgttgtcagaattggaatgacaaacaggcttccctttttctcctattgttgtactcttatgtgtctgatatacacatttcctagtcttaactttcaggagtttacaattgactaacactccatgattgattcagtcatgaacctcatcccatgtttcatctgtggacaattgcttactttgtgggttcttttaaaagtaacacgaaatcatcatattgcataaaaccttaaagttctgttggtatcacagaagacaaggcagagtttaaagtgaggaattttatatttaaagaactttttggttggataaaaacataatttgagcatccagttttagtatttcactacatctcagttggtgggtgttaagctagaatgggctgtgtgataggaaacaaatgccttacagatgtgcctaggtgttctgtttacctagtgtcttactctgttttctggatctgaagactagtaataaactaggacactaactgggttccatgtgattgccctttcatatgatcttctaagttgatttttttcctcccaagtcttttttaaagaaagtatactgtattttaccaaccccctctcttttcttttagctcctctgtggtgaattaaacgtacttgagttaaaatatttcgattttttttttttttttaatggaaagtcctgcataacaacactgggccttcttaactaaaatgctcaccacttagcctgtttttttatcccttttttaaaatgacagatgattttgttcaggaattttgctgtttttcttagtgctaataccttgcctcttattcctgctacagcagggtggtaatattggcattctgattaaatactgtgccttaggagactggaagtttaaaaatgtacaagtcctttcagtgatgagggaattgattttttttaaaagtctttttcttagaaagccaaaatgtttgtttttttaagattctgaaatgtgttgtgacaacaatgacctatttatgatcttaaatctttttt

SEQ ID NO: 14597 - DNA, 2844 bp, Homo sapiens
  source 1..2844: mol_type = unassigned DNA
ggggcgctggtgtgatcgagctcacgtagcgagggctgcagtcgcctcctccctggcgctgccatcgcggcctagaggttataaaagggctaacgggctccctctgctgcccagtcgcgccgccagcgggctgagggtaggaagtagccgctccgagtggaggcgactgggggctgaagagcgcgccgccctctcgtcccactttccaggtgtgtgatcctgtaaaattaaatcttccaagatgatctggtatatattaattataggaattctgcttccccagtctttggctcatccaggcttttttacttcaattggtcagatgactgatttgatccatactgagaaagatctggtgacttctctgaaagattatattaaggcagaagaggacaagttagaacaaataaaaaaatgggcagagaagttagatcggctaactagtacagcgacaaaagatccagaaggatttgttgggcatccagtaaatgcattcaaattaatgaaacgtctgaatactgagtggagtgagttggagaatctggtccttaaggatatgtcagatggctttatctctaacctaaccattcagagacagtactttcctaatgatgaagatcaggttggggcagccaaagctctgttacgtctccaggatacctacaatttggatacagataccatctcaaagggtaatcttccaggagtgaaacacaaatcttttctaacggctgaggactgctttgagttgggcaaagtggcctatacagaagcagattattaccatacggaactgtggatggaacaagccctaaggcaactggatgaaggcgagatttctaccatagataaagtctctgttctagattatttgagctatgcggtatatcagcagggagacctggataaggcacttttgctcacaaagaagcttcttgaactagatcctgaacatcagagagctaatggtaacttaaaatattttgagtatataatggctaaagaaaaagatgtcaataagtctgcttcagatgaccaatctgatcagaaaactacaccaaagaaaaaaggggttgctgtggattacctgccagagagacagaagtacgaaatgctgtgccgtggggagggtatcaaaatgacccctcggagacagaaaaaactcttttgccgctaccatgatggaaaccgtaatcctaaatttattctggctccagctaaacaggaggatgaatgggacaagcctcgtattattcgcttccatgatattatttctgatgcagaaattgaaatcgtcaaagacctagcaaaaccaaggctgagccgagctacagtacatgaccctgagactggaaaattgaccacagcacagtacagagtatctaagagtgcctggctctctggctatgaaaatcctgtggtgtctcgaattaatatgagaatacaagatctaacaggactagatgtttccacagcagaggaattacaggtagcaaattatggagttggaggacagtatgaaccccattttgactttgcacggaaagatgagccagatgctttcaaagagctggggacaggaaatagaattgctacatggctgttttatatgagtgatgtgtctgcaggaggagccactgtttttcctgaagttggagctagtgtttggcccaaaaaaggaactgctgttttctggtataatctgtttgccagtggagaaggagattatagtacacggcatgcagcctgtccagtgctagttggcaacaaatgggtatccaataaatggctccatgaacgtggacaagaatttcgaagaccttgtacgttgtcagaattggaatgacaaacaggcttccctttttctcctattgttgtactcttatgtgtctgatatacacatttcctagtcttaactttcaggagtttacaattgactaacactccatgattgattcagtcatgaacctcatcccatgtttcatctgtggacaattgcttactttgtgggttcttttaaaagtaacacgaaatcatcatattgcataaaaccttaaagttctgttggtatcacagaagacaaggcagagtttaaagtgaggaattttatatttaaagaactttttggttggataaaaacataatttgagcatccagttttagtatttcactacatctcagttggtgggtgttaagctagaatgggctgtgtgataggaaacaaatgccttacagatgtgcctaggtgttctgtttacctagtgtcttactctgttttctggatctgaagactagtaataaactaggacactaactgggttccatgtgattgccctttcatatgatcttctaagttgatttttttcctcccaagtcttttttaaagaaagtatactgtattttaccaaccccctctcttttcttttagctcctctgtggtgaattaaacgtacttgagttaaaatatttcgattttttttttttttttaatggaaagtcctgcataacaacactgggccttcttaactaaaatgctcaccacttagcctgtttttttatcccttttttaaaatgacagatgattttgttcaggaattttgctgtttttcttagtgctaataccttgcctcttattcctgctacagcagggtggtaatattggcattctgattaaatactgtgccttaggagactggaagtttaaaaatgtacaagtcctttcagtgatgagggaattgattttttttaaaagtctttttcttagaaagccaaaatgtttgtttttttaagattctgaaatgtgttgtgacaacaatgacctatttatgatcttaaatctttttt

SEQ ID NO: 14598 - DNA, 3349 bp, Homo sapiens
  source 1..3349: mol_type = unassigned DNA
aaacgccgggagctgcgagtgtccagctgcggagacccgtgataattcgttaactaattcaacaaacgggacccttctgtgtgccagaaaccgcaagcagttgctaacccagtgggacaggcggattggaagagcgggaaggtcctggcccagagcagtgtggtgagcgctgtgctggaagggaatgcgggcagtgggtacttggtagagcactgactgcctccggccagaggacttcccggaggaggtgacccatgagctggagtggtcagaggaaggctggcaaaagggcatcgtggacagaggaacagcctatgtgagtgggagcagagaccttggccaatgccattccttatggccttgtagtggaagcaaggtgatggggaaggaacactgtaggggatagctgtccacggacgctgtctacaagaccctggagtgagataacgtgcctggtactgtgccctgcatgtgtaagatgcccagttgaccttcgcagcaggagcctggatcagggcacttcctgcctcaggtattgctggacagcccagacacttccctctgtgaccatgaaactctgggtgtctgcattgctgatggcctggtttggtgtcctgagctgtgtgcaggccgaattcttcacctctattgggcacatgactgacctgatttatgcagagaaagagctggtgcagtctctgaaagagtacatccttgtggaggaagccaagctttccaagattaagagctgggccaacaaaatggaagccttgactagcaagtcagctgctgatgctgagggctacctggctcaccctgtgaatgcctacaaactggtgaagcggctaaacacagactggcctgcgctggaggaccttgtcctgcaggactcagctgcaggttttatcgccaacctctctgtgcagcggcagttcttccccactgatgaggacgagataggagctgccaaagccctgatgagacttcaggacacatacaggctggacccaggcacaatttccagaggggaacttccaggaaccaagtaccaggcaatgctgagtgtggatgactgctttgggatgggccgctcggcctacaatgaaggggactattatcatacggtgttgtggatggagcaggtgctaaagcagcttgatgccggggaggaggccaccacaaccaagtcacaggtgctggactacctcagctatgctgtcttccagttgggtgatctgcaccgtgccctggagctcacccgccgcctgctctcccttgacccaagccacgaacgagctggagggaatctgcggtactttgagcagttattggaggaagagagagaaaaaacgttaacaaatcagacagaagctgagctagcaaccccagaaggcatctatgagaggcctgtggactacctgcctgagagggatgtttacgagagcctctgtcgtggggagggtgtcaaactgacaccccgtagacagaagaggcttttctgtaggtaccaccatggcaacagggccccacagctgctcattgcccccttcaaagaggaggacgagtgggacagcccgcacatcgtcaggtactacgatgtcatgtctgatgaggaaatcgagaggatcaaggagatcgcaaaacctaaacttgcacgagccaccgttcgtgatcccaagacaggagtcctcactgtcgccagctaccgggtttccaaaagctcctggctagaggaagatgatgaccctgttgtggcccgagtaaatcgtcggatgcagcatatcacagggttaacagtaaagactgcagaattgttacaggttgcaaattatggagtgggaggacagtatgaaccgcacttcgacttctctaggaatgatgagcgagatactttcaagcatttagggacggggaatcgtgtggctactttcttaaactacatgagtgatgtagaagctggtggtgccaccgtcttccctgatctgggggctgcaatttggcctaagaagggtacagctgtgttctggtacaacctcttgcggagcggggaaggtgactaccgaacaagacatgctgcctgccctgtgcttgtgggctgcaagtgggtctccaataagtggttccatgaacgaggacaggagttcttgagaccttgtggatcaacagaagttgactgacatccttttctgtccttccccttcctggtccttcagcccatgtcaacgtgacagacacctttgtatgttcctttgtatgttcctatcaggctgatttttggagaaatgaatgtttgtctggagcagagggagaccatactagggcgactcctgtgtgactgaagtcccagcccttccattcagcctgtgccatccctggccccaaggctaggatcaaagtggctgcagcagagttagctgtctagcgcctagcaaggtgcctttgtacctcaggtgttttaggtgtgagatgtttcagtgaaccaaagttctgataccttgtttacatgtttgtttttatggcatttctatctattgtggctttaccaaaaaataaaatgtccctaccagaagccttaaagagccttacttggagtatttttaagactggaagcttttaccaggttcatcatttcctatgcatcaccttcatgcaggcagagtctggataatgaatgctttagcagcaaaaaagcatcttgggtcttggatttcagacctggtttcaacacttgtgttccctctaagtgtcagtgtccttttctggaaagtagggtaaatagtttctctttgtctcccagagaacatagcacatgtgttcatgattgtaatgctgttataatgtgtacttcatttttaaattttgagataagaattgttcatgatacacagatgtatacttaaaaaaatatgaaggtgagcaggagcacctgtgtcaacaccaagttagaaaagagaacgttttcaagtcagtacctcaggagccccttgggaacccctcctagatcacatctccttcactgcccccagcactttggagataaatcattgtctcatgatgtgtggtactcattcctttgcttgtctttatagttttaccatctatgattagatccctaaataagtagttattctgttttccctgattttgaacttttactaatagaatgagagtaaatatttttgggtatgtggcttcttttgttcaacattgttttaagattcatccgtgttgcttgtgtagctgtaatttgttttaatctttatagtacattcagttttgttaatgcttattgtaggactgtaccataatacaggcagcatgctgctgataaacactggaattgatttca

SEQ ID NO: 14599 - DNA, 2223 bp, Homo sapiens
  source 1..2223: mol_type = unassigned DNA
ctggaaacgccgggagctgcgagtgtccagacatccttgtggaaccagcgttgtttttccttggcagctgcggagacccgtgataattcgttaactaattcaacaaacgggacccttctgtgtgccagaaaccgcaagcagttgctaacccagtgggacaggcggattggaagagcgggaaggtcctggcccagagcagtgtgacacttccctctgtgaccatgaaactctgggtgtctgcattgctgatggcctggtttggtgtcctgagctgtgtgcaggccgaattcttcacctctattgggcacatgactgacctgatttatgcagagaaagagctggtgcagtctctgaaagagtacatccttgtggaggaagccaagctttccaagattaagagctgggccaacaaaatggaagccttgactagcaagtcagctgctgatgctgagggctacctggctcaccctgtgaatgcctacaaactggtgaagcggctaaacacagactggcctgcgctggaggaccttgtcctgcaggactcagctgcaggttttatcgccaacctctctgtgcagcggcagttcttccccactgatgaggacgagataggagctgccaaagccctgatgagacttcaggacacatacaggctggacccaggcacaatttccagaggggaacttccaggaaccaagtaccaggcaatgctgagtgtggatgactgctttgggatgggccgctcggcctacaatgaaggggactattatcatacggtgttgtggatggagcaggtgctaaagcagcttgatgccggggaggaggccaccacaaccaagtcacaggtgctggactacctcagctatgctgtcttccagttgggtgatctgcaccgtgccctggagctcacccgccgcctgctctcccttgacccaagccacgaacgagctggagggaatctgcggtactttgagcagttattggaggaagagagagaaaaaacgttaacaaatcagacagaagctgagctagcaaccccagaaggcatctatgagaggcctgtggactacctgcctgagagggatgtttacgagagcctctgtcgtggggagggtgtcaaactgacaccccgtagacagaagaggcttttctgtaggtaccaccatggcaacagggccccacagctgctcattgcccccttcaaagaggaggacgagtgggacagcccgcacatcgtcaggtactacgatgtcatgtctgatgaggaaatcgagaggatcaaggagatcgcaaaacctaaacttgcacgagccaccgttcgtgatcccaagacaggagtcctcactgtcgccagctaccgggtttccaaaagctcctggctagaggaagatgatgaccctgttgtggcccgagtaaatcgtcggatgcagcatatcacagggttaacagtaaagactgcagaattgttacaggttgcaaattatggagtgggaggacagtatgaaccgcacttcgacttctctaggcgaccttttgacagcggcctcaaaacagaggggaataggttagcgacgtttcttaactacatgagtgatgtagaagctggtggtgccaccgtcttccctgatctgggggctgcaatttggcctaagaagggtacagctgtgttctggtacaacctcttgcggagcggggaaggtgactaccgaacaagacatgctgcctgccctgtgcttgtgggctgcaagtgggtctccaataagtggttccatgaacgaggacaggagttcttgagaccttgtggatcaacagaagttgactgacatccttttctgtccttccccttcctggtccttcagcccatgtcaacgtgacagacacctttgtatgttcctttgtatgttcctatcaggctgatttttggagaaatgaatgtttgtctggagcagagggagaccatactagggcgactcctgtgtgactgaagtcccagcccttccattcagcctgtgccatccctggccccaaggctaggatcaaagtggctgcagcagagttagctgtctagcgcctagcaaggtgcctttgtacctcaggtgttttaggtgtgagatgtttcagtgaaccaaagttctgataccttgtttacatgtttgtttttatggcatttctatctattgtggctttaccaaaaaataaaatgtccctaccagaagccttaaa

SEQ ID NO: 14600 - DNA, 2230 bp, Homo sapiens
  source 1..2230: mol_type = unassigned DNA
ggaggcgccgagctgaccgggcgacgccgcgggaggttctggaaacgccgggagctgcgagtgtccagctgcggagacccgtgataattcgttaactaattcaacaaacgggacccttctgtgtgccagaaaccgcaagcagttgctaacccagtgggacaggcggattggaagagcgggaaggtcctggcccagagcagtgtgacacttccctctgtgaccatgaaactctgggtgtctgcattgctgatggcctggtttggtgtcctgagctgtgtgcaggccgaattcttcacctctattgggcacatgactgacctgatttatgcagagaaagagctggtgcagtctctgaaagagtacatccttgtggaggaagccaagctttccaagattaagagctgggccaacaaaatggaagccttgactagcaagtcagctgctgatgctgagggctacctggctcaccctgtgaatgcctacaaactggtgaagcggctaaacacagactggcctgcgctggaggaccttgtcctgcaggactcagctgcaggttttatcgccaacctctctgtgcagcggcagttcttccccactgatgaggacgagataggagctgccaaagccctgatgagacttcaggacacatacaggctggacccaggcacaatttccagaggggaacttccaggaaccaagtaccaggcaatgctgagtgtggatgactgctttgggatgggccgctcggcctacaatgaaggggactattatcatacggtgttgtggatggagcaggtgctaaagcagcttgatgccggggaggaggccaccacaaccaagtcacaggtgctggactacctcagctatgctgtcttccagttgggtgatctgcaccgtgccctggagctcacccgccgcctgctctcccttgacccaagccacgaacgagctggagggaatctgcggtactttgagcagttattggaggaagagagagaaaaaacgttaacaaatcagacagaagctgagctagcaaccccagaaggcatctatgagaggcctgtggactacctgcctgagagggatgtttacgagagcctctgtcgtggggagggtgtcaaactgacaccccgtagacagaagaggcttttctgtaggtaccaccatggcaacagggccccacagctgctcattgcccccttcaaagaggaggacgagtgggacagcccgcacatcgtcaggtactacgatgtcatgtctgatgaggaaatcgagaggatcaaggagatcgcaaaacctaaacttgcacgagccaccgttcgtgatcccaagacaggagtcctcactgtcgccagctaccgggtttccaaaagctcctggctagaggaagatgatgaccctgttgtggcccgagtaaatcgtcggatgcagcatatcacagggttaacagtaaagactgcagaattgttacaggttgcaaattatggagtgggaggacagtatgaaccgcacttcgacttctctaggaatgatgagcgagatactttcaagcatttagggacggggaatcgtgtggctactttcttaaactacatgagtgatgtagaagctggtggtgccaccgtcttccctgatctgggggctgcaatttggcctaagaagggtacagctgtgttctggtacaacctcttgcggagcggggaaggtgactaccgaacaagacatgctgcctgccctgtgcttgtgggctgcaagtgggtctccaataagtggttccatgaacgaggacaggagttcttgagaccttgtggatcaacagaagttgactgacatccttttctgtccttccccttcctggtccttcagcccatgtcaacgtgacagacacctttgtatgttcctttgtatgttcctatcaggctgatttttggagaaatgaatgtttgtctggagcagagggagaccatactagggcgactcctgtgtgactgaagtcccagcccttccattcagcctgtgccatccctggccccaaggctaggatcaaagtggctgcagcagagttagctgtctagcgcctagcaaggtgcctttgtacctcaggtgttttaggtgtgagatgtttcagtgaaccaaagttctgataccttgtttacatgtttgtttttatggcatttctatctattgtggctttaccaaaaaataaaatgtccctaccagaagccttaaa

SEQ ID NO: 14601 - DNA, 2313 bp, Homo sapiens
  source 1..2313: mol_type = unassigned DNA
atgaagggcgcgggcggccagctccggctccggctccggctccggctcccgcgaggccgggtagcctgggcgttcccaggggtcgcagaggacggcgaaccccggcggagccaccggagctggggaccaggacgcaggcaggcgtgtggagcgtgaggtggggacgtggcggcggctcaagtgggcggagccccggcagcggcccgaggcggagtcgccaagggaggaggcgccgagctgaccgggcgacgccgcgggaggttctggaaacgccgggagctgcgagtgtccagacacttccctctgtgaccatgaaactctgggtgtctgcattgctgatggcctggtttggtgtcctgagctgtgtgcaggccgaattcttcacctctattgggcacatgactgacctgatttatgcagagaaagagctggtgcagtctctgaaagagtacatccttgtggaggaagccaagctttccaagattaagagctgggccaacaaaatggaagccttgactagcaagtcagctgctgatgctgagggctacctggctcaccctgtgaatgcctacaaactggtgaagcggctaaacacagactggcctgcgctggaggaccttgtcctgcaggactcagctgcaggttttatcgccaacctctctgtgcagcggcagttcttccccactgatgaggacgagataggagctgccaaagccctgatgagacttcaggacacatacaggctggacccaggcacaatttccagaggggaacttccaggaaccaagtaccaggcaatgctgagtgtggatgactgctttgggatgggccgctcggcctacaatgaaggggactattatcatacggtgttgtggatggagcaggtgctaaagcagcttgatgccggggaggaggccaccacaaccaagtcacaggtgctggactacctcagctatgctgtcttccagttgggtgatctgcaccgtgccctggagctcacccgccgcctgctctcccttgacccaagccacgaacgagctggagggaatctgcggtactttgagcagttattggaggaagagagagaaaaaacgttaacaaatcagacagaagctgagctagcaaccccagaaggcatctatgagaggcctgtggactacctgcctgagagggatgtttacgagagcctctgtcgtggggagggtgtcaaactgacaccccgtagacagaagaggcttttctgtaggtaccaccatggcaacagggccccacagctgctcattgcccccttcaaagaggaggacgagtgggacagcccgcacatcgtcaggtactacgatgtcatgtctgatgaggaaatcgagaggatcaaggagatcgcaaaacctaaacttgcacgagccaccgttcgtgatcccaagacaggagtcctcactgtcgccagctaccgggtttccaaaagctcctggctagaggaagatgatgaccctgttgtggcccgagtaaatcgtcggatgcagcatatcacagggttaacagtaaagactgcagaattgttacaggttgcaaattatggagtgggaggacagtatgaaccgcacttcgacttctctaggcgaccttttgacagcggcctcaaaacagaggggaataggttagcgacgtttcttaactacatgagtgatgtagaagctggtggtgccaccgtcttccctgatctgggggctgcaatttggcctaagaagggtacagctgtgttctggtacaacctcttgcggagcggggaaggtgactaccgaacaagacatgctgcctgccctgtgcttgtgggctgcaagtgggtctccaataagtggttccatgaacgaggacaggagttcttgagaccttgtggatcaacagaagttgactgacatccttttctgtccttccccttcctggtccttcagcccatgtcaacgtgacagacacctttgtatgttcctttgtatgttcctatcaggctgatttttggagaaatgaatgtttgtctggagcagagggagaccatactagggcgactcctgtgtgactgaagtcccagcccttccattcagcctgtgccatccctggccccaaggctaggatcaaagtggctgcagcagagttagctgtctagcgcctagcaaggtgcctttgtacctcaggtgttttaggtgtgagatgtttcagtgaaccaaagttctgataccttgtttacatgtttgtttttatggcatttctatctattgtggctttaccaaaaaataaaatgtccctaccagaagccttaaa

SEQ ID NO: 14602 - DNA, 743 bp, Homo sapiens
  source 1..743: mol_type = unassigned DNA
gaagaaaggacagggagggaagtcccttcaggggcgggtgagttcccagacttctacctcagaaaggtaggtgctttctgggaaatgtctctgttgctggagtcccagagccctatcccctgtccatgggaaaatgagggtgtttctgctcagggcagagcttctgtgatgcttgcagtcaggtccctgagcacagtctcttaagaatgtgttctgaaaggccatctctttcccagggtacagctgtgttctggtacaacctcttgcggagcggggaaggtgactaccgaacaagacatgctgcctgccctgtgcttgtgggctgcaagtgggtctccaataagtggttccatgaacgaggacaggagttcttgagaccttgtggatcaacagaagttgactgacatccttttctgtccttccccttcctggtccttcagcccatgtcaacgtgacagacacctttgtatgttcctttgtatgttcctatcaggctgatttttggagaaatgaatgtttgtctggagcagagggagaccatactagggcgactcctgtgtgactgaagtcccagcccttccattcagcctgtgccatccctggccccaaggctaggatcaaagtggctgcagcagagttagctgtctagcgcctagcaaggtgcctttgtacctcaggtgttttaggtgtgagatgtttcagtgaaccaaagttctgataccttgtttacatgtttgttttta

SEQ ID NO: 14603 - DNA, 463 bp, Homo sapiens
  source 1..463: mol_type = unassigned DNA
cacgtcagggtggcttctgccttgattactttctcatcctgttgtcactcctgggaccctcttggtgagagaaccatctgggtatgcccatcttcttcccaggataacttctatgtagctttatattctagccctaggatttcctcttccctctaagagcaagaaacatgtgtgcagaatttcatacaattatctgtttacatgtgtcttccttaccaattcttcagcaaattgaggcctgagatcatgtcttgtcttatttgtgtctgattccagggcacagtgcagggggtcatcatgaaggagtcattcattcaggctactaaactgaccaataggattgtaacatgcttgctttcttttcacagtctccaataagtggttccatgaacgaggacaggagttcttgagaccttgtggatcaacagaagttgactgacatccttttctgtccttccccttc

SEQ ID NO: 14604 - DNA, 456 bp, Homo sapiens
  source 1..456: mol_type = unassigned DNA
cggatgtgggtctcctgtgggcctcaactcttgaacactcatgacatggagactgttctaatgaatcacactggttaagtaggcatgggaagagcctttcttggctaaagggctggccatggagcagacaccaagtagtgtcactcatgctgagaggagggcaatctatataccttgtcatgtcctttgtggctcaattgctctgagagccttgggtaggagggtcaagctctatgtcttatatttccagatgagtgatgtagaagctggtggtgccaccgtcttccctgatctgggggctgcaatttggcctaagaagggtacagctgtgttctggtacaacctcttgcggagcggggaaggtgactaccgaacaagacatgctgcctgccctgtgcttgtgggctgcaagtgggtctccaataagtggttccatgaacgaggacaggagttctt

SEQ ID NO: 14605 - DNA, 1023 bp, Homo sapiens
  source 1..1023: mol_type = unassigned DNA
tccaggtgagcgccccgcccgctcagccgccagatcaaccttagcgctggggcgcgggctggggtcgccaggcggtgcgttctgcccgcgcggggctgagagttaggggccggggccggatccggggccgggggtcgcgccgctagccgccagcagcgcagtccgggccgccaccctgcaccctccgccctgtttctgcacccgtctgggttcttgtgccgccgcccgcaagccttcccgagctcagggtggtgagctgcggagacccgtgataattcgttaactaattcaacaaacgggacccttctgtgtgccagaaaccgcaagcagttgctaacccagtgggacaggcggattggaagagcgggaaggtcctggcccagagcagtgtgacacttccctctgtgaccatgaaactctgggtgtctgcattgctgatggcctggtttggtgtcctgagctgtgtgcaggccgaattcttcacctctattgggcacatgactgacctgatttatgcagagaaagagctggtgcagtctctgaaagagtacatccttgtggaggaagccaagctttccaagattaagagctgggccaacaaaatggaagccttgactagcaagtcagctgctgatgctgagggctacctggctcaccctgtgaatgcctacaaactggtgaagcggctaaacacagactggcctgcgctggaggaccttgtcctgcaggactcagctgcaggttttatcgccaacctctctgtgcagcggcagttcttccccactgatgaggacgagataggagctgccaaagccctgatgagacttcaggacacatacaggctggacccaggcacaatttccagaggggaacttccaggaaccaagtaccaggcaatgctgagtgtggatgactgctttgggatgggccgctcggcctacaatgaaggggactattatcatacggtgttgtggatggagcaggtgctaaagcagcttgatgccggggaggaggccaccacaa

SEQ ID NO: 14606 - DNA, 724 bp, Homo sapiens
  source 1..724: mol_type = unassigned DNA
gttgtgaaaatcggaaatgaaaagacagttggtgacaaactcctttctccatcacctccttattggacagaaacgacccaggaatgcgcctcgcacacttccctctgtgaccatgaaactctgggtgtctgcattgctgatggcctggtttggtgtcctgagctgtgtgcaggccgaattcttcacctctattgggcacatgactgacctgatttatgcagagaaagagctggtgcagtctctgaaagagtacatccttgtggaggaagccaagctttccaagattaagagctgggccaacaaaatggaagccttgactagcaagtcagctgctgatgctgagggctacctggctcaccctgtgaatgcctacaaactggtgaagcggctaaacacagactggcctgcgctggaggaccttgtcctgcaggactcagctgcaggttttatcgccaacctctctgtgcagcggcagttcttccccactgatgaggacgagataggagctgccaaagccctgatgagacttcaggacacatacaggctggacccaggcacaatttccagaggggaacttccaggaaccaagtaccaggcaatgctgagtgtggatgactgctttgggatgggccgctcggcctacaatgaaggggactattatcatacggtgttgtggatggagcaggtgctaaagcagcttgatgccggggaggaggccaccaca

SEQ ID NO: 14607 - DNA, 866 bp, Homo sapiens
  source 1..866: mol_type = unassigned DNA
ctcactgcagcctcgaactcctgggctcaaggggtcctcccacctcagccttctgagtagtttggactataggtgcatgccgccacagctggctattttttttttcatttttattttttctagagagggggtctcgctatgttgcccagtggtcacgagtcttggcaagaaagtctgaagacgggaccagctgcacatgttttaccctaagagcttgctatataaaggatactttctggaaggctggttggtgtgaggattcagtcttgcagccactcgagacatcacttctgttcacacttccctctgtgaccatgaaactctgggtgtctgcattgctgatggcctggtttggtgtcctgagctgtgtgcaggccgaattcttcacctctattgggcacatgactgacctgatttatgcagagaaagagctggtgcagtctctgaaagagtacatccttgtggaggaagccaagctttccaagattaagagctgggccaacaaaatggaagccttgactagcaagtcagctgctgatgctgagggctacctggctcaccctgtgaatgcctacaaactggtgaagcggctaaacacagactggcctgcgctggaggaccttgtcctgcaggactcagctgcaggttttatcgccaacctctctgtgcagcggcagttcttccccactgatgaggacgagataggagctgccaaagccctgatgagacttcaggacacatacaggctggacccaggcacaatttccagaggggaacttccaggaaccaagtaccaggcaatgctgagtgtggatgactgctttgggatgggccgctcggcctacaatgaaggggactattatcat

SEQ ID NO: 14608 - DNA, 568 bp, Homo sapiens
  source 1..568: mol_type = unassigned DNA
gcatttgggttgcagctgggagcttggcagagattctgcctgatgagacacttccctctgtgaccatgaaactctgggtgtctgcattgctgatggcctggtttggtgtcctgagctgtgtgcaggccgaattcttcacctctattgggcacatgactgacctgatttatgcagagaaagagctggtgcagtctctgaaagagtacatccttgtggaggaagccaagctttccaagattaagagctgggccaacaaaatggaagccttgactagcaagtcagctgctgatgctgagggctacctggctcaccctgtgaatgcctacaaactggtgaagcggctaaacacagactggcctgcgctggaggaccttgtcctgcaggactcagctgcaggttttatcgccaacctctctgtgcagcggcagttcttccccactgatgaggacgagataggagctgccaaagccctgatgagacttcaggacacatacaggctggacccaggcacaatttccagaggggaacttccaggaaccaagtaccaggcaatgctgagtgtggatga

SEQ ID NO: 14609 - DNA, 819 bp, Homo sapiens
  source 1..819: mol_type = unassigned DNA
gggcgacgccgcgggaggttctggaaacgccgggagctgcgagtgtccagctgcggagacccgtgataattcgttaactaattcaacaaacgggacccttctgtgtgccagaaaccgcaagcagttgctaacccagtgggacaggcggattggaagagcgggaaggtcctggcccagagcagtgtggtgagcgctgtgctggaagggaatgcgggcagtgggtacttggtagagcactgactgcctccggccagaggacttcccggaggaggtgacccatgagctggagtggtcagaggaaggctggcaaaagggcatcgtggacagaggaacagcctatacacttccctctgtgaccatgaaactctgggtgtctgcattgctgatggcctggtttggtgtcctgagctgtgtgcaggccgaattcttcacctctattgggcacatgactgacctgatttatgcagagaaagagctggtgcagtctctgaaagagtacatccttgtggaggaagccaagctttccaagattaagagctgggccaacaaaatggaagccttgactagcaagtcagctgctgatgctgagggctacctggctcaccctgtgaatgcctacaaactggtgaagcggctaaacacagactggcctgcgctggaggaccttgtcctgcaggactcagctgcaggttttatcgccaacctctctgtgcagcggcagttcttccccactgatgaggacgagataggagctgccaaagccctgatgagacttcaggacacatacaggctggacccaggcacaatttccagagggga

SEQ ID NO: 14610 - DNA, 751 bp, Homo sapiens
  source 1..751: mol_type = unassigned DNA
tattggctaagcccgttctgcaccctcccaagggctgggagtcctaggtcttgtccgggcagggtccagcttggagcccattagatgggccattggatcagaaagtcttttctcccccagacatccttgtggaaccagcgttgtttttccttggcagctgcggagacccgtgataattcgttaactaattcaacaaacgggacccttctgtgtgccagaaaccgcaagcagttgctaacccagtgggacaggcggattggaagagcgggaaggtcctggcccagagcagtgtgacacttccctctgtgaccatgaaactctgggtgtctgcattgctgatggcctggtttggtgtcctgagctgtgtgcaggccgaattcttcacctctattgggcacatgactgacctgatttatgcagagaaagagctggtgcagtctctgaaagagtacatccttgtggaggaagccaagctttccaagattaagagctgggccaacaaaatggaagccttgactagcaagtcagctgctgatgctgagggctacctggctcaccctgtgaatgcctacaaactggtgaagcggctaaacacagactggcctgcgctggaggaccttgtcctgcaggactcagctgcaggttttatcgccaacctctctgtgcagcggcagttcttccccactgatgaggacgagataggagctgccaaagccctgatgagacttcaggacacatacaggctggaccc

SEQ ID NO: 14611 - DNA, 568 bp, Homo sapiens
  source 1..568: mol_type = unassigned DNA
gacgccgcgggaggttctggaaacgccgggagctgcgagtgtccagctgcggagacccgtgataattcgttaactaattcaacaaacgggacccttctgtgtgccagaaaccgcaagcagttgctaacccagtgggacaggcggattggaagagcgggaaggtcctggcccagagcagtgtgtgattgtcattgaatgcctttcagacacttccctctgtgaccatgaaactctgggtgtctgcattgctgatggcctggtttggtgtcctgagctgtgtgcaggccgaattcttcacctctattgggcacatgactgacctgatttatgcagagaaagagctggtgcagtctctgaaagagtacatccttgtggaggaagccaagctttccaagattaagagctgggccaacaaaatggaagccttgactagcaagtcagctgctgatgctgagggctacctggctcaccctgtgaatgcctacaaactggtgaagcggctaaacacagactggcctgcgctggaggaccttgtcctgcaggactcagctgcaggttttatcgccaa

SEQ ID NO: 14612 - DNA, 929 bp, Homo sapiens
  source 1..929: mol_type = unassigned DNA
ccagacatccttgtggaaccagcgttgtttttccttggcagctgcggagacccgtgataattcgttaactaattcaacaaacgggacccttctgtgtgccagaaaccgcaagcagttgctaacccagtgggacaggcggattggaagagcgggaaggtcctggcccagagcagtgtgacacttccctctgtgaccatgaaactctgggtgtctgcattgctgatggcctggtttggtgtcctgagctgtgtgcaggccgaattcttcacctctattgggcacatgactgacctgatttatgcagagaaagagctggtgcagtctctgaaagagtacatccttgtggaggaagccaagctttccaagattaagaggtgtcctaagtccccaaccatccttagttggccttccttcccttctgcccctcaaggaacaaggaagccatccagggtgcctataagaggaaacctttgagagggtgatgtggggctggcctggttacttcatgccagtgcttgagaggagctaagtacatgggctaaggagtcactgtttattttctatttaagaccttttcccttacattgggggtcccagctgttatctagattaaggggctagaagtatctgtggggagttactgtattcatttttcattgcctcttgatgaaaagggccccagaacctggcaccagggaattctcactaggaaaattgtcacaggtcaagacctatgtgggtggacgcattagtcttccttttcctctggttccacagctgggccaacaaaatggaagccttgactagcaagtcagctgctgatgctgagggctacctggctcaccctgtgaatgcctacaaactggtgaagcggctaaacacagactggcctgcgctggaggaccttgtcctgcaggactcagctgcag

SEQ ID NO: 14613 - DNA, 582 bp, Homo sapiens
  source 1..582: mol_type = unassigned DNA
cgtaatgaccaatgtttgacccctagatgccaagatattcatcagcaagatctttaaacaatgcctgtagaatagaaaactcttcataaagatgcttatttaacctctccagtggtcacgagtcttggcaagaaagtctgaagacgggaccagctgcacatgttttaccctaagagcttgctatataaaggatactttctggaaggctggttggtgtgaggattcagtcttgcagccactcgagacatcacttctgttcacacttccctctgtgaccatgaaactctgggtgtctgcattgctgatggcctggtttggtgtcctgagctgtgtgcaggccgaattcttcacctctattgggcacatgactgacctgatttatgcagagaaagagctggtgcagtctctgaaagagtacatccttgtggaggaagccaagctttccaagattaagagctgggccaacaaaatggaagccttgactagcaagtcagctgctgatgctgagggctacctggctcaccctgtgaatgcctacaaactggtgaagcggctaaacacagactggcctgcgctggagga

SEQ ID NO: 14614 - DNA, 427 bp, Homo sapiens
  source 1..427: mol_type = unassigned DNA
aggcagggaaatccgtcagcctccagggacgctctccctacagccccggcgaggggatcgggtcgtggcgacctctccagacgcccaggggctgggcaggagggcgggccaaggcccgcagctgcggagacccgtgataattcgttaactaattcaacaaacgggacccttctgtgtgccagaaaccgcaagcagttgctaacccagtgggacaggcggattggaagagcgggaaggtcctggcccagagcagtgtgacacttccctctgtgaccatgaaactctgggtgtctgcattgctgatggcctggtttggtgtcctgagctgtgtgcaggccgaattcttcacctctattgggcacatgactgacctgatttatgcagagaaagagctggtgcagtctctgaaagagtacatccttgtgga

SEQ ID NO: 14615 - DNA, 2508 bp, Homo sapiens
  source 1..2508: mol_type = unassigned DNA
cgcttcccccaacgcaacatctaggttcttaggaaacttcatttgttgtgaaaatcggaaatgaaaagacagttggtgacaaactcctttctccatcacctccttattggacagaaacgacccaggaatgcgcctcgcaagccaaagaagaagaagaggaagaggaaagaagaagaagaggaagaggaagaagaagaagaagaagaagaagaagaagaagaagaagaagaagaagaagaagaagaagaagaaaagaagaagaagaagaagaggaagaagaagaagaatgcagcagtaggttgtttacagattggtcacgagtcttggcaagaaagtctgaagacgggaccagctgcacatgttttaccctaagagcttgctatataaaggatactttctggaaggctggttggtgtgaggattcagtcttgcagccactcgagacatcacttctgttcgagaaaccaggagctctaagagaatgtataatgagaacttctatgtgtggagagttaaacaagaagctgtctcatcccagggaagatgaagagaaaatggcggatctgggcttgaagtgcacacagtgttggaaaaggccccacctaaggctctaggaccagcagtccctgagaagtagctgtgtgtaggattaagacaagctgactgcggagagctgtgacattgggcattcaagcatgaagcattgttggcccagagagggtgcacaagcattctccctcagagaaccatggtgttccagagccagagagagatggagagcttccacaatccttgtgaagatctgttatcctaacaccaatatatcccctttaagaaaatggtggccccctgtaaattgtcaatatagcaaattggctcccataatatattgaaacactattaccaccttggggattctttttcaaattacaagcttgatttaatataaaacgtaatgattaatacattagattaaaagaagaaaggaatcttgtaattatctcaaaaggcattgacaaaattcatcagccattcacacgataaaagttagaaaaccatgaagagaggaaatgttcttaacattttaaagaacagatataaaaaaccaaaagccagcattagatttaacagtctaggaagttctattaatgggagaatccaatgtcctcttcactactgttgttcagtgttgctctggaagtcctaaccaggacaatagggtgaaaagaagaaataagggagaagtaaaggaagtaagtaatagagtcaaaatgatcattatttgcagatattatgattttcctttcataatatccaagagaatcaattgaaaaatgattatgaccagtaggagaatccagtaggagggagcagagtagaataaattaatatatgtatatagattttaatagcttttaagagtgctaagtcacaactgattggaaaatgtgatgaaaacaatttaccattcacgataatggtgaaacattaaaaatatctagaaatgaattttgagtacatcaaaagcctataaacttttttcttttttatttcctttttcttatcctagtggtggtgagaacaaagggcctatgaactttgatctaggatagatttaaaagaagacaaaaggtatgcaggcatatgtcatgtttctagaaaaatcaatatttttaatttattagtaaattcaatgcaattccaaacaaaatttgtttgggtgggaggaattgacaagatgattctaaggatcaactgaaaagtaagtatgaaaaaaacccacaaatattggattaagagactaataaagtaagatttgccctataagtatcaaagtatgcaatagagctaaaataattaagaatgtgatagcagcataggaaaagacgaatatgttagtggaacaaaagagagtccatagcatgagataaagaaaacattttaattcagggaataaaaggtagtttactcaataactcatgttggggccatttactattatgcataaaaaataaggctataattctatatgctatataatttcccacattataaagtaaatcccaaatggattcatgatctatatattttaattttcccaatgtgaatgcttttataaactactcatatgctttaccagaaatgactggtaaaaaaatatatagattaatatttttataatcatggtgctacggtttgaatgtgtcccccagagttcatgtgttggaaacttaatctacaatgcaacagtgttgagaggtgggctcttacgaggtgataaggtcatgagggctctgcccccaatggattaatgccaacagaggtgggtttgttattgtgggaatgtgtccttgtgaaggaggagctcggtccccctttgtctctctcaccctctagccttctgccatggaataatgcagcaagaaggcccttgaaagatgctggcaccttgatattggacttctcagcttccagaattttgagaaataaatttcttttctttataaa

SEQ ID NO: 14616 - DNA, 496 bp, Homo sapiens
  source 1..496: mol_type = unassigned DNA
gcttttttttttttttaacagggtctcactctgttgcctaggctcgagtgcagtggcaagatcatagctcactgcagcctcgaactcctgggctcaaggggtcctcccacctcagccttctgagtagtttggactataggtgcatgccgccacagctggctattttttttttcatttttattttttctagagagggggtctcgctatgttgcccagtggtcacgagtcttggcaagaaagtctgaagacgggaccagctgcacatgttttaccctaagagcttgctatataaaggatactttctggaaggctggttggtgtgaggattcagtcttgcagccactcgagacatcacttctgttcgtaagtccctcttatatatttctctctgagaaaatggatttgtcaacctctttctttggcttctcagctctctcggcctttgggtttgcatagtcctgctatccatggaacaatggctcacaagggccaacac

SEQ ID NO: 14617 - DNA, 2563 bp, Homo sapiens
  source 1..2563: mol_type = unassigned DNA
agcgttgtttttccttggcagctgcggagacccgtgataattcgttaactaattcaacaaacgggacccttctgtgtgccagaaaccgcaagcagttgctaacccagtgggacaggcggattggaagagcgggaaggtcctggcccagagcagtgtggtgagcgctgtgctggaagggaatgcgggcagtgggtacttggtagagcactgactgcctccggccagaggacttcccggaggaggtgacccatgagctggagtggtcagaggaaggctggcaaaagggcatcgtggacagaggaacagcctatgtgagtgggagcagagaccttggccaatgccattccttatggccttgtagtggaagcaaggtgatggggaaggaacactgtaggggatagctgtccacggacgctgtctacaagaccctggagtgagataacgtgcctggtactgtgccctgcatgtgtaagatgcccagttgaccttcgcagcaggagcctggatcagggcacttcctgcctcaggtattgctggacagcccagacacttccctctgtgaccatgaaactctgggtgtctgcattgctgatggcctggtttggtgtcctgagctgtgtgcaggccgaattcttcacctctattgggcacatgactgacctgatttatgcagagaaagagctggtgcagtctctgaaagagtacatccttgtggaggaagccaagctttccaagattaagagctgggccaacaaaatggaagccttgactagcaagtcagctgctgatgctgagggctacctggctcaccctgtgaatgcctacaaactggtgaagcggctaaacacagactggcctgcgctggaggaccttgtcctgcaggactcagctgcaggttttatcgccaacctctctgtgcagcggcagttcttccccactgatgaggacgagataggagctgccaaagccctgatgagacttcaggacacatacaggctggacccaggcacaatttccagaggggaacttccaggaaccaagtaccaggcaatgctgagtgtggatgactgctttgggatgggccgctcggcctacaatgaaggggactattatcatacggtgttgtggatggagcaggtgctaaagcagcttgatgccggggaggaggccaccacaaccaagtcacaggtgctggactacctcagctatgctgtcttccagttgggtgatctgcaccgtgccctggagctcacccgccgcctgctctcccttgacccaagccacgaacgagctggagggaatctgcggtactttgagcagttattggaggaagagagagaaaaaacgttaacaaatcagacagaagctgagctagcaaccccagaaggcatctatgagaggcctgtggactacctgcctgagagggatgtttacgagagcctctgtcgtggggagggtgtcaaactgacaccccgtagacagaagaggcttttctgtaggtaccaccatggcaacagggccccacagctgctcattgcccccttcaaagaggaggacgagtgggacagcccgcacatcgtcaggtactacgatgtcatgtctgatgaggaaatcgagaggatcaaggagatcgcaaaacctaaacttgcacgagccaccgttcgtgatcccaagacaggagtcctcactgtcgccagctaccgggtttccaaaagctcctggctagaggaagatgatgaccctgttgtggcccgagtaaatcgtcggatgcagcatatcacagggttaacagtaaagactgcagaattgttacaggttgcaaattatggagtgggaggacagtatgaaccgcacttcgacttctctaggcgaccttttgacagcggcctcaaaacagaggggaataggttagcgacgtttcttaactacatgagtgatgtagaagctggtggtgccaccgtcttccctgatctgggggctgcaatttggcctaagaagggtacagctgtgttctggtacaacctcttgcggagcggggaaggtgactaccgaacaagacatgctgcctgccctgtgcttgtgggctgcaagtgggtctccaataagtggttccatgaacgaggacaggagttcttgagaccttgtggatcaacagaagttgactgacatccttttctgtccttccccttcctggtccttcagcccatgtcaacgtgacagacacctttgtatgttcctttgtatgttcctatcaggctgatttttggagaaatgaatgtttgtctggagcagagggagaccatactagggcgactcctgtgtgactgaagtcccagcccttccattcagcctgtgccatccctggccccaaggctaggatcaaagtggctgcagcagagttagctgtctagcgcctagcaaggtgcctttgtacctcaggtgttttaggtgtgagatgtttcagtgaaccaaagttctgataccttgtttacatgtttgtttttatggcatttctatctattgtggctttaccaaaaaataaaatgtccctaccagaagcctt

SEQ ID NO: 14618 - DNA, 2569 bp, Homo sapiens
  source 1..2569: mol_type = unassigned DNA
agcgttgtttttccttggcagctgcggagacccgtgataattcgttaactaattcaacaaacgggacccttctgtgtgccagaaaccgcaagcagttgctaacccagtgggacaggcggattggaagagcgggaaggtcctggcccagagcagtgtggtgagcgctgtgctggaagggaatgcgggcagtgggtacttggtagagcactgactgcctccggccagaggacttcccggaggaggtgacccatgagctggagtggtcagaggaaggctggcaaaagggcatcgtggacagaggaacagcctatgtgagtgggagcagagaccttggccaatgccattccttatggccttgtagtggaagcaaggtgatggggaaggaacactgtaggggatagctgtccacggacgctgtctacaagaccctggagtgagataacgtgcctggtactgtgccctgcatgtgtaagatgcccagttgaccttcgcagcaggagcctggatcagggcacttcctgcctcaggtattgctggacagcccagacacttccctctgtgaccatgaaactctgggtgtctgcattgctgatggcctggtttggtgtcctgagctgtgtgcaggccgaattcttcacctctattgggcacatgactgacctgatttatgcagagaaagagctggtgcagtctctgaaagagtacatccttgtggaggaagccaagctttccaagattaagagctgggccaacaaaatggaagccttgactagcaagtcagctgctgatgctgagggctacctggctcaccctgtgaatgcctacaaactggtgaagcggctaaacacagactggcctgcgctggaggaccttgtcctgcaggactcagctgcaggttttatcgccaacctctctgtgcagcggcagttcttccccactgatgaggacgagataggagctgccaaagccctgatgagacttcaggacacatacaggctggacccaggcacaatttccagaggggaacttccaggaaccaagtaccaggcaatgctgagtgtggatgactgctttgggatgggccgctcggcctacaatgaaggggactattatcatacggtgttgtggatggagcaggtgctaaagcagcttgatgccggggaggaggccaccacaaccaagtcacaggtgctggactacctcagctatgctgtcttccagttgggtgatctgcaccgtgccctggagctcacccgccgcctgctctcccttgacccaagccacgaacgagctggagggaatctgcggtactttgagcagttattggaggaagagagagaaaaaacgttaacaaatcagacagaagctgagctagcaaccccagaaggcatctatgagaggcctgtggactacctgcctgagagggatgtttacgagagcctctgtcgtggggagggtgtcaaactgacaccccgtagacagaagaggcttttctgtaggtaccaccatggcaacagggccccacagctgctcattgcccccttcaaagaggaggacgagtgggacagcccgcacatcgtcaggtactacgatgtcatgtctgatgaggaaatcgagaggatcaaggagatcgcaaaacctaaacttgcacgagccaccgttcgtgatcccaagacaggagtcctcactgtcgccagctaccgggtttccaaaagctcctggctagaggaagatgatgaccctgttgtggcccgagtaaatcgtcggatgcagcatatcacagggttaacagtaaagactgcagaattgttacaggttgcaaattatggagtgggaggacagtatgaaccgcacttcgacttctctaggaatgatgagcgagatactttcaagcatttagggacggggaatcgtgtggctactttcttaaactacatgagtgatgtagaagctggtggtgccaccgtcttccctgatctgggggctgcaatttggcctaagaagggtacagctgtgttctggtacaacctcttgcggagcggggaaggtgactaccgaacaagacatgctgcctgccctgtgcttgtgggctgcaagtgggtctccaataagtggttccatgaacgaggacaggagttcttgagaccttgtggatcaacagaagttgactgacatccttttctgtccttccccttcctggtccttcagcccatgtcaacgtgacagacacctttgtatgttcctttgtatgttcctatcaggctgatttttggagaaatgaatgtttgtctggagcagagggagaccatactagggcgactcctgtgtgactgaagtcccagcccttccattcagcctgtgccatccctggccccaaggctaggatcaaagtggctgcagcagagttagctgtctagcgcctagcaaggtgcctttgtacctcaggtgttttaggtgtgagatgtttcagtgaaccaaagttctgataccttgtttacatgtttgtttttatggcatttctatctattgtggctttaccaaaaaataaaatgtccctaccagaagcctt

SEQ ID NO: 14619 - DNA, 839 bp, Homo sapiens
  source 1..839: mol_type = unassigned DNA
agggaactcaaaataggtgtgtggcctctagtcaccaaatggcttcttggctctgctttaaatttaggcccactcagccacttaagatccatcttgaaggactggctctttcagggtcacatttgttcatgcaaactattgatattgcatgctatttaccactatttcagatgaaattgccacaggatataaatcattggactatttaagagagcaaaggcttttggaagctgccacagtttcattcccaggtcctccacttaccagcaatgagacttcatgtgacctcaggtgctcctgctcaccttcatatttttttaagtatacatctgtgtatcatgaacaattcttatctcaaaatttaaaaatgaagtacacattataacagcattacaatcatgaacacatgtgctatgttctctgggagacaaagagaaactatttaccctactttccagaaaaggacactgacacttagagggaacacaagtgttgaaaccaggtctgaaatccaagacccaagatgcttttttgctgctaaagcattcattatccagactctgcctgcatgaaggtgatgcataggaaatgatgaacctggtaaaagcttccagtcttaaaaatactccaagtaaggctctttaaggcttctggtagggacattttattttttggtaaagccacaatagatagaaatgccataaaaacaaacatgtaaacaaggtatcagaactttggttcactgaaacatctcacacctaaaacacctgaggtacaaaggcaccttgctaggcgctagacagctaactctgctgcagccactttgatcctagccttgg

SEQ ID NO: 14620 - DNA, 2944 bp, Homo sapiens
  source 1..2944: mol_type = unassigned DNA
cgtccccgcgcgccgcgtccagctcgatgtccgtgccgccgcaaccgcggcacacgcggcccgtcatgccggcgaccgcgcgggcagcgcccggagcctcccaagactctcaagccacccgagcctccggagcagcccgcgccgcccgcccaggcccagccgcccaggcctcgccgctctcgcgaggccccgctccagccgattcgcagccgcagattcgccgcgcgcgcccgggccgcgccgcccgcaacggccgcgcccgcgggatgggacaggcaccgggaccacggcggggacgcgaggactggagccgcgacctccccactgcgagcgagctggcctcccttgcggcgcgccggcgtcggaggggcgacctgcgggggctgggcttcggcggaacccgagcggggcctaccggttgtgcagcctgactctgaagaagctggtggtcttcaaggagctggagaaggagctgatctccgtggtgatcgctgtcaagatgcagggctccaaacgaatcctgcggtcccatgagattgtgctgccccccagtggacaagtggagacagacctggccctgaccttctccttgcagtatcctcacttcttgaagagggaaggcaacaagcttcagatcatgctgcagcgcagaaagcgctacaagaacagaaccatcctgggctacaagacgctggccgcgggctccatcagcatggctgaggtgatgcaacacccgtctgaaggtggccaggtgctgagcctctgcagcagcatcaaggaggcccccgtcaaggcggccgagatctggatcgcctccctgtccagccagcccattgaccacgaagacagcaccatgcaggccggccccaaggccaagtccacggataactactccgaggaggagtatgagagcttctcctccgagcaggaggccagtgacgacgccgtgcaggggcaggacttggacgaggacgactttgacgtggggaagccgaagaagcagcggagatcgattcaacagaacttcaagcagaaagtggtagcgctgctgcggaggttcaaagtgtccgacgaggtcctggactcggagcaggaccctgcggagcacatccccgaggcagaggaggacctggacctcctgtatgacaccctggacatggagcaccccagcgacagcggccccgacatggaggatgacgacagcgtcctcagcacccccaagccgaagctgcggccatactttgaaggcctgtcgcactcgagctcgcagacggagattgggagcatccacagcgcccgcagccacaaggagcccccaagcccggctgacgtgcccgagaagacgcggtccctgggaggcaggcagccgagcgacagtgtctctgacacggtggccctcggtgtgccaggcccgagggagcaccctggacagcctgaggacagccccgaggctgaggcctccaccctggatgtgttcacggagaggctgccgcccagcgggaggatcaccaagacagagtcccttgtcatcccctccaccaggtccgaggggaagcaggctggccgacggggccggagcacatccttgaaggagcggcaggcagcacggccccagaatgagcgggccaacagcctggacaacgagcgctgcccggacgcccggagccagctacagatccccaggaagactgtgtatgaccagctcaaccacatcctcatctccgatgaccagcttcccgaaaacatcatccttgtcaacacctcggactggcaggggcagttcctctccgacgtcctgcagaggcacacgctccccgtggtgtgcacgtgctctcctgcggacgtccaggcggccttcagcaccatcgtctcacggatacagagatactgcaactgcaattcccagcccccgacccccgtgaagatcgccgtggcgggagcgcagcattacctcagtgccatcctgcggctctttgtggagcagctgtcccacaagacacccgactggctcggctacatgcgcttcctggtcatcccactgggctcccaccccgtggccaggtacctaggctccgtggactaccgctacaacaacttcttccaggacctggcctggagagacctgttcaacaagctggaggcccagagtgcggtacaggacacgccagacattgtgtcacgcatcacgcagtacatcgcaggggccaactgtgcccaccagctccccatcgcagaggccatgctgacctacaagcagaagagccctgacgaagagtcctcccaaaagttcattccctttgtcggggttgtgaaggttggaattgtggagccatcctcggccacatcaggcgactcggacgacgcggccccctcgggctctggcacgctctcctccaccccgccgtccgcatctcctgcggccaaggaggcctcacccaccccgccctcctccccgtcggtgagcggaggcctgtcctcccccagccagggtgtcggcgccgagctgatggggctgcaggtggactactggacggcagcacagcctgcggacaggaagagggacgccgagaagaaggacctgcctgtcaccaaaaacacgctcaagtgcactttccggtccctccaggtcagcaggctgcccagcagcggcgaggctgcagccacgcccaccatgtccatgaccgtggtcaccaaggagaagaacaagaaggtgatgtttctgcccaagaaagcgaaggacaaggacgtggagtctaagagccagtgcattgagggcatcagccggctcatctgcactgccaggcagcagcagaacatgctgcgggtcctcatcgacggcgtggagtgcagcgacgtcaagttcttccagctggccgcgcagtggtcctcgcacgtgaagcacttccccatctgcatcttcggacactccaaggccaccttctag

SEQ ID NO: 14621 - DNA, 3708 bp, Homo sapiens
  source 1..3708: mol_type = unassigned DNA
ggtggacccccacgactctcccggcccttgcccgcggctcccggggggcggggcggggcgccccgggcggggtctgtgcgcaggcgcgtgagtgcgcgctctcgcgcaccggcgggcggggacgccccgtgaggcgccgccggaggaagcgcgcgcgcacctcacttccggcgcgcgctgcgccggcggcgattggacccgaggcggcgagctggcgccccgcccagccaatcggcggcgccggcgcgggtcggagggcgccgggcgcgcgcggggcggccgggggcgcgcggggcgcgggcggggcgccgggcggggcggggcggagcggccgcagctcgtcgccgcccgcgggcctgtccgacgccggggcccggcccgtcccctccgccgcccggcagccatgtgaccgcgccgccgccctccgcgcgcccggcccgcccgccgcgcgtccgcggcccggccgcagccccaggccgccgagggagcggcggggccggcgccatggccgagcgaggccgcctcggcctccccggcgcgcccggcgcgctcaacacgcccgtgcccatgaacctgttcgccacctgggaggtggacggctccagccccagctgcgtgcccaggttgtgcagcctgactctgaagaagctggtggtcttcaaggagctggagaaggagctgatctccgtggtgatcgctgtcaagatgcagggctccaaacgaatcctgcggtcccatgagattgtgctgccccccagtggacaagtggagacagacctggccctgaccttctccttgcagtatcctcacttcttgaagagggaaggcaacaagcttcagatcatgctgcagcgcagaaagcgctacaagaacagaaccatcctgggctacaagacgctggccgcgggctccatcagcatggctgaggtgatgcaacacccgtctgaaggtggccaggtgctgagcctctgcagcagcatcaaggaggcccccgtcaaggcggccgagatctggatcgcctccctgtccagccagcccattgaccacgaagacagcaccatgcaggccggccccaaggccaagtccacggataactactccgaggaggagtatgagagcttctcctccgagcaggaggccagtgacgacgccgtgcaggggcaggacttggacgaggacgactttgacgtggggaagccgaagaagcagcggagatcgattgtaagaacgacgtccatgaccaggcaacagaacttcaagcagaaagtggtagcgctgctgcggaggttcaaagtgtccgacgaggtcctggactcggagcaggaccctgcggagcacatccccgaggcagaggaggacctggacctcctgtatgacaccctggacatggagcaccccagcgacagcggccccgacatggaggatgacgacagcgtcctcagcacccccaagccgaagctgcggccatactttgaaggcctgtcgcactcgagctcgcagacggagattgggagcatccacagcgcccgcagccacaaggagcccccaagcccggctgacgtgcccgagaagacgcggtccctgggaggcaggcagccgagcgacagtgtctctgacacggtggccctcggtgtgccaggcccgagggagcaccctggacagcctgaggacagccccgaggctgaggcctccaccctggatgtgttcacggagaggctgccgcccagcgggaggatcaccaagacagagtcccttgtcatcccctccaccaggtccgaggggaagcaggctggccgacggggccggagcacatccttgaaggagcggcaggcagcacggccccagaatgagcgggccaacagcctggacaacgagcgctgcccggacgcccggagccagctacagatccccaggaagactgtgtatgaccagctcaaccacatcctcatctccgatgaccagcttcccgaaaacatcatccttgtcaacacctcggactggcaggggcagttcctctccgacgtcctgcagaggcacacgctccccgtggtgtgcacgtgctctcctgcggacgtccaggcggccttcagcaccatcgtctcacggatacagagatactgcaactgcaattcccagcccccgacccccgtgaagatcgccgtggcgggagcgcagcattacctcagtgccatcctgcggctctttgtggagcagctgtcccacaagacacccgactggctcggctacatgcgcttcctggtcatcccactgggctcccaccccgtggccaggtacctaggctccgtggactaccgctacaacaacttcttccaggacctggcctggagagacctgttcaacaagctggaggcccagagtgcggtacaggacacgccagacattgtgtcacgcatcacgcagtacatcgcaggggccaactgtgcccaccagctccccatcgcagaggccatgctgacctacaagcagaagagccctgacgaagagtcctcccaaaagttcattccctttgtcggggttgtgaaggttggaattgtggagccatcctcggccacatcaggcgactcggacgacgcggccccctcgggctctggcacgctctcctccaccccgccgtccgcatctcctgcggccaaggaggcctcacccaccccgccctcctccccgtcggtgagcggaggcctgtcctcccccagccagggtgtcggcgccgagctgatggggctgcaggtggactactggacggcagcacagcctgcggacaggaagagggacgccgagaagaaggacctgcctgtcaccaaaaacacgctcaagtgcactttccggtccctccaggtcagcaggctgcccagcagcggcgaggctgcagccacgcccaccatgtccatgaccgtggtcaccaaggagaagaacaagaaggtgatgtttctgcccaagaaagcgaaggacaaggacgtggagtctaagagccagtgcattgagggcatcagccggctcatctgcactgccaggcagcagcagaacatgctgcgggtcctcatcgacggcgtggagtgcagcgacgtcaagttcttccagctggccgcgcagtggtcctcgcacgtgaagcacttccccatctgcatcttcggacactccaaggccaccttctagccccacccaccagggggcccacctcctgccccatgctgtgaggggcccagctgcatttctgttaacatttcagtttactacagagacagacgcttaaaacacaaagagaaacagtcttaagtatgaatgtgctcacaacgtggaaactaacgggggagctcctgccaggagccgaataactgctctgcttattaacccgaacgttcggcccggggctgggaagccagaaggacgatgctgagccatggatcgcggaaggcgtcctctggcctcaggagccacccagagcctcacaggctgagttcttgcctctgtgtcctgtccttcctggaagtcaggactctgcttcctcagggagcccggggaaggcggagctcagtggccacaggccgagggccatggggccgctcagtcccgttggggttgtcctgagttgagcctgggggggccgtcctgcccgcctaagagatgcccccagcaccgcacactcgtggttcccaataaactcctgcctgcggcggaggttttatagca

SEQ ID NO: 14622 - DNA, 6365 bp, Homo sapiens
  source 1..6365: mol_type = unassigned DNA
ggccgcagctcgtcgccgcccgcgggcctgtccgacgccggggcccggcccgtcccctccgccgcccggcagccatgtgaccgcgccgccgccctccgcgcgcccggcccgcccgccgcgcgtccgcggcccggccgcagccccaggccgccgagggagcggcggggccggcgccatggccgagcgaggccgcctcggcctccccggcgcgcccggcgcgctcaacacgcccgtgcccatgaacctgttcgccacctgggaggtggacggctccagccccagctgcgtgcccaggttgtgcagcctgactctgaagaagctggtggtcttcaaggagctggagaaggagctgatctccgtggtgatcgctgtcaagatgcagggctccaaacgaatcctgcggtcccatgagattgtgctgccccccagtggacaagtggagacagacctggccctgaccttctccttgcagtatcctcacttcttgaagagggaaggcaacaagcttcagatcatgctgcagcgcagaaagcgctacaagaacagaaccatcctgggctacaagacgctggccgcgggctccatcagcatggctgaggtgatgcaacacccgtctgaaggtggccaggtgctgagcctctgcagcagcatcaaggaggcccccgtcaaggcggccgagatctggatcgcctccctgtccagccagcccattgaccacgaagacagcaccatgcaggccggccccaaggccaagtccacggataactactccgaggaggagtatgagagcttctcctccgagcaggaggccagtgacgacgccgtgcaggggcaggacttggacgaggacgactttgacgtggggaagccgaagaagcagcggagatcgattgtaagaacgacgtccatgaccaggcaacagaacttcaagcagaaagtggtagcgctgctgcggaggttcaaagtgtccgacgaggtcctggactcggagcaggaccctgcggagcacatccccgaggcagaggaggacctggacctcctgtatgacaccctggacatggagcaccccagcgacagcggccccgacatggaggatgacgacagcgtcctcagcacccccaagccgaagctgcggccatactttgaaggcctgtcgcactcgagctcgcagacggagattgggagcatccacagcgcccgcagccacaaggagcccccaagcccggctgacgtgcccgagaagacgcggtccctgggaggcaggcagccgagcgacagtgtctctgacacggtggccctcggtgtgccaggcccgagggagcaccctggacagcctgaggacagccccgaggctgaggcctccaccctggatgtgttcacggagaggctgccgcccagcgggaggatcaccaagacagagtcccttgtcatcccctccaccaggtccgaggggaagcaggctggccgacggggccggagcacatccttgaaggagcggcaggcagcacggccccagaatgagcgggccaacagcctggacaacgagcgctgcccggacgcccggagccagctacaggtgcagctgcagatccccaggaagactgtgtatgaccagctcaaccacatcctcatctccgatgaccagcttcccgaaaacatcatccttgtcaacacctcggactggcaggggcagttcctctccgacgtcctgcagaggcacacgctccccgtggtgtgcacgtgctctcctgcggacgtccaggcggccttcagcaccatcgtctcacggatacagagatactgcaactgcaattcccagcccccgacccccgtgaagatcgccgtggcgggagcgcagcattacctcagtgccatcctgcggctctttgtggagcagctgtcccacaagacacccgactggctcggctacatgcgcttcctggtcatcccactgggctcccaccccgtggccaggtacctaggctccgtggactaccgctacaacaacttcttccaggacctggcctggagagacctgttcaacaagctggaggcccagagtgcggtacaggacacgccagacattgtgtcacgcatcacgcagtacatcgcaggggccaactgtgcccaccagctccccatcgcagaggccatgctgacctacaagcagaagaggaaaaagcattttcattttgactttaccctaagccctgacgaagagtcctcccaaaagttcattccctttgtcggggttgtgaaggttggaattgtggagccatcctcggccacatcaggcgactcggacgacgcggccccctcgggctctggcacgctctcctccaccccgccgtccgcatctcctgcggccaaggaggcctcacccaccccgccctcctccccgtcggtgagcggaggcctgtcctcccccagccagggtgtcggcgccgagctgatggggctgcaggtggactactggacggcagcacagcctgcggacaggaagagggacgccgagaagaaggacctgcctgtcaccaaaaacacgctcaagtgcactttccggtccctccaggtcagcaggctgcccagcagcggcgaggctgcagccacgcccaccatgtccatgaccgtggtcaccaaggagaagaacaagaaggtgatgtttctgcccaagaaagcgaaggacaaggacgtggagtctaagagccagtgcattgagggcatcagccggctcatctgcactgccaggcagcagcagaacatgctgcgggtcctcatcgacggcgtggagtgcagcgacgtcaagttcttccagctggccgcgcagtggtcctcgcacgtgaagcacttccccatctgcatcttcggacactccaaggccaccttctagccccacccaccagggggcccacctcctgccccatgctgtgaggggcccagctgcatttctgttaacatttcagtttactacagagacagacgcttaaaacacaaagagaaacagtcttaagtatgaatgtgctcacaacgtggaaactaacgggggagctcctgccaggagccgaataactgctctgcttattaacccgaacgttcggcccggggctgggaagccagaaggacgatgctgagccatggatcgcggaaggcgtcctctggcctcaggagccacccagagcctcacaggctgagttcttgcctctgtgtcctgtccttcctggaagtcaggactctgcttcctcagggagcccggggaaggcggagctcagtggccacaggccgagggccatggggccgctcagtcccgttggggttgtcctgagttgagcctgggggggccgtcctgcccgcctaagagatgcccccagcaccgcacactcgtggttcccaataaactcctgcctgcggcggaggttttatagcagcagatatttttaatgcttttcaatacatgttctaatgtagctgccaaacatgttgctcttctgaagtccccctggggctgggcagagccagcagagcctgcccccacttccccagcccctgccccaccccgcctcacaccttccccactctcaggctgttcttgaaacaccatgaggcttctgcgtgtagtccctgccccaaacttagcaagcacaggggcctccacagcccaggtggccccagaaaatgttccagagcccagcttggtacatagtgagatgctgctggggttggcctgaggtgggggccacttcctccaccccagtgggtatgtctgaggtcagccatggggatatctgggttgagattcaggttttggtgaatatggggcaggcgtccagatgtgtttgtgtcacctgctgcaacgctgtagccaatgaagattccagcgggatggcctgaccagcggggccggcactttggagccgtgggtgcagccaggtaccccgtgcagggcctgggaggctctccaggccacagtcctcagagcgtgttgggtcccatgttgtgtgtgggttccatgccctccacacagcaggagagggcttccctgaccacacctgccccctcagtcctgcttctccccagtaagcctgcactgtggggtctccataggaggagctggggaagctggggccctcccaggggtcctgatcgaccctgggggctcttggcctggtttcgtaagatggagcactgcaaaaggccatgctcagaaagcaaacgcagggcagggtgggcctcgagccggggctggaggggtctccacccttgctggcctgagagatggcccacatttcttacttgtgaccgccctgctcttcctggccgccccccccaggtggctgaacagggtgattttgttgtggtgaggggccaggatgtggcctggtgtgcagcctcagctccctgggttcaggcctcagaggtagcctgtgtgcaggaggcagagccccagcccctcccagccagagcccctccacaccagggactcctccttcacctgggaccaggagcctggggcacaccccagggtgggggagagggtaggaaggtctcccattgaatcctggcttcaggctctgccccgagaagtgtctgcggtgagggtgtgagccccgggctgatggcctctgaccccggcaacaggtgggaccctgactgactcgttcagctgcccccaagctgggctgcagagcatctgtttttctgctctccagtttcttttctttttttttttttttttttttgagatggagtcttgctctgttgcccaggctggagtgcagtggcatgatctcagctcactgcagcctccgtctcccaggttcaagcagttctcctgcctcagcctcccgagtagctgggattacaggcgtgtgccaccacacctggctattttttttgtatttttagtagagatggggttttgccatgttggccaggctggtcttgaactcctgacctcaagtgatccacccgcctcggcctcccaaagtgctgggattacaggcgtgagtcaccgcgtcctgcctgctcttcctgtttctttcccaagggtcacactcagtagggagatgaaggtggaaacatccttgctgtggctttctggcctcagagcaggttttagaggaaggggccacaggctgcctagtgcatcctggctgtgggcagcccctttcctggagccctcctgcctaccccgtacctcccatctggctgcacagctccatccttagccacgcaaggggagaacatgggcagagtctccatccagcagctgggggttctggtggcactccctgtgcccctgctgctgctgggctgtgggtctgccctgcacccaggagccccacggtccatcccccacaccatgcccagcaccagggaggttgggcagacaagacctgggccatgccagccctctgtgcctcggttttcccactggttacacaggatggtcgcattttccctgcctacctcacagagctgttctgagggtgcatggaggagcactctgtcccaccaaggacaactagaaaccaaagccatctgacagccagtgcggtaagggcgggggatgtgtgtgtgaggtgtgcacaccccccgagaacctggccctggactggcctcacaggacaggaggcagccccttgtagagctagggctcagccccatcagtctcaaaggttaagccaccagtcaccaccgaggcacccctcaggcctggtggccactgtccactattacgtagacagaccccaccctcacccaggccagctgtgggccagtcccgccctgcaatctggtctgctgccttcctcttccatgttggtccccttggccactgtctctgggcatgcaagccagtgtcctggttcagtgcctcggccagagctggggcaggagaggggcctctgggtgagagctgggggtgtctctgcagggtactggcagccttgccacactgtcctcattcccagatggaaagacctgagtgcctctcgccttcctccgggaatgaattcctcatgaaaatgaccaggccacttcttccgagggccaggccgccccctccccgagacctgtcctgccgtccgcgggtgtgtggcctgtaggggactgagagctgggcttgctgggcacctctggaatctgaccctgtgggccaaagaagcaccactgtagtttctgcagacccccatgcggttcattgtgcattgtttggtttctaggatgtatgtgttgctagttttttttaatgaaaccctggattaatgtaaatagctttttggggaacggattctaatgtcacgtatgtgaccgtgtggactatttcaaggtgctgatgcaacactaataaacctggaggggccggc

SEQ ID NO: 14623 - DNA, 2809 bp, Homo sapiens
  source 1..2809: mol_type = unassigned DNA
caggccgccgagggagcggcggggccggcgccatggccgagcgaggccgcctcggcctccccggcgcgcccggcgcgctcaacacgcccgtgcccatgaacctgttcgccacctgggaggtggacggctccagccccagctgcgtgcccaggttgtgcagcctgactctgaagaagctggtggtcttcaaggagctggagaaggagctgatctccgtggtgatcgctgtcaagatgcagtatcctcacttcttgaagagggaaggcaacaagcttcagatcatgctgcagcgcagaaagcgctacaagaacagaaccatcctgggctacaagacgctggccgcgggctccatcagcatggctgaggtgatgcaacacccgtctgaaggtggccaggtgctgagcctctgcagcagcatcaaggaggcccccgtcaaggcggccgagatctggatcgcctccctgtccagccagcccattgaccacgaagacagcaccatgcaggccggccccaaggccaagtccacggataactactccgaggaggagtatgagagcttctcctccgagcaggaggccagtgacgacgccgtgcaggggcaggacttggacgaggacgactttgacgtggggaagccgaagaagcagcggagatcgattgtaagaacgacgtccatgaccaggcaacagaacttcaagcagaaagtggtagcgctgctgcggaggttcaaagtgtccgacgaggtcctggactcggagcaggaccctgcggagcacatccccgaggcagaggaggacctggacctcctgtatgacaccctggacatggagcaccccagcgacagcggccccgacatggaggatgacgacagcgtcctcagcacccccaagccgaagctgcggccatactttgaaggcctgtcgcactcgagctcgcagacggagattgggagcatccacagcgcccgcagccacaaggagcccccaagcccggctgacgtgcccgagaagacgcggtccctgggaggcaggcagccgagcgacagtgtctctgacacggtggccctcggtgtgccaggcccgagggagcaccctggacagcctgaggacagccccgaggctgaggcctccaccctggatgtgttcacggagaggctgccgcccagcgggaggatcaccaagacagagtcccttgtcatcccctccaccaggtccgaggggaagcaggctggccgacggggccggagcacatccttgaaggagcggcaggcagcacggccccagaatgagcgggccaacagcctggacaacgagcgctgcccggacgcccggagccagctacagatccccaggaagactgtgtatgaccagctcaaccacatcctcatctccgatgaccagcttcccgaaaacatcatccttgtcaacacctcggactggcaggggcagttcctctccgacgtcctgcagaggcacacgctccccgtggtgtgcacgtgctctcctgcggacgtccaggcggccttcagcaccatcgtctcacggatacagagatactgcaactgcaattcccagcccccgacccccgtgaagatcgccgtggcgggagcgcagcattacctcagtgccatcctgcggctctttgtggagcagctgtcccacaagacacccgactggctcggctacatgcgcttcctggtcatcccactgggctcccaccccgtggccaggtacctaggctccgtggactaccgctacaacaacttcttccaggacctggcctggagagacctgttcaacaagctggaggcccagagtgcggtacaggacacgccagacattgtgtcacgcatcacgcagtacatcgcaggggccaactgtgcccaccagctccccatcgcagaggccatgctgacctacaagcagaagagccctgacgaagagtcctcccaaaagttcattccctttgtcggggttgtgaaggttggaattgtggagccatcctcggccacatcaggcgactcggacgacgcggccccctcgggctctggcacgctctcctccaccccgccgtccgcatctcctgcggccaaggaggcctcacccaccccgccctcctccccgtcggtgagcggaggcctgtcctcccccagccagggtgtcggcgccgagctgatggggctgcaggtggactactggacggcagcacagcctgcggacaggaagagggacgccgagaagaaggacctgcctgtcaccaaaaacacgctcaagtgcactttccggtccctccaggtcagcaggctgcccagcagcggcgaggctgcagccacgcccaccatgtccatgaccgtggtcaccaaggagaagaacaagaaggtgatgtttctgcccaagaaagcgaaggacaaggacgtggagtctaagagccagtgcattgagggcatcagccggctcatctgcactgccaggcagcagcagaacatgctgcgggtcctcatcgacggcgtggagtgcagcgacgtcaagttcttccagctggccgcgcagtggtcctcgcacgtgaagcacttccccatctgcatcttcggacactccaaggccaccttctagccccacccaccagggggcccacctcctgccccatgctgtgaggggcccagctgcatttctgttaacatttcagtttactacagagacagacgcttaaaacacaaagagaaacagtcttaagtatgaatgtgctcacaacgtggaaactaacgggggagctcctgccaggagccgaataactgctctgcttattaacc

SEQ ID NO: 14624 - DNA, 402 bp, Homo sapiens
  source 1..402: mol_type = unassigned DNA
gccgccgagggagcggcggggccggcgccatggccgagcgaggccgcctcggcctccccggcgcgcccggcgcgctcaacacgcccgtgcccatgaacctgttcgccacctgggaggtggacggctccagccccagctgcgtgcccaggttgtgcagcctgactctgaagaagctggtggtcttcaaggagctggagaaggagctgatctccgtggtgatcgctgtcaagatgcaggtgaggccgcttgtgaccccggctgtggctgggtgctgtgtaggctttccatgtgcctgggagacgagtcaggcggtgcgctactgtggggccttgtgccaaaacagcgggcagcccatgccatctccgggagcccggggggctgggaatgacaggatgctcctgg

SEQ ID NO: 14625 - DNA, 576 bp, Homo sapiens
  source 1..576: mol_type = unassigned DNA
aagcacaggatgcagcccagcagtggtggcaccgtggagtggctgggcggaagagatcctggtccacgctgctgtctggagggcagggtcctcaggtgaccagagtccgtgcaggagcgagtgaggacagggctggggcaggcggcaggatgaggccgcccagagcaactcagtgagtgaatgagtgaaagcacgcacgccccatgctccagcggggccagagtgtgctgttgggttgtgcagcctgactctgaagaagctggtggtcttcaaggagctggagaaggagctgatctccgtggtgatcgctgtcaagatgcagggctccaaacgaatcctgcggtcccatgagattgtgctgccccccagtggacaagtggagacagacctggccctgaccttctccttgcagtatcctcacttcttgaagagggaaggcaacaagcttcagatcatgctgcagcgcagaaagcgctacaagaacagaaccatcctgggctacaagacgctggccgcgggctccatcagcatggctgaggtgatgcaacacccgtctgaaggtggccaggtgctgag

SEQ ID NO: 14626 - DNA, 765 bp, Homo sapiens
  source 1..765: mol_type = unassigned DNA
cagtatcctcacttcttgaagagggaaggcaacaagcttcagatcatgctgcagcgcagaaagcgctacaagaacagaaccatcctgggctacaagacgctggccgcgggctccatcagcatggctgaggtgatgcaacacccgtctgaaggtggccaggtgctgagcctctgcagcagcatcaaggaggcccccgtcaaggcggccgagatctggatcgcctccctgtccagccagcccattgaccacgaagacagcaccatgcaggccggccccaaggccaagtccacggataactactccgaggaggagtatgagagcttctcctccgagcaggaggccagtgacgacgccgtgcaggggcaggacttggacgaggacgactttgacgtggggaagccgaagaagcagcggagatcgattgtaagaacgacgtccatgaccaggcaacagaacttcaagcagaaagtggtagcgctgctgcggaggttcaaagtgtccgacgaggtgagtgcgccgcgccttctgctcgcggcccccacgcctgcaacagcacctggtcgggaggaggcctctggggtctgtctccgggccacctctggttctgccgctcaccgtctgcacggccccgccagcatcgcacagtctgcgaggcgcagtgacagtggcactgcctcccgggctccaggtcacccgctgggtctctgctgaagtagaagtcgtgaataccctggaagtcggaaagtcattttcagggggatgtaa

SEQ ID NO: 14627 - DNA, 3453 bp, Homo sapiens
  source 1..3453: mol_type = unassigned DNA
gaggaggagtatgagagcttctcctccgagcaggaggccagtgacgacgccgtgcaggggcaggacttggacgaggacgactttgacgtggggaagccgaagaagcagcggagatcgattgtaagaacgacgtccatgaccaggcaacagaacttcaagcagaaagtggtagcgctgctgcggaggttcaaagtgtccgacgaggtcctggactcggagcaggaccctgcggagcacatccccgaggcagaggaggacctggacctcctgtatgacaccctggacatggagcaccccagcgacagcggccccgacatggaggatgacgacagcgtcctcagcacccccaagccgaagctgcggccatactttgaaggcctgtcgcactcgagctcgcagacggagattgggagcatccacagcgcccgcagccacaaggagcccccaagcccggctgacgtgcccgagaagacgcggtccctgggaggcaggcagccgagcgacagtgtctctgacacggtggccctcggtgtgccaggcccgagggagcaccctggacagcctgaggacagccccgaggctgaggcctccaccctggatgtgttcacggagaggctgccgcccagcgggaggatcaccaagacagagtcccttgtcatcccctccaccaggtccgaggggaagcaggctggccgacggggccggagcacatccttgaaggagcggcaggcagcacggccccagaatgagcgggccaacagcctggacaacgagcgctgcccggacgcccggagccagctacagatccccaggaagactgtgtatgaccagctcaaccacatcctcatctccgatgaccagcttcccgaaaacatcatccttgtcaacacctcggactggcaggggcagttcctctccgacgtcctgcagaggcacacgctccccgtggtgtgcacgtgctctcctgcggacgtccaggcggccttcagcaccatcgtctcacggatacagagatactgcaactgcaattcccagcccccgacccccgtgaagatcgccgtggcgggagcgcagcattacctcagtgccatcctgcggctctttgtggagcagctgtcccacaagacacccgactggctcggctacatgcgcttcctggtcatcccactgggtgagcaccacgccgtccacctgggcctgggcacagatgccacgggcagtgtggcgtggcatggagtggtgtggcgtggcgtggcgtgttgtgtggcgtggcgtggcgcggtgtgtcgtggtgtggcgcggtgtggcatggcgtggtgtccctgcttgctacacatttgttgtttttaaatgtttgtttgatacagtaacactttgttaattttaattatatgcaagataacttgattgccctaaaacagccatttgggtcaagataaagccatcgccctctgaaggggcctgagctgggtgtctcctccatcagtcgctgtgataactctatgccagtttcgatttccaaagtcagaagtgcaaagcagggctcgttattaatcctctcaaatcgtccaggtcctgtgtcgtcgaactccattacttctttaggtccatacgatgtgtcttaccacgaaacaaacccacccagccttaatctgttgaccagcagcaaggcctggaggcgacacctctcccgtgtggccctcacgatgccgacgtcagagccctgagccagccgaggcctctgcacggtcacatgtgccctgctgggccttcctcagtggcactcagggctctgggacctcagctcagggctggagctccttcagcggggccacaggcatccaccagggaggggcagtggtggctttctctttcggtggcaggaaagtgggcttgtctggaaggcagcagcacaggcctggggtcgggtggcccagcttttgtgccgcggtgggagccttgcagctccgagtcccccgtggtgacaccagccccacccctggcatgcaggctcccaccccgtggccaggtacctaggctccgtggactaccgctacaacaacttcttccaggacctggcctggagagacctgttcaacaagctggaggcccagagtgcggtacaggacacgccagacattgtgtcacgcatcacgcagtacatcgcaggggccaactgtgcccaccagctccccatcgcagaggccatgctgacctacaagcagaagagccctgacgaagagtcctcccaaaagttcattccctttgtcggggttgtgaaggttggaattgtggagccatcctcggccacatcaggcgactcggacgacgcggccccctcgggctctggcacgctctcctccaccccgccgtccgcatctcctgcggccaaggaggcctcacccaccccgccctcctccccgtcggtgagcggaggcctgtcctcccccagccagggtgtcggcgccgagctgatggggctgcaggtggactactggacggcagcacagcctgcggacaggaagagggacgccgagaagaaggacctgcctgtcaccaaaaacacgctcaagtgcactttccggtccctccaggtcagcaggctgcccagcagcggcgaggctgcagccacgcccaccatgtccatgaccgtggtcaccaaggagaagaacaagaaggtgatgtttctgcccaagaaagcgaaggacaaggacgtggagtctaagagccagtgcattgagggcatcagccggctcatctgcactgccaggcagcagcagaacatgctgcgggtcctcatcgacggcgtggagtgcagcgacgtcaagttcttccagctggccgcgcagtggtcctcgcacgtgaagcacttccccatctgcatcttcggacactccaaggccaccttctagccccacccaccagggggcccacctcctgccccatgctgtgaggggcccagctgcatttctgttaacatttcagtttactacagagacagacgcttaaaacacaaagagaaacagtcttaagtatgaatgtgctcacaacgtggaaactaacgggggagctcctgccaggagccgaataactgctctgcttattaacccgaacgttcggcccggggctgggaagccagaaggacgatgctgagccatggatcgcggaaggcgtcctctggcctcaggagccacccagagcctcacaggctgagttcttgcctctgtgtcctgtccttcctggaagtcaggactctgcttcctcagggagcccggggaaggcggagctcagtggccacaggccgagggccatggggccgctcagtcccgttggggttgtcctgagttgagcctgggggggccgtcctgcccgcctaagagatgcccccagcaccgcacactcgtggttcccaataaactcctgcctgcggcggaggttttatagcagcagata

SEQ ID NO: 14628 - DNA, 1157 bp, Homo sapiens
  source 1..1157: mol_type = unassigned DNA
aagcaggctggccgacggggccggagcacatccttgaaggagcggcaggcagcacggccccagaatgagcgggccaacagcctggacaacgagcgctgcccggacgcccggagccagctacaggtgcagctgcagatccccaggaagactgtgtatgaccagctcaaccacatcctcatctccgatgaccagcttcccgaaaacatcatccttgtcaacacctcggactggcaggggcagttcctctccgacgtcctgcagaggcacacgctccccgtggtgtgcacgtgctctcctgcggacgtccaggcggccttcagcaccatcgtctcacggatacagagatactgcaactgcaattcccagcccccgacccccgtgaagatcgccgtggcgggagcgcagcattacctcagtgccatcctgcggctctttgtggagcagctgtcccacaagacacccgactggctcggctacatgcgcttcctggtcatcccactgggctcccaccccgtggccaggtacctaggctccgtggactaccgctacaacaacttcttccaggacctggcctggagagacctgttcaacaagctggaggcccagagtgcggtacaggacacgccagacattgtgtcacgcatcacgcagtacatcgcaggggccaactgtgcccaccagctccccatcgcagaggccatgctgacctacaagcagaagagccctgacgaagagtcctcccaaaagttcattccctttgtcggggttgtgaaggttggaattgtggagccatcctcggccacatcaggtaaccccgtcccaccctgaggccttgtgagtggcccgtgggtgggctgcaggagcacggtcattcgagtcctgcagaccagatcaacctttcagggcctgagagccgccacgtcccagtcttgctgtggtgcttctgtcctgcggggggttcatcctccaaggactgctgtcacaaagccccacatcaaggctggcagggttgtcttccaaaaaccgaggagaatccgagaccctcccgtctctcacaggccactggggactcccaccctgcccacccccaggagctgcctggcctggccacatcctggtccggagggcctggtggcacccgggcagagcagcaggtg

SEQ ID NO: 14629 - DNA, 1876 bp, Homo sapiens
  source 1..1876: mol_type = unassigned DNA
ctggagtggtggcctcctggcctgtccttggaagcctgggctgaggccatgactgtgtggtccctcagcctgggcacgtttgggcatgtgggggtcctgggcttgggcagctccagggcagttgtggcatgagcggccacaggcacggagccccctgggctcacactggcatccttggatggaggacggctcccctgaggcgtctgtcccctctccgtcccacctgcctctggattgcagctgcaactgcaattcccagcccccgacccccgtgaagatcgccgtggcgggagcgcagcattacctcagtgccatcctgcggctctttgtggagcagctgtcccacaagacacccgactggctcggctacatgcgcttcctggtcatcccactgggctcccaccccgtggccaggtacctaggctccgtggactaccgctacaacaacttcttccaggacctggcctggagagacctgttcaacaagctggaggcccagagtgcggtacaggacacgccagacattgtgtcacgcatcacgcagtacatcgcaggggccaactgtgcccaccagctccccatcgcagaggccatgctgacctacaagcagaagagccctgacgaagagtcctcccaaaagttcattccctttgtcggggttgtgaaggttggaattgtggagccatcctcggccacatcaggcgactcggacgacgcggccccctcgggctctggcacgctctcctccaccccgccgtccgcatctcctgcggccaaggaggcctcacccaccccgccctcctccccgtcggtgagcggaggcctgtcctcccccagccagggtgtcggcgccgagctgatggggctgcaggtggactactggacggcagcacagcctgcggacaggaagagggacgccgagaagaaggacctgcctgtcaccaaaaacacgctcaagtgcactttccggtccctccaggtcagcaggctgcccagcagcggcgaggctgcagccacgcccaccatgtccatgaccgtggtcaccaaggagaagaacaagaaggtgatgtttctgcccaagaaagcgaaggacaaggacgtggagtctaagagccagtgcattgagggcatcagccggctcatctgcactgccaggcagcagcagaacatgctgcgggtcctcatcgacggcgtggagtgcagcgacgtcaagttcttccagctggccgcgcagtggtcctcgcacgtgaagcacttccccatctgcatcttcggacactccaaggccaccttctagccccacccaccagggggcccacctcctgccccatgctgtgaggggcccagctgcatttctgttaacatttcagtttactacagagacagacgcttaaaacacaaagagaaacagtcttaagtatgaatgtgctcacaacgtggaaactaacgggggagctcctgccaggagccgaataactgctctgcttattaacccgaacgttcggcccggggctgggaagccagaaggacgatgctgagccatggatcgcggaaggcgtcctctggcctcaggagccacccagagcctcacaggctgagttcttgcctctgtgtcctgtccttcctggaagtcaggactctgcttcctcagggagcccggggaaggcggagctcagtggccacaggccgagggccatggggccgctcagtcccgttggggttgtcctgagttgagcctgggggggccgtcctgcccgcctaagagatgcccccagcaccgcacactcgtggttcccaataaactcctgcctgcggcggaggttttatagcagcagatatttttaatgcttttcaatacatgttctaatgtagctgc

SEQ ID NO: 14630 - DNA, 1925 bp, Homo sapiens
  source 1..1925: mol_type = unassigned DNA
gtccctgagggccaccctgctggcctggccattctcgtcctgcccccggcgctccaggggcaacaggtgctcctctgcactgtgtgtgcacagtctccgcctgtaagacagccacttgccggcatcagactctgcagtttggggaaatgagacagaagaaacagctgagggagctgcccagagagaaggcaccagttgctgatgcggtctggctgaggaagctgggcggggaggcacctctgtccctacgtgcaggccacggggggccttgaggccaggggagaggaggaaagaggagagccagacccagcccaccactcaggataggccctgccctctggatctttcctggggcccagaaggagatgccctcacctcaccctagctgccggcggggcctcatgctgtgctggccccttgtcttgtgggagagctccctgggcccaagcccaggctgcagtgggcacagtcagcaggagcctgtgcgagctggaccacaggacagccctgcttgagctgcacacgtcggaggggaagacagacgggtcccctcagcggccccgcggctcctgtcctccacccttggcatcttcgtgtggacgggctgtgaccagacttccaggagaggctgctgttacctgccagatgttgtatggggccaagtccaggcaaaacctccactgcccgctgagtacatcagctcacgcggggcacggcctggggtgtgctgggcctgcctgcaggctgtgcgtggggtgttctggtagaacatggaggcccactgcagccaaagcctggcctcttatgtgggcatggacgttacccagatagtctggagaaaacttctgcaccctggctttggtgctgctgattaccagagagggcccaggctcttcctgggagtcccagggcactggcagctgccctaaccccagcagagcaggggtgcccagcttggtggggaagtggaaatgcaagccggacagggctgagctggctgtgtgggcgtcgggcacctaggatggcagagtgaatccctccgtggagctgtgccctctggcctgtcctcctgaccatgggtgcacagagacccctttgtccttccagcatgtcagcatgtcagaaggggcccaggcgttggtcctgggggccaggccagggctggcagtggttggagatgggtggggccgggacacacagggcagggctgtccggcagggccatccggcagggccgcggccccagggctgcgccaggttctcaggccaagagggagctgtgcccaccaggcggggctgtgccctgaggagagcttaactgtctgtttccttgctcttagccctgacgaagagtcctcccaaaagttcattccctttgtcggggttgtgaaggttggaattgtggagccatcctcggccacatcaggtaaccccgtcccaccctgaggccttgtgagtggcccgtgggtgggctgcaggagcacggtcattcgagtcctgcagaccagatcaacctttcagggcctgagagccgccacgtcccagtcttgctgtggtgcttctgtcctgcggggggttcatcctccaaggactgctgtcacaaagccccacatcaaggctggcagggttgtcttccaaaaaccgaggagaatccgagaccctcccgtctctcacaggccactggggactcccaccctgcccacccccaggagctgcctggcctggccacatcctggtccggagggcctggtggcacccgggcagagcagcaggtgggctcagcctgccctgtgactcctccccaaaggcgactcggacgacgcggccccctcgggctctggcacgctctcctccaccccgccgtccgcatctcctgcggccaaggaggcctcacccaccccgccctcctccccgtcggtgagcgga

SEQ ID NO: 14631 - DNA, 1621 bp, Homo sapiens
  source 1..1621: mol_type = unassigned DNA
ggaagcagagacaggtcggtggggcgaggcctcagaacacccaggaggcttggccccacgtctcaggagaggagagactgcctgcccgggttggggagggcgcctctgtcctttaggagcccaaggccccgggagcttcccagtgctcacttgggctgcagcctgcagtgtgtgggtttcacttcctgccctgcccagggttagggctgcttctgccagccaggccatctccctgccagccctgggtctccacagcctgtttcctgccatcttttcgctctgttgtgtggcctccctcccgccaggtgtctgctgtgagacagacccacagggcctggcagacaggttgcccaggcagcggaagggtctctgggcctcggtttccccactggtggaacagaggcctttttgtgcaccgtgcagtggttgggtctgctgagggctctggggcgatggctggccctctgggagggtggaattcgtcttgaacagcggctgcccaaagagctttctccggtgacaagagtacactgtgctcgggcacacaggccttcccatgcaaccaaggccctgcggtgtcactgggattcacggtagatctacgtagccgcctgtggctcgtggctgccaggtccggggcctatccccgtcggcccgccaaggtccctctcaccagcgtcctgtttttactgcacacatagtttgcagctgccctgagggccgactttagagagagcagtccctcctgctgaggccacgcaccctgagcactgtctgtccccacatggctgctctgagctcagctctgctccacagatggggagagaagggcaggagggagctggcaccacctggccgctccagcatcatgggagtggtggccacggtggggaggcgggagccccactgggagggcgctgggctagctgaattgcacggctttcaccagccagtgcctgttgttttctaggttgtgaaggttggaattgtggagccatcctcggccacatcaggccactggggactcccaccctgcccacccccaggagctgcctggcctggccacatcctggtccggagggcctggtggcacccgggcagagcagcaggtgggctcagcctgccctgtgactcctccccaaaggcgactcggacgacgcggccccctcgggctctggcacgctctcctccaccccgccgtccgcatctcctgcggccaaggaggcctcacccaccccgccctcctccccgtcggtgagcggaggcctgtcctcccccagccagggtgtcggcgccgagctgatggggctgcaggtggactactggacggcagcacagcctgcggacaggaagagggacgccgagaagaaggacctgcctgtcaccaaaaacacgctcaagtgcactttccggtccctccaggtcagcaggctgcccagcagcggcgaggctgcagccacgcccaccatgtccatgaccgtggtcaccaaggagaagaacaagaaggtgatgtttctgcccaagaaagcgaaggacaaggacgtggagtctaagagccagtgcattgagggcatcagccggctcatctgcactgccaggcagcagcagaacatgctgcggg

SEQ ID NO: 14632 - DNA, 697 bp, Homo sapiens
  source 1..697: mol_type = unassigned DNA
caaaaaccgaggagaatccgagaccctcccgtctctcacaggccactggggactcccaccctgcccacccccaggagctgcctggcctggccacatcctggtccggagggcctggtggcacccgggcagagcagcaggtgggctcagcctgccctgtgactcctccccaaaggcgactcggacgacgcggccccctcgggctctggcacgctctcctccaccccgccgtccgcatctcctgcggccaaggaggcctcacccaccccgccctcctccccgtcggtgagcggaggcctgtcctcccccaggtcagcaggctgcccagcagcggcgaggctgcagccacgcccaccatgtccatgaccgtggtcaccaaggagaagaacaagaaggtgatgtttctgcccaagaaagcgaaggacaaggacgtggagtctaagagccagtgcattgagggcatcagccggctcatctgcactgccaggcagcagcagaacatgctgcgggtcctcatcgacggcgtggagtgcagcgacgtcaagttcttccagctggccgcgcagtggtcctcgcacgtgaagcacttccccatctgcatcttcggacactccaaggccaccttctagccccacccaccagggggcccacctcctgccccatgctgtgaggggcccagctgcatttctgttaacatttc

SEQ ID NO: 14633 - DNA, 1163 bp, Homo sapiens
  source 1..1163: mol_type = unassigned DNA
gttgtgctgggctgtctctcagctctgtacacagttggggcttttaaaaaacaagctgagggcagaaggtgcaagagacgtgagtctctagacggtcctcatgggatgagcttcgatagctgtgctgaggccccgctagcccgcccgggtctctccggagcagacctcactcaagtggaactaagccatggggggttgtgggccctgaggccaggcgtggtgctggtgctgcgtgcagggctcacaccagcagatacccccccgacccccctgcctctgtgtttccagccgccggctccttccaggctgcgcctgagggagctggttcgcacgggccctcacgactccaaggggcagcttggagagcaggtggacaggcctcccaggccgaggctctcctgtcgccagggtccctgtaatttaagcaggacccttgtgggggtgactgggcatgtgaacagctccacagagcatgctccaagcacccggccctcctctgctggcaagttggcacaggtgctggctgtcacctcctggcctgtcacagggacagtgatgtccccatcactaggcccaaagatgcaggtgtgaatgcctccctctgcctttcccagccagggtgtcggcgccgagctgatggggctgcaggtggactactggacggcagcacagcctgcggacaggaagagggacgccgagaagaaggacctgcctgtcaccaaaaacacgctcaagtgcactttccggtccctccaggtcagcaggctgcccagcagcggcgaggctgcagccacgcccaccatgtccatgaccgtggtcaccaaggagaagaacaagaaggtgatgtttctgcccaagaaagcgaaggacaaggacgtggagtctaagagccagtgcattgagggcatcagccggctcatctgcactgccaggcagcagcagaacatgctgcggggtgagcaccaccggccccggggtctgtagagtgggacgtaggtgagagcacagcaaggctgctttggagcccagcctaggagctgcgggtgtctcgctgtgacacgcacattccacgattcaaggtgcaagcacattcgatgaagccctcagtgaggctgacaaccttccaaatgctgagaaagaattttttttcaaccctttttgct

SEQ ID NO: 14634 - DNA, 557 bp, Homo sapiens
  source 1..557: mol_type = unassigned DNA
aggcagaaaggggcggtaggtggccgggccccgctgcctctcgcgcctcccggggcccgccacacacggtgccaacgggacgccgcggtcggccgcatgagcgcaaaagcagggcagcgaggtggaatgaatcttacttgttgaatatcttctggttactagttggattcatttgtgaaagaatcattttcccctgtgtggaagacacttagtggcatatttaaattataagtccacggatcaaaaagctttttgatttcccaaaggagggacataccactatatcagataagcttgacattacagccaagatggtgctgtcccagagacaacgagatgaactaaatcgagctatagcagattatcttcgttcaaatggctatgaagaggcatattcagtttttaaaaaggaagctgaattagatgtgaatgaagaattagataaaaagtatgctggtcttttggaaaaaaaatggacatctgttattagattacaaaagaaggttatggaattagaatcaaagctaaatgaagcaaaagaagaatttacgtcaggt

SEQ ID NO: 14635 - DNA, 5497 bp, Homo sapiens
  source 1..5497: mol_type = unassigned DNA
gcgagaaggagaaggaggggagcgctcgggcgcgagcgagagaaaccgcgagcgccgagcttggactcgagccccggaacggctgaggagcccgcccgctcccctcccctccccctccccgggcccgggcccagcgcgccatcctcccccctccttccctccctccctccttcctccctcccctctccctccccctcccccgccggtggatgggagtgaaggacggaagaggccctgcggaggcggcggtgcagcgctccggtggaatgaatcttacttgttgaatatcttctggttactagttggattcatttgtgaaagaatcattttcccctgtgtggaagacacttagtggcatatttaaattataagtccacggatcaaaaagctttttgatttcccaaaggagggacataccactatatcagataagcttgacattacagccaagatggtgctgtcccagagacaacgagatgaactaaatcgagctatagcagattatcttcgttcaaatggctatgaagaggcatattcagtttttaaaaaggaagctgaattagatgtgaatgaagaattagataaaaagtatgctggtcttttggaaaaaaaatggacatctgttattagattacaaaagaaggttatggaattagaatcaaagctaaatgaagcaaaagaagaatttacgtcaggtggacctcttggtcagaaacgagacccaaaagaatggattccccgtccgccagaaaaatatgcattgagtggtcacaggagtccagtcactcgagtcattttccatcctgtgttcagtgttatggtctctgcttcagaggatgctacaattaaggtgtgggattatgagactggagattttgaacgaactcttaaaggacatacagactctgtacaggacatttcattcgaccacagcggcaagcttctggcttcctgttctgcagatatgaccattaaactatgggattttcagggctttgaatgcatcagaaccatgcacggccatgaccacaatgtttcttcagtagccatcatgcccaatggagatcatatagtgtctgcctcaagggataaaactataaaaatgtgggaagtgcaaactggctactgtgtgaagacattcacaggacacagagaatgggtacgtatggtacggccaaatcaagatggcactctgatagccagctgttccaatgaccagactgtgcgtgtatgggtcgtagcaacaaaggaatgcaaggctgagctccgagagcatgagcatgtggtagaatgcatttcctgggctccagaaagctcatattcctccatctctgaagcaacaggatctgagactaaaaaaagtggtaaacctgggccattcttgctgtctggatccagagacaagactattaagatgtgggatgtcagtactggcatgtgccttatgaccctcgtgggtcatgataactgggtacgtggagttctgttccattctggggggaagtttattttgagttgtgctgatgacaagaccctacgcgtatgggattacaagaacaagcgatgcatgaagaccctcaatgcgcatgaacactttgttacctccttggatttccacaagacggcaccctatgtcgtcactggcagcgtagatcaaacagtaaaagtgtgggagtgccgttgattgtgtctccttcggcccctcctccctcttttcctctggatgcactctgatgataccatggttaccccattgagctctgtttaaataaatattgtcctttcatgtaaattattctggatgtagattgagcttattaaatgttacacacaaagtattcatgcatggtgaatccaaattgtatactgtaaatttacatacgttgtctagaagtaccatagggtttaaaaacctgggctggcattggtcacaccaggcctaagaaggcagaagttgaatcaattgaactagggcactaaactgaatagttgacagtgtcattttatgttggattattaattcctgtttttctttctgctatctgttggtgcctgacttgatggcctcatttggggaaaagtggtggttattagggctttttctgaaatgtgtatctatgtaacatcacttaagtgtgcttaataaatcttctgtaaggattttagatgataaggctacaattcagaatcttctgaaccatctatgtaatgaatggggattatacattggaatttttgtcatgacacatttgccaaatcagtaggatatatttgttttggcagcctatcacgcagaggctagtggtatatttatgtaagaaaatgactgtaaatctcaagaaaaatctcagcagctaatagcaactcatttatttcattttggtcttaatgctttgtaaacaggtcaaaaaatactgtcatactctaagcttctattttccacactggacatacttctagttgtattctccatactattagactgtgtagtgatgtgacttccaagtagaatttaatctccccattgagtgtgtcatggtacaaatcactattcgtttttggtgttttttagggatgtgcaatgtgcattacataatgacagaaatactgagaaggttctgtgtgcccatttgaaaggagtgggaggaatacagcagtttgtttttcaacatgaatctgatattgatttaaactgtgtttcacttacaagttttaaaaaaatgacagggtttaatggagcgtgcataaaaatgtactgttttcaccttttgtttatatgtaaatgtttgtaagtatatgggcctatctgtaagtggataagtctgtatgtgtgtatcatacacatcaacctccatgtccttagtcctgggtttttgaaaaagtgctaaaacggacaagtagaataaatgttgctgtggaatgccatgctttagaacaaaccctttttgatcttaatgcttctgaaaactaggtctgactctggggatttttttccagccgaaggaaaatcacttccgttatgtccccctctaatttagccgctcgacattttacacaacccggatatgttgtatattttgacccaaagttacaggtaggtttaagagaatttttagccatgacttttggagcactattccattgtcagttattaataaagaattccattgcttagctaaccaacaggttttttttgtttccaagagagttatttgaaaagttaacagaacaatgagataacagtgacagtttaacaaagataaaattctgaactgcgttttattcatttgtgtactatgtgattttttaaatgtcccctttagtatttaatggaaaattggttcctgcaaaagacaaagggtgagagttagcgtcctgtagatacacacagagactaggccgtatattaactagaagcagctttatgtctagcttgtgtctttttgtttgtttgcttgtttgtttttagattcctgagagatgtctctggaagggaaagttttgagaactaatggctatttttgaggacaaaaattacatcttaagctaattccttaaatacatacagtaggtgaattttcaggacaatattgcctcacaaccctgcttacattgaaaagtctttttcccttagctcttctgactggatttttctacaaaaactatggaaaatatctttgttcttgtttgctgctattttctgtcctattttgagaaatataaatacatagaaatggtgcatcttaacatttgtttgtacatgtataaatgtcttgtattttaattcatttttagcatgaattgtttaagggtaagccacaacatctagaaatcactcatagatattgaacaataaaggagaatggtaccgatgcaggaggaagcaagcgtgtcttcccctgcagcacacagcgacttgcgttgacaaaggaggaggaaacgattactctgtaaacaaagttatccttacttgggagattgccacagcctgctgctgagttgagttaccagacatcctccatgtgagaagcagcgaacattgaatctcagggatggcccacaactgggtccacatgtaatgagccctgtttaataacgaaggggtgggggagagcagtccgtctacaacctggaatcagatttgcaaaatttcctgcactgctgtctgacactgtcctgttgatgccctttctgactgtgttctctgttttctctgtctgctgtctaaccctgtgccttgcctgggataaggacaatgatgaggttactggtttggattgtaagtagaggacttttattaattggtttagaggttcactgctgctttgtcactttctcaatcaaattggccacttaagaaataaagagctggtagaattgcatcctcagatgattattgactgtgtgtgtgtgtgaaaacagacattccagtgccacccaaatatatatctgtaacgtgcccaagaaatcctagctgcgctcttgagagtgcatgccatggagactggtttagacaccgcgtggagcctagttgcctgttgtcacggcatcttgcactttaggagactaagaccgtcctggttcgtctgtgtgtggtgtgaccaatggtgtgcccagagcactactctcaaaatcactagtgttagcaagtcgtcccgggctggggagcgttcgccgtagtctttggaagctttggctttagatttaccaagccccgcctccccgctgccagtgccctgctctcccgttcgcctctttctgtttctgtgtgaactttcccggtaatatcactcgttaaataggttttctttaaacttaattaaagaaaaactatttaaaggtaaaggatattttgttgacatcggtggctcgatcatccttaagcaactgaagttaaaattgttgaaggaaaaggcacttaaattggttactttcatgtccagctgtatataagtccagtgtgttcatctagatgacgcaaagaatctcctggtagagaagcgacatgtaaaaaactggtggaaaaaggttttggattttttttccagtggggtggggggagggcaagctggatttacaggtcacggctggactgaatgggcctttttatcttcccactgtatcatggaagtagctgcttgcttgtactgtccatccttcaggcatccctaaagctcactctgaagatgttagagacaaacacaaactcttcgagttaaagttgatcctgacactgacatgaaggcaagccttgatttcgtatgaacgttgctgaagtggtaattgaggaaaacagttccccagattgttaagagttcactgaagatattgacacaattttaaaaaatcagtaaaggaatgtatataatattgctctcgtgttttacagtaagatttgttgctctcagactgtgtaaaacaaaatttattcatgttttctgcatattaaaaaatcttattgtaccaactggtaaactattaaatgcctataaaacta

SEQ ID NO: 14636 - DNA, 694 bp, Homo sapiens
  source 1..694: mol_type = unassigned DNA
agccccggaacggctgaggagcccgcccgctcccctcccctccccctccccgggcccgggcccagcgcgccatcctcccccctccttccctccctccctccttcctccctcccctctccctccccctcccccgccggtggatgggagtgaaggacggaagaggccctgcggaggcggcggtgcagcgctccgccagacagccgcccctccgcgaagctgcagacatcatccatggtccacttgctgacgtcctcaagggctggggcctcctccccatccacagagagtccccctgtggcgctgggccaggttctgcttctgcaggagctcctgatgccgggcgagcatctccactcgggcaggggcaggaatccgtagcctgggatctggcacagaggtggaatgaatcttacttgttgaatatcttctggttactagttggattcatttgtgaaagaatcattttcccctgtgtggaagacacttagtggcatatttaaattataagtccacggatcaaaaagctttttgatttcccaaaggagggacataccactatatcagataagcttgacattacagccaagatggtgctgtcccagagacaacgagatgaactaatgaagaattagataaaaagtatgctggtcttttggaaaaaaaatggacatctgttattagattacaaaagaag

SEQ ID NO: 14637 - DNA, 1361 bp, Homo sapiens
  source 1..1361: mol_type = unassigned DNA
gggagtgaaggacggaagaggccctgcggaggcggcggtgcagcgctccggtggaatgaatcttacttgttgaatatcttctggttactagttggattcatttgtgaaagaatcattttcccctgtgtggaagacacttagtggcatatttaaattataagtccacggatcaaaaagctttttgatttcccaaaggagggacataccactatatcagataagcttgacattacagccaagatggtgctgtcccagagacaacgagatgaactgttatggaattagaatcaaagctaaatgaagcaaaagaagaatttacgtcaggtggacctcttggtcagaaacgagacccaaaagaatggattccccgtccgccagaaaaatatgcattgagtggtcacaggagtccagtcactcgagtcattttccatcctgtgttcagtgttatggtctctgcttcagaggatgctacaattaagatatgaccattaaactatgggattttcagggctttgaatgcatcagaaccatgcacggccatgaccacaatgtttcttcagtagccatcatgcccaatggagatcatatagtgtctgcctcaagggataaaactataaaaatgtgggaagtgcaaactggctactgtgtgaagacattcacaggacacagagaatggattcctgagagatgtctctggaagggaaagttttgagaactaatggctatttttgaggacaaaaattacatcttaagctaattccttaaatacatacacatgaattgtttaagggtaagccacaacatctagaaatcactcatagatattgaacaataaaggagaatggtaccgatgcaggaggaagcaagcgtgtcttcccctgcagcacacagcgacttgcgttgacaaaggaggaggaaacgattactctgtaaacaaagttatccttacttgggagattgccacagcctgctgctgagttgagttaccagacatcctccatgtgagaagcagcgaacattgaatctcagggatggcccacaactgggtccacatgtaatgagccctgtttaataacgaaggggtgggggagagcagtccgtctacaacctggaatcagatttgcaaaatttcctgcactgctgtctgacactgtcctgttgatgccctttctgactgtgttctctgttttctctgtctgctgtctaaccctgtgccttgcctgggataaggacaatgatgaggttactggtttggattgtaagtagaggacttttattaattggtttagaggttcactgctgctttgtcactttctcaatcaaattggccacttaagaaataaagagctggtagaattgca

SEQ ID NO: 14638 - DNA, 661 bp, Homo sapiens
  source 1..661: mol_type = unassigned DNA
tgaaggacggaagaggccctgcggaggcggcggtgcagcgctccgagacagagtttctctctggcgcccagcctggagtatagtgccacaatcatggttcactgcagccttgacctcctgggctcaagcaaccctcctgcctctgccgcctgagtagctgggactgactataggtggaatgaatcttacttgttgaatatcttctggttactagttggattcatttgtgaaagaatcattttcccctgtgtggaagacacttagtggcatatttaaattataagtccacggatcaaaaagctttttgatttcccaaaggagggacataccactatatcagataagcttgacattacagccaagatggtgctgtcccagagacaacgagatgaactaatgaagaattagataaaaagtatgctggtcttttggaaaaaaaatggacatctgttattagattacaaaagaaggttatggaattagaatcaaagctaaatgaagcaaaagaagaatttacgtcaggtggacctcttggtcagaaacgagacccaaaagaatggattccccgtccgccagaaaaatatgcattgagtggtcacaggagtccagtcactcgagtcattttccatcctgtgttcagtgttatggtctctgcttcaga

SEQ ID NO: 14639 - DNA, 589 bp, Homo sapiens
  source 1..589: mol_type = unassigned DNA
acggaagaggccctgcggaggcggcggtgcagcgctccggtggaatgaatcttacttgttgaatatcttctggttactagttggattcatttgtgaaagaatcattttcccctgtgtggaagacacttagtggcatatttaaattataagtccacggatcaaaaagctttttgatttcccaaaggagggacataccactatatcagataagcttgacattacagccaagatggtgctgtcccagagacaacgagatgaactgtaagtttctttgttttgtgctttaaaaaaaatctccctcatgagagagaaagtagtaaattaaaatacagctttgggaggtctcttctaagattaaaactatttttaccagtgttccaatattagtttaggcagtttggtctgattttaaaacagtcttattatgatatagcattatttttaaaatttatttattctttctgagaaggagtttttcgcttttgtcacccaggctggagtgcaatggcgccatctcggctcacttcaacctccgcctcccaggttcaagctattcttctgcctcagcctcccaagtagctgggattac

SEQ ID NO: 14640 - DNA, 662 bp, Homo sapiens
  source 1..662: mol_type = unassigned DNA
gtctcactctgttgcccaggctggagtgcagttgcagtgacccaagattgcaccacggtactccagcctgggtgacagagccagactccgtctgaaaacaaacaaaaaaccaaaatgcaacaaaaaaattggaaatatatatcattattagatagaagccatttaaagtccatacctaacttcttgtgtgggaaacttaatttttattatgttttctgtagactaaaaaaagtggtaaacctgggccattcttgctgtctggatccagagacaagactattaagatgtgggatgtcagtactggcatgtgccttatgaccctcgtgggtcatgataactgggtacgtggagttctgttccattctggggggaagtttattttgagttgtgctgatgacaagaccctacgcgtatgggattacaagaacaagcgatgcatgaagaccctcaatgcgcatgaacactttgttacctccttggatttccacaagacggcaccctatgtcgtcactggcagcgtagatcaaacagtaaaagtgtgggagtgccgttgattgtgtctccttcggcccctcctccctcttttcctctggatgcactctgatgataccatggttaccccattgagctctgtttaaataaatattgtcctttcatgtaaa

SEQ ID NO: 14641 - DNA, 570 bp, Homo sapiens
  source 1..570: mol_type = unassigned DNA
tatagcagattatcttcgttcaaatggctatgaagaggcatattcagtttttaaaaaggaagctgaattagatgtgaatgaagaattagataaaaagtatgctggtcttttggaaaaaaaatggacatctgttattagattacaaaagaaggttatggaattagaatcaaagctaaatgaagcaaaagaagaatttacgtcaggtggacctcttggtcagaaacgagacccaaaagaatggattccccgtccgccagaaaaatatgcattgagtggtcacaggagtccagtcactcgagtcattttccatcctgtgttcagtgttatggtctctgcttcagaggatgctacaattaaggtgtgggattatgagactggagattttgaacgaactcttaaaggacatacagactctgtacaggacatttcattcgaccacagcggcaagcttctggcttcctgttctgcagatatgaccattaaactatgggattttcagggctttgaatgcatcagaaccatgcacggtaaggggtagaggatagtgctttaacagtaatttctatcatg

SEQ ID NO: 14642 - DNA, 1277 bp, Homo sapiens
  source 1..1277: mol_type = unassigned DNA
actgcactccagcctgggcgacagagccacactctgtctcaaaaaaaaaaagcagacttaatagggtgaagaaaattaaaagatcctgaaaatgagggcctatgaagagggacaggaggtactctgaaacgtgtgatttggttctaaatcttaaaagacagaattggaataaaatatcattgtggctcctgagaggcatgctgccaggtgtgggattatgagactggagattttgaacgaactcttaaaggacatacagactctgtacaggacatttcattcgaccacagcggcaagcttctggcttcctgttctgcagatatgaccattaaactatgggattttcagggctttgaatgcatcagaaccatgcacggccatgaccacaatgtttcttcagtagccatcatgcccaatggagatcatatagtgtctgcctcaagggataaaactataaaaatgtgggaagtgcaaactggctactgtgtgaagacattcacaggacacagagaatgggtacgtatggtacggccaaatcaagatggcactctgatagccagctgttccaatgaccagactgtgcgtgtatgggtcgtagcaacaaaggaatgcaaggctgagctccgagagcatgagcatgtggtagaatgcatttcctgggctccagaaagctcatattcctccatctctgaagcaacaggatctgagactaaaaaaagtggtaaacctgggccattcttgctgtctggatccagagacaagactattaagatgtgggatgtcagtactggcatgtgccttatgaccctcgtgggtcatgataactgggtacgtggagttctgttccattctggggggaagtttattttgagttgtgctgatgacaagaccctacgcgtatgggattacaagaacaagcgatgcatgaagaccctcaatgcgcatgaacactttgttacctccttggatttccacaagacggcaccctatgtcgtcactggcagcgtagatcaaacagtaaaagtgtgggagtgccgttgattgtgtctccttcggcccctcctccctcttttcctctggatgcactctgatgataccatggttaccccattgagctctgtttaaataaatattgtcctttcatgtaaattattctggatgtagattgagcttattaaatgttacacacaaagtattcatgcatggtgaatccaaattgtatactgtaaatttacatacgttgtctagaagtaccatagggtttaaaaacctgggct

SEQ ID NO: 14643 - DNA, 1021 bp, Homo sapiens
  source 1..1021: mol_type = unassigned DNA
tctgcagatatgaccattaaactatgggattttcagggctttgaatgcatcagaaccatgcacggccatgaccacaatgtttcttcagtagccatcatgcccaatggagatcatatagtgtctgcctcaagggataaaactataaaaatgtgggaagtgcaaactggctactgtgtgaagacattcacaggacacagagaatgggtacgtatggtacggccaaatcaagatggcactctgatagccagctgttccaatgaccagactgtgcgtgtatgggtcgtagcaacaaaggaatgcaaggctgagctccgagagcatgagcatgtggtagaatgcatttcctgggctccagaaagctcatattcctccatctctgaagcaacaggatctgaggtgggtcatgataactgggtacgtggagttctgttccattctggggggaagtttattttgagttgtgctgatgacaagaccctacgcgtatgggattacaagaacaagcgatgcatgaagaccctcaatgcgcatgaacactttgttacctccttggatttccacaagacggcaccctatgtcgtcactggcagcgtagatcaaacagtaaaagtgtgggagtgccgttgattgtgtctccttcggcccctcctccctcttttcctctggatgcactctgatgataccatggttaccccattgagctctgtttaaataaatattgtcctttcatgtaaattattctggatgtagattgagcttattaaatgttacacacaaagtattcatgcatggtgaatccaaattgtatactgtaaatttacatacgttgtctagaagtaccatagggtttaaaaacctgggctggcattggtcacaccaggcctaagaaggcagaagttgaatcaattgaactagggcactaaactgaatagttgacagtgtcattttatgttggattattaattcctgtttttctttctgctatctgttggtgcctgacttgatggcctcatttggggaa

SEQ ID NO: 14644 - DNA, 1503 bp, Homo sapiens
  source 1..1503: mol_type = unassigned DNA
tctttgtgctggtatacctctgttaggctgaatttggttgtgcatagaattacacttgatttttgtagtacaaagttactagttttactcagattagtagagcatagcttttttccaatatggctggaaatacttttaagtgtgcatttagttttgaaagattttatttcttatacatattttatcttctagatgttgattttattagctccttaatgatatgtctgttagcttattgttcctactttaattaaccaggattgtacatttattctgtcgacttgcatctctaacttggtaccattctcttcatcccagtacatatttttatatcacttctgggaagtgtcctgatgattgtcattcacagtgtaagttattatttatattgacagctactgtgtgaagacattcacaggacacagagaatgggtacgtatggtacggccaaatcaagatggcactctgatagccagctgttccaatgaccagactgtgcgtgtatgggtcgtagcaacaaaggaatgcaaggctgagctccgagagcatgagcatgtggtagaatgcatttcctgggctccagaaagctcatattcctccatctctgaagcaacaggatctgagactaaaaaaagtggtaaacctgggccattcttgctgtctggatccagagacaagactattaagatgtgggatgtcagtactggcatgtgccttatgaccctcgtgggtcatgataactgggtacgtggagttctgttccattctggggggaagtttattttgagttgtgctgatgacaagaccctacgcgtatgggattacaagaacaagcgatgcatgaagaccctcaatgcgcatgaacactttgttacctccttggatttccacaagacggcaccctatgtcgtcactggcagcgtagatcaaacagtaaaagtgtgggagtgccgttgattgtgtctccttcggcccctcctccctcttttcctctggatgcactctgatgataccatggttaccccattgagctctgtttaaataaatattgtcctttcatgtaaattattctggatgtagattgagcttattaaatgttacacacaaagtattcatgcatggtgaatccaaattgtatactgtaaatttacatacgttgtctagaagtaccatagggtttaaaaacctgggctggcattggtcacaccaggcctaagaaggcagaagttgaatcaattgaactagggcactaaactgaatagttgacagtgtcattttatgttggattattaattcctgtttttctttctgctatctgttggtgcctgacttgatggcctcatttggggaaaagtggtggttattagggctttttctgaaatgtgtatctatgtaacatcacttaagtgtgcttaataaatcttctgtaaggattttagatgataaggctacaattcagaatcttctgaaccatctatgtaatgaatggggattatacattgg

SEQ ID NO: 14645 - DNA, 650 bp, Homo sapiens
  source 1..650: mol_type = unassigned DNA
gaatgcctgtatatccttcacttagttaccatttgttggttttccttcatgtatgtgtgtatattttgctgaaatcatttgagcgttctttgcagacatcgtaacactttacccccaagtattttagcatgaaccacctaagaacaaggatagtatataaataaccaaaataaaattattcacactcaagaaatttaccattgatagactacatattgagatttgttcttgttatttccataatgccctgcgggacttctttttaaccctcatccaggacccagtcagggatcgtacgttatattcactcctcatgtcttatgagttttcagtttcctttaatctagaatcccctagacttttattttcttctggtcttttgatgtttttggtatgtatagttttatcgtattatgaaatagatgctatttaaacattttgccttttactgagtcaaataacttttttgtttttaaggtgggtcatgataactgggtacgtggagttctgttccattctggggggaagtttattttgagttgtgctgatgacaagaccctacgcgtatgggattacaagaacaagcgatgcatgaagaccctcaatgcgcatgaacactttgttacctccttggatttccacaagacggc

SEQ ID NO: 14646 - DNA, 634 bp, Homo sapiens
  source 1..634: mol_type = unassigned DNA
aggattggttcaaggattaggcacaaatacggagcatttatgccatgcctggaacatcgtgttcagtaaatggatatggcgagactgtgtattgttagatttgagccctgctgtgccttagtcccagctactcaggaggctgaggctggaggattgcttgagcccaggagttctgggttacagtgtgctgtgctgatgggatgtttgcactaagtgcagcatcaatatggtgacctcctgggaacaggagactcccaggttgcctaaggaggggtgacctggcccaggctggagtgcagtggtgcagtcatggctcgctgcagcctcgacttcccagctcaaacagttctgcatcagtctcccgagtagctgggactacaggcacacactaccatgcccggctaattttttttttaattttgtattttgtagagagggggtctcactatgtttgttgtccaggcttacgtgtgagttttaaataaaccatttctttttctttcagatttccacaagacggcaccctatgtcgtcactggcagcgtagatcaaacagtaaaagtgtgggagtgccgttgattgtgtctccttcggcccctcctccctcttttcctctggatgcactctgatgata

SEQ ID NO: 14647 - DNA, 1702 bp, Homo sapiens
  source 1..1702: mol_type = unassigned DNA
cttactgggtggtatacgcatgcgacttcccggtggccatctttactgtgggctgaagcctgtgcgcttactcgcgcatgtgcaagccttccctcgctttcctcttccaagtagccttgcctagagcggagcctcccgcgccatttctgtgcgcctgcgtagcgtgaccctgcgcagcctgggaggcgggtcttagctccaggtgcgtacggcatctgacttgacgtggcccacaactgaaaggtctggggagaaggcgccgtgtccgggtgtggagaggggcgtcgtggaagcgagaagagtggcccgtccctctcctccccctttccctctttcggaaagtggtttctgcggggcccgggagcctcggagtaccgaacctcgatctccggggcggggtccttggtggggactgagcgccccctcccggggacgggcggtctggccgcggagtcccctgcgggagcgtgattggctggaaacggtcccgaacccccaggggagcccgatccctgggggaccctggcttcggactccagtatctgtcgtcgcagggtccctgccctagtggcctatgtcccttgctcggggccatggagacactgcggccagtacggcggcgcctctgtctgaagaaggggaagtgacctccggcctccaggctctggccgtggaggataccggaggcccctctgcctcggccggtaaggccgaggacgagggggaaggaggccgagaggagaccgagcgtgaggggtccgggggcgaggaggcgcagggagaagtccccagcgctgggggagaagagcctgccgaggaggactccgaggactggtgcgtgccctgcagcgacgaggaggtggagctgcctgcggatgggcagccctggatgcccccgccctccgaaatccagcggctctatgaactgctggctgcccacggtactctggagctgcaagccgagatcctgccccgccggcctcccacgccggaggcccagagcgaagaggagagatccgatgaggagccggaggccaaagaagaggaagaggaaaaaccacacatgcccacggaatttgattttgatgatgagccagtgacaccaaaggactccctgattgaccggagacgcaccccaggaagctcagcccggagccagaaacgggaggcccgcctggacaaggtgctgtcggacatgaagagacacaagaagctggaggagcagatccttcgtaccgggagggacctcttcagcctggactcggaggaccccagccccgccagccccccactccgatcctccgggagtagtctcttccctcggcagcggaaatactgattcccactgctcctgcctctagggtgcagtgtccgtacctgctggagcctgggccctccttccccagcccagacattgagaaacttgggaagaagagagaaacctcaagctcccaaacagcacgttgcgggaaagaggaagagagagtgtgagtgtgtgtgtgtgttttttctattgaacacctgtagagtgtgtgtgtgtgttttctattgaacacctatagagagagtgtgtgtgttttctattgaacatctatatagagagagtgtgtgagtgtgtgttttctattgaacacctattcagagacctggactgaattttctgagtctgaaataaaagatgcagagctatcatctcttaaaa

SEQ ID NO: 14648 - DNA, 4613 bp, Homo sapiens
  source 1..4613: mol_type = unassigned DNA
ggcgctgggagcgctgtagcagctgagaaggggctgaggcaccgccgcttcgctgacagccggccaccaggtttctgtctcccagtataatcatatccagccccatggctcttactggggcctctgaaatgtttatcaccaaatctgtgtctgcagttccaacctcttccctgagcatcaaagctgtatttccaactttcgctggatgcttctatctggaaatacactgtggtgaaatgcttccacctcttgctaaaatgaacactgaggaaaaatgaagaagactgacaagcaccagcgaaaagttgcagaatagaaatagccacactcctctggagtctttaattcatccacagccatcatataaaggttttggcatcatgtttgggaagaaaaagaaaaagattgaaatatctggcccgtccaactttgaacacagggttcatactgggtttgatccacaagagcagaagtttaccggccttccccagcagtggcacagcctgttagcagatacggccaacaggccaaagcctatggtggacccttcatgcatcacacccatccagctggctcctatgaagacaatcgttagaggaaacaaaccctgcaaggaaacctccatcaacggcctgctagaggattttgacaacatctcggtgactcgctccaactccctaaggaaagaaagcccacccaccccagatcagggagcctccagccacggtccaggccacgcggaagaaaatggcttcatcaccttctcccagtattccagcgaatccgatactactgctgactacacgaccgaaaagtacagggagaagagtctctatggagatgatctggatccgtattatagaggcagccacgcagccaagcaaaatgggcacgtaatgaaaatgaagcacggggaggcctactattctgaggtgaagcctttgaaatccgattttgccagattttctgccgattatcactcacatttggactcactgagcaaaccaagtgaatacagtgacctcaagtgggagtatcagagagcctcgagtagctcccctctggattattcattccaattcacaccttctagaactgcagggaccagcgggtgctccaaggagagcctggcgtacagtgaaagtgaatggggacccagcctggatgactatgacaggaggccaaagtcttcgtacctgaatcagacaagccctcagcccaccatgcggcagaggtccaggtcaggctcgggactccaggaaccgatgatgccatttggagcaagtgcatttaaaacccatccccaaggacactcctacaactcctacacctaccctcgcttgtccgagcccacaatgtgcattccaaaggtggattacgatcgagcacagatggtcctcagccctccactgtcagggtctgacacctaccccaggggccctgccaaactacctcaaagtcaaagcaaatcgggctattcctcaagcagtcaccagtacccgtctgggtaccacaaagccaccttgtaccatcacccctccctgcagagcagttcgcagtacatctccacggcttcctacctgagctccctcagcctctcatccagcacctacccgccgcccagctggggctcctcctccgaccagcagccctccagggtgtcccatgaacagtttcgggcggccctgcagctggtggtcagcccaggagaccccagggaatacttggccaactttatcaaaatcggggaaggctcaaccggcatcgtatgcatcgccaccgagaaacacacagggaaacaagttgcagtgaagaaaatggacctccggaagcaacagagacgagaactgcttttcaatgaggtcgtgatcatgcgggattaccaccatgacaatgtggttgacatgtacagcagctaccttgtcggcgatgagctctgggtggtcatggagtttctagaaggtggtgccttgacagacattgtgactcacaccagaatgaatgaagaacagatagctactgtctgcctgtcagttctgagagctctctcctaccttcataaccaaggagtgattcacagggacataaaaagtgactccatcctcctgacaagcgatggccggataaagttgtctgattttggtttctgtgctcaagtttccaaagaggtgccgaagaggaaatcattggttggcactccctactggatggcccctgaggtgatttctaggctaccttatgggacagaggtggacatctggtccctcgggatcatggtgatagaaatgattgatggcgagcccccctacttcaatgagcctcccctccaggcgatgcggaggatccgggacagtttacctccaagagtgaaggacctacacaaggtttcttcagtgctccggggattcctagacttgatgttggtgagggagccctctcagagagcaacagcccaggaactcctcggacatccattcttaaaactagcaggtccaccgtcttgcatcgtccccctcatgagacaatacaggcatcactgagcagaggattcgtgtaggtggcaaagctagatgaggacatgagaataattcaggagaacaaaaggaaacacagaacatgcaaaaggcctgtgcattctagaccagccaattggtgggacagcgtgatgaccggcagggttcaacagaccagggcatcttcttgtgtcttaaacaggcatctctccactgacagccggtgtggtcacttggagcacggctttaataagtcattattatatttttcagcccttcatccagcaaatcagaaggactcagtacaaactccgttatgatatatcctagccacatgcagggtaacatgtaggattttctatattgaaagaatacttttctggcaaaaaaaaaaaaaaaagaaagaaaggaaaacaaaaagcacttttttcttaatggtagcagtataatgtattttgcaacgaatttgtaatttttctgtacgatagttttgataatttatagtactttgatgtcatgtagccattgtatcagttgaagtaatacttgtttactagaggagtttgaacaaagcctttcctacttttttatccctttaagagaaccaatgattctttaggaactttgaatactgaatgactctcaatcaccgtcagctttagtaaaatctctttcttatcctaacaagtgtcttatttggtggaagaagaattaagagtgatggtgatggtgtgcacgtttcattaatccaaccaaaaataatgaaataaaatttgagccacagtataccactccttgggataaagttaaatatttttaaagatcacattttccatgaacgcctctagtagcaaaccattcttttgcacaccacaatgtttccctcagtgccctttctcaaatgggtacaatgttcccttgtggccaaatttccctcccagggagcaatttcagtgctaggatcattggattcagttcccaaaatagaatgtttcagtgagaccatgagaattccaggctcacaaagggagaggagagaacagggcaagacgtttggtttcatttgtcaccatttttaaaactctgtatgctagcacaccaaactcttgtctatatttacctttgtaccacagtattaatcgctattgttcatgtatcgtgctggaagtctgaactgactctagaggatgaattagcaagagggtattttaccaggtatgatctgacttcagttgtgcccatgttataatgtgtttccgacataggagagtcgtgctgctgtctagatcttcttgaatgttgataaaaatgaatgactactacaatacattttgtgttgcttgttggatgaatttgcatgttaactgtaggccaatatagatttgcctttaaaactctggaagagctacatagtcatcattagtttctattaattatgcatcagacaaaagccatttgttaccaaactgggaaaacagaggcttttcttaactatttcacatactgtaacaaatatgaatttaaatttgtgatagcgctctggttgctctaagcataattaagaatttttgtaattaataggttgctaattatttatcactgctaaaaaggaaaaaaggcataaaatgaccttctactgattagattttcagttttctttcaaactggaaatgcctccataaatatgatctatgattttgcttcataaaacagcaaatcaatgttttatgtaaaatattaaagcattaatataaatatgtgagaataaaaacaatctaaatccagaaaatggcagtcctaaatgttcatgagacagattgtattaatttaaccaggactatgtagaagtagaaagaaaagaaaaagaaaatcttttttaaaccagaataaacattaaaaactattgcagaaaatagtggattttggattccaaacattttcgacagtgtaatggaaatttttctgtaattttcttaccatcgggtattttttaaagtattcattgagtttaccaaaagttactgtagcttaaaaggttttgtgagcactaactattggcagaaactgcatttgcaaataaaaataaatgtttgccttttc

SEQ ID NO: 14649 - DNA, 4500 bp, Homo sapiens
  source 1..4500: mol_type = unassigned DNA
agttccccagcgtgcgcccggggagaccgggaacatggcgctgggagcgctgtagcagctgagaaggggctgaggcaccgccgcttcgctgacagccggccaccagaaatacactgtggtgaaatgcttccacctcttgctaaaatgaacactgaggaaaaatgaagaagactgacaagcaccagcgaaaagttgcagaatagaaatagccacactcctctggagtctttaattcatccacagccatcatataaaggttttggcatcatgtttgggaagaaaaagaaaaagattgaaatatctggcccgtccaactttgaacacagggttcatactgggtttgatccacaagagcagaagtttaccggccttccccagcagtggcacagcctgttagcagatacggccaacaggccaaagcctatggtggacccttcatgcatcacacccatccagctggctcctatgaagacaatcgttagaggaaacaaaccctgcaaggaaacctccatcaacggcctgctagaggattttgacaacatctcggtgactcgctccaactccctaaggaaagaaagcccacccaccccagatcagggagcctccagccacggtccaggccacgcggaagaaaatggcttcatcaccttctcccagtattccagcgaatccgatactactgctgactacacgaccgaaaagtacagggagaagagtctctatggagatgatctggatccgtattatagaggcagccacgcagccaagcaaaatgggcacgtaatgaaaatgaagcacggggaggcctactattctgaggtgaagcctttgaaatccgattttgccagattttctgccgattatcactcacatttggactcactgagcaaaccaagtgaatacagtgacctcaagtgggagtatcagagagcctcgagtagctcccctctggattattcattccaattcacaccttctagaactgcagggaccagcgggtgctccaaggagagcctggcgtacagtgaaagtgaatggggacccagcctggatgactatgacaggaggccaaagtcttcgtacctgaatcagacaagccctcagcccaccatgcggcagaggtccaggtcaggctcgggactccaggaaccgatgatgccatttggagcaagtgcatttaaaacccatccccaaggacactcctacaactcctacacctaccctcgcttgtccgagcccacaatgtgcattccaaaggtggattacgatcgagcacagatggtcctcagccctccactgtcagggtctgacacctaccccaggggccctgccaaactacctcaaagtcaaagcaaatcgggctattcctcaagcagtcaccagtacccgtctgggtaccacaaagccaccttgtaccatcacccctccctgcagagcagttcgcagtacatctccacggcttcctacctgagctccctcagcctctcatccagcacctacccgccgcccagctggggctcctcctccgaccagcagccctccagggtgtcccatgaacagtttcgggcggccctgcagctggtggtcagcccaggagaccccagggaatacttggccaactttatcaaaatcggggaaggctcaaccggcatcgtatgcatcgccaccgagaaacacacagggaaacaagttgcagtgaagaaaatggacctccggaagcaacagagacgagaactgcttttcaatgaggtcgtgatcatgcgggattaccaccatgacaatgtggttgacatgtacagcagctaccttgtcggcgatgagctctgggtggtcatggagtttctagaaggtggtgccttgacagacattgtgactcacaccagaatgaatgaagaacagatagctactgtctgcctgtcagttctgagagctctctcctaccttcataaccaaggagtgattcacagggacataaaaagtgactccatcctcctgacaagcgatggccggataaagttgtctgattttggtttctgtgctcaagtttccaaagaggtgccgaagaggaaatcattggttggcactccctactggatggcccctgaggtgatttctaggctaccttatgggacagaggtggacatctggtccctcgggatcatggtgatagaaatgattgatggcgagcccccctacttcaatgagcctcccctccaggcgatgcggaggatccgggacagtttacctccaagagtgaaggacctacacaaggtttcttcagtgctccggggattcctagacttgatgttggtgagggagccctctcagagagcaacagcccaggaactcctcggacatccattcttaaaactagcaggtccaccgtcttgcatcgtccccctcatgagacaatacaggcatcactgagcagaggattcgtgtaggtggcaaagctagatgaggacatgagaataattcaggagaacaaaaggaaacacagaacatgcaaaaggcctgtgcattctagaccagccaattggtgggacagcgtgatgaccggcagggttcaacagaccagggcatcttcttgtgtcttaaacaggcatctctccactgacagccggtgtggtcacttggagcacggctttaataagtcattattatatttttcagcccttcatccagcaaatcagaaggactcagtacaaactccgttatgatatatcctagccacatgcagggtaacatgtaggattttctatattgaaagaatacttttctggcaaaaaaaaaaaaaaaagaaagaaaggaaaacaaaaagcacttttttcttaatggtagcagtataatgtattttgcaacgaatttgtaatttttctgtacgatagttttgataatttatagtactttgatgtcatgtagccattgtatcagttgaagtaatacttgtttactagaggagtttgaacaaagcctttcctacttttttatccctttaagagaaccaatgattctttaggaactttgaatactgaatgactctcaatcaccgtcagctttagtaaaatctctttcttatcctaacaagtgtcttatttggtggaagaagaattaagagtgatggtgatggtgtgcacgtttcattaatccaaccaaaaataatgaaataaaatttgagccacagtataccactccttgggataaagttaaatatttttaaagatcacattttccatgaacgcctctagtagcaaaccattcttttgcacaccacaatgtttccctcagtgccctttctcaaatgggtacaatgttcccttgtggccaaatttccctcccagggagcaatttcagtgctaggatcattggattcagttcccaaaatagaatgtttcagtgagaccatgagaattccaggctcacaaagggagaggagagaacagggcaagacgtttggtttcatttgtcaccatttttaaaactctgtatgctagcacaccaaactcttgtctatatttacctttgtaccacagtattaatcgctattgttcatgtatcgtgctggaagtctgaactgactctagaggatgaattagcaagagggtattttaccaggtatgatctgacttcagttgtgcccatgttataatgtgtttccgacataggagagtcgtgctgctgtctagatcttcttgaatgttgataaaaatgaatgactactacaatacattttgtgttgcttgttggatgaatttgcatgttaactgtaggccaatatagatttgcctttaaaactctggaagagctacatagtcatcattagtttctattaattatgcatcagacaaaagccatttgttaccaaactgggaaaacagaggcttttcttaactatttcacatactgtaacaaatatgaatttaaatttgtgatagcgctctggttgctctaagcataattaagaatttttgtaattaataggttgctaattatttatcactgctaaaaaggaaaaaaggcataaaatgaccttctactgattagattttcagttttctttcaaactggaaatgcctccataaatatgatctatgattttgcttcataaaacagcaaatcaatgttttatgtaaaatattaaagcattaatataaatatgtgagaataaaaacaatctaaatccagaaaatggcagtcctaaatgttcatgagacagattgtattaatttaaccaggactatgtagaagtagaaagaaaagaaaaagaaaatcttttttaaaccagaataaacattaaaaactattgcagaaaatagtggattttggattccaaacattttcgacagtgtaatggaaatttttctgtaattttcttaccatcgggtattttttaaagtattcattgagtttaccaaaagttactgtagcttaaaaggttttgtgagcactaactattggcagaaactgcatttgcaaataaaaataaatgtttgccttttc

SEQ ID NO: 14650 - DNA, 4780 bp, Homo sapiens
  source 1..4780: mol_type = unassigned DNA
cgaaaacccggagcagctgcgtacgctcatggacagtcctccgaggggcgaagccgggcagctgggcatgctcagtagctgggggaggtttgggtggagagtagaaagctgtggctctgcctctcaccccctcccgctggcccccgccccccttgcccctacccagccagtagtagttccccagcgtgcgcccggggagaccgggaacatggcgctgggagcgctgtagcagctgagaaggggctgaggcaccgccgcttcgctgacagccggccaccagatgttcatgcattctagagaaagtggaaaacttagaagcctaattaatgactgtcttctggacctctgagaccatgtttctagtgttttccgtggaatattatcagaaatacactgtggtgaaatgcttccacctcttgctaaaatgaacactgaggaaaaatgaagaagactgacaagcaccagcgaaaagttgcagaatagaaatagccacactcctctggagtctttaattcatccacagccatcatataaaggttttggcatcatgtttgggaagaaaaagaaaaagattgaaatatctggcccgtccaactttgaacacagggttcatactgggtttgatccacaagagcagaagtttaccggccttccccagcagtggcacagcctgttagcagatacggccaacaggccaaagcctatggtggacccttcatgcatcacacccatccagctggctcctatgaagacaatcgttagaggaaacaaaccctgcaaggaaacctccatcaacggcctgctagaggattttgacaacatctcggtgactcgctccaactccctaaggaaagaaagcccacccaccccagatcagggagcctccagccacggtccaggccacgcggaagaaaatggcttcatcaccttctcccagtattccagcgaatccgatactactgctgactacacgaccgaaaagtacagggagaagagtctctatggagatgatctggatccgtattatagaggcagccacgcagccaagcaaaatgggcacgtaatgaaaatgaagcacggggaggcctactattctgaggtgaagcctttgaaatccgattttgccagattttctgccgattatcactcacatttggactcactgagcaaaccaagtgaatacagtgacctcaagtgggagtatcagagagcctcgagtagctcccctctggattattcattccaattcacaccttctagaactgcagggaccagcgggtgctccaaggagagcctggcgtacagtgaaagtgaatggggacccagcctggatgactatgacaggaggccaaagtcttcgtacctgaatcagacaagccctcagcccaccatgcggcagaggtccaggtcaggctcgggactccaggaaccgatgatgccatttggagcaagtgcatttaaaacccatccccaaggacactcctacaactcctacacctaccctcgcttgtccgagcccacaatgtgcattccaaaggtggattacgatcgagcacagatggtcctcagccctccactgtcagggtctgacacctaccccaggggccctgccaaactacctcaaagtcaaagcaaatcgggctattcctcaagcagtcaccagtacccgtctgggtaccacaaagccaccttgtaccatcacccctccctgcagagcagttcgcagtacatctccacggcttcctacctgagctccctcagcctctcatccagcacctacccgccgcccagctggggctcctcctccgaccagcagccctccagggtgtcccatgaacagtttcgggcggccctgcagctggtggtcagcccaggagaccccagggaatacttggccaactttatcaaaatcggggaaggctcaaccggcatcgtatgcatcgccaccgagaaacacacagggaaacaagttgcagtgaagaaaatggacctccggaagcaacagagacgagaactgcttttcaatgaggtcgtgatcatgcgggattaccaccatgacaatgtggttgacatgtacagcagctaccttgtcggcgatgagctctgggtggtcatggagtttctagaaggtggtgccttgacagacattgtgactcacaccagaatgaatgaagaacagatagctactgtctgcctgtcagttctgagagctctctcctaccttcataaccaaggagtgattcacagggacataaaaagtgactccatcctcctgacaagcgatggccggataaagttgtctgattttggtttctgtgctcaagtttccaaagaggtgccgaagaggaaatcattggttggcactccctactggatggcccctgaggtgatttctaggctaccttatgggacagaggtggacatctggtccctcgggatcatggtgatagaaatgattgatggcgagcccccctacttcaatgagcctcccctccaggcgatgcggaggatccgggacagtttacctccaagagtgaaggacctacacaaggtttcttcagtgctccggggattcctagacttgatgttggtgagggagccctctcagagagcaacagcccaggaactcctcggacatccattcttaaaactagcaggtccaccgtcttgcatcgtccccctcatgagacaatacaggcatcactgagcagaggattcgtgtaggtggcaaagctagatgaggacatgagaataattcaggagaacaaaaggaaacacagaacatgcaaaaggcctgtgcattctagaccagccaattggtgggacagcgtgatgaccggcagggttcaacagaccagggcatcttcttgtgtcttaaacaggcatctctccactgacagccggtgtggtcacttggagcacggctttaataagtcattattatatttttcagcccttcatccagcaaatcagaaggactcagtacaaactccgttatgatatatcctagccacatgcagggtaacatgtaggattttctatattgaaagaatacttttctggcaaaaaaaaaaaaaaaagaaagaaaggaaaacaaaaagcacttttttcttaatggtagcagtataatgtattttgcaacgaatttgtaatttttctgtacgatagttttgataatttatagtactttgatgtcatgtagccattgtatcagttgaagtaatacttgtttactagaggagtttgaacaaagcctttcctacttttttatccctttaagagaaccaatgattctttaggaactttgaatactgaatgactctcaatcaccgtcagctttagtaaaatctctttcttatcctaacaagtgtcttatttggtggaagaagaattaagagtgatggtgatggtgtgcacgtttcattaatccaaccaaaaataatgaaataaaatttgagccacagtataccactccttgggataaagttaaatatttttaaagatcacattttccatgaacgcctctagtagcaaaccattcttttgcacaccacaatgtttccctcagtgccctttctcaaatgggtacaatgttcccttgtggccaaatttccctcccagggagcaatttcagtgctaggatcattggattcagttcccaaaatagaatgtttcagtgagaccatgagaattccaggctcacaaagggagaggagagaacagggcaagacgtttggtttcatttgtcaccatttttaaaactctgtatgctagcacaccaaactcttgtctatatttacctttgtaccacagtattaatcgctattgttcatgtatcgtgctggaagtctgaactgactctagaggatgaattagcaagagggtattttaccaggtatgatctgacttcagttgtgcccatgttataatgtgtttccgacataggagagtcgtgctgctgtctagatcttcttgaatgttgataaaaatgaatgactactacaatacattttgtgttgcttgttggatgaatttgcatgttaactgtaggccaatatagatttgcctttaaaactctggaagagctacatagtcatcattagtttctattaattatgcatcagacaaaagccatttgttaccaaactgggaaaacagaggcttttcttaactatttcacatactgtaacaaatatgaatttaaatttgtgatagcgctctggttgctctaagcataattaagaatttttgtaattaataggttgctaattatttatcactgctaaaaaggaaaaaaggcataaaatgaccttctactgattagattttcagttttctttcaaactggaaatgcctccataaatatgatctatgattttgcttcataaaacagcaaatcaatgttttatgtaaaatattaaagcattaatataaatatgtgagaataaaaacaatctaaatccagaaaatggcagtcctaaatgttcatgagacagattgtattaatttaaccaggactatgtagaagtagaaagaaaagaaaaagaaaatcttttttaaaccagaataaacattaaaaactattgcagaaaatagtggattttggattccaaacattttcgacagtgtaatggaaatttttctgtaattttcttaccatcgggtattttttaaagtattcattgagtttaccaaaagttactgtagcttaaaaggttttgtgagcactaactattggcagaaactgcatttgcaaataaaaataaatgtttgccttttc

SEQ ID NO: 14651 - DNA, 4492 bp, Homo sapiens
  source 1..4492: mol_type = unassigned DNA
gtgcactcggctccgggagaggcgagcagcgccggtgagccccgcagcagcgcacccggccgcggagccccgcgatggagatggcagaggcggaattgcacaaggaaaggctgcaagccatagcagaaaaaagaaagaggcagactgaaatagaaggcaagcgacaacagcttgacgagcagatacttctgctgcagcattccaagtccaaagtgcttcgggagaaatggctgctgcagggcatacccgctggaactgccgaagaggaggaagccaggaggcggcagtctgaagaggatgagttcagagtcaagcaacttgaagataacattcagaggctggagcaagaaatacaaacgctagaaagtgaagagtcccagatatctgccaaagagcaaatcatcctagagaaactgaaggaaacagaaaaatccttcaaggactttcagaagggtttctccagtacggatggagctgtgtacgccatggaaattaatgtggagaaagacaaacaaacaggagagaccaagattctctctacatctaccattggcccagagggggtccatcagaaaggagtcaaagtctatgatgatggtaccaaagtagtgtatgaggtgcgctcaggaggcaccgtagtagaaaatggagtgcacaaattaagcacaaaggatgtagaagagcttattcagaaggctggacaatcaagcttaggaggagggcacgtgtctgaaaggactgtgattgcagatgggagcctcagccatcccaaggaacacatgctctgcaaagaagctaagttagaaatggtacataagtctaggaaagaccattcttccgggaacccagggcagcaggcccaagcccccagcgctgcagggccggaggcaaacttggatcagcccgtcaccatgatttttatgggctaccaaaatatcgaggatgaagaggagacgaaaaaggtgctaggctatgatgaaaccatcaaggctgaattggtcctcattgatgaagatgatgagaagtcattgagggagaagacagtgacggacgtgtccactattgacgggaacgcggctgagcttgtgtccgggaggccggtctcagacaccacagagccctcatccccagaagggaaggaagagagcctagctacagagccagccccaggtacccaaaagaaaaagcgctgtcaatgctgtgttgtcatgtgaccacttctttcttctcctttcttctgggcagcctgtactctccaccactcacgtagacctcactgtaccactaactgcaatactgtgaactggaagcaaacacctgccttgccttgcagttgaattgctttgatctctctcattttttttccttttcctcacctgagagacaacgtgcatgtgtgtgcttcattctctccaagaacttgcttttcctctaaacctttccttgtgtcttcaagagtgaatcacttccttcctgctcgattggaatggactcttcgtatcagccagtgatatggtagccttaactcacttgactggaattgaacccattggcactgggggtttcattttgtagtgtgttcctgtaacgtagtcacacactgccatgtctctggtttctcacttgcctcctttgctgtggatctttgtttttatatcttgtgtggcaaaatgctgttggctctagccggttgctagtgtagccaaaagtggaccttacttagtctgtccgatctagggtgatgctttttgctgccttacataagcttccagattacagtattgtgcattcatggctttctttctgttaaaactgaaatgaagtcaatgtagaagaacccagagcttgtcacagctgaaatgtagggactgattccataacctgcccatcagcggttgtctctctttctatggtttaaccgatgaaccctttatataagaagcaccattttaaaatttctaaggacatgaaacaaacattgtttgaagcatcagtagcaattgatctccaaacttaggcaaattcacaagccttgtttctattctcttaaaaaaatgtaaatttttatattgtttcttttttctggatattttctggtcatgttaatctattttcaatgaggagatcatcttgagaagtatctttgcagtgaccatatttctaaaacagtctgtccaacctacaatggttgccatgatgctcccacttcatcatggatggtgctgtaatgcattaactgttcatctcctccccagttgattacaaagccttgcatccatactcttttctttctggccccatgagaaagagaatgttttaggtaacttcaacttgtaggtttatctgcccttcaaaaaaaaaaactttaaaaaacttttaaaaattaagaaagacctatcttctcaatgttaagcacttaatttcataacaaatattaagtggcacatagctgagcttcttagggcattgttttgtttttagcttctggagattccagaagagcaaagaatattttttatctagaacacaatgaacagtttttgaaataccttctcagcactcccccaaagcaaaaagccacatatgtagtaaaaccaaagggaaacaatttaataaaataacaatagtatagtaatgaaataaagatataacatgattactggttttaataagagttatcttaactttaagttatttgcccatttatagcattgttatgaattattcataaaattatgtcccacagtatatagttttgaaaaaacatatgatatactacatccagtctaacttctgtggaaagtagatcagaaaaaataagatagtcttgagagaattttattatagaagctgtctaatttgacctattttgcttgctcagtgctaaatctattgcttttttttaatctcctggcttgaaattatatttacttcaataggaaaggtaaaaacatcagtttttacttttcaaagttaattttctgaaataattgcattttaatgagcacaaaatgggtcattttatttttattatactcatcttgtttacacctatacataaacagaaaacgttaaagaagagaaaaataaaggagctaagttctgctgttgaagattatttcatccaaggcttggttttgaataactgagggaaatatctctaaatctcaagttcatcaaagcagctgcaatggaataaaattgctattttatcgagaaacctggtttggatgcttataaattccactactctcagcttcattttcctgagtacgtggtcactgaagcatcatttagacattacataaactggcatgcagataaacctatttacatagagggagaaaacagtttcaatgtcttggacaatctgttattttaatgatttacttaagaaagaaacaatctgaaagcttaccatagcttatcttttctactcacttggagattcaagctattcaatgtgagttttaaaaagttaagcacagttagtgagtgaaatggtagaatgtagaacctttaagcttgctggttgataaacagaatcaatcttccaggacagataattccctgaagggacctatccttgcataagtgaactagttactcatacagaaaatgatctgcacatcttactacaacactacacacaagaactaaaagattaatgattatctgtattctcttcactaattactattatgggggaataatgattagcaaattatatgaattcgagttctctctatacttttattagtaaagcttatcatttaatggactgaagtaagatgtgttacctttattcgagctatttgtagccacactaaatgaaggtgtgtttgaatatggcgcatatatttgcatatgtcccatcattttcttgtcataatggggaattcaggcttagccagtacttctatgggatgagacctataatcccacctatagcagcaagtaactacccttcatgatgatagtgtacatggagctgtgattatgaacatgctgcctttcctgctgccattggcattctctctgtaaattttattatgtgtggtatcacactctccaaaaatgcagggtatttggttacataaccaaactaattaaagaatcagtaatgaaattgcaaaaccatgatcttttttgagctaatgattagttgggctttcctttaaaataatataatcaggccgagtgcagcggctcacacctgtaatctcggcactttggaagtccgcggcgggtggttcacctgaggtcgggagttcaagaccagcctgaccaacatggagaaacccccatctctactaaaaaaaaaatacaaaattagccaggcgtgatggcgcatgcctgtaatcccagctactcgggagactgaggcaggagaatcgcttgaacctgggaggcaggggttgcaatgagccgagatgtgcactccagcctgggcaacaaagagcgaaactccatctcaaaaaaaaaaaaaaaa

SEQ ID NO: 14652 - DNA, 1418 bp, Homo sapiens
  source 1..1418: mol_type = unassigned DNA
ccccggggtgcccatcagtttccttgggtgactacagcgtgtgttttttctttcctctttcccctgcctgtgtgcccttctccaggatggcagaggcggaattgcacaaggaaaggctgcaagccatagcagaaaaaagaaagaggcagactgaaatagaaggcaagcgacaacagcttgacgagcagatacttctgctgcagcattccaagtccaaagtgcttcgggagaaatggctgctgcagggcatacccgctggaactgccgaagaggaggaagccaggaggcggcagtctgaagaggatgagttcagagtcaagcaacttgaagataacattcagaggctggagcaagaaatacaaacgctagaaagtgaagagtcccagatatctgccaaagagcaaatcatcctagagaaactgaaggaaacagaaaaatccttcaaggactttcagaagggtttctccagtacggatggagctgtgtacgccatggaaattaatgtggagaaagacaaacaaacaggagagaccaagattctctctacatctaccattggcccagagggggtccatcagaaaggagtcaaagtctatgatgatggtaccaaagtagtgtatgaggtgcgctcaggaggcaccgtagtagaaaatggagtgcacaaattaagcacaaaggatgtagaagagcttattcagaaggctggacaatcaagcttaggaggagggcacgtgtctgaaaggactgtgattgcagatgggagcctcagccatcccaaggaacacatgctctgcaaagaagctaagttagaaatggtacataagtctaggaaagaccattcttccgggaacccagggcagcaggcccaagcccccagcgctgcagggccggaggcaaacttggatcagcccgtcaccatgatttttatgggctaccaaaatatcgaggatgaagaggagacgaaaaaggtgctaggctatgatgaaaccatcaaggctgaattggtcctcattgatgaagatgatgagaagtcattgagggagaagacagtgacggacgtgtccactattgacgggaacgcggctgagcttgtgtccgggaggccggtctcagacaccacagagccctcatccccagaagggaaggaagagagcctagctacagagccagccccaggtacccaaaagaaaaagcgctgtcaatgctgtgttgtcatgtgaccacttctttcttctcctttcttctgggcagcctgtactctccaccactcacgtagacctcactgtaccactaactgcaatactgtgaactggaagcaaacacctgccttgccttgcagttgaattgctttgatctctctcattttttttccttttcctcacctgagagacaacgtgcatgtgtgtgcttcattctct

SEQ ID NO: 14653 - DNA, 1332 bp, Homo sapiens
  source 1..1332: mol_type = unassigned DNA
gcgtgtgttttttctttcctctttcccctgcctgtgtgcccttctccaggatggcagaggcggaattgcacaaggaaaggctgcaagccatagcagaaaaaagaaagaggcagactgaaatagaaggcaagcgacaacagcttgacgagcagatacttctgctgcagcattccaagtccaaagtgcttcgggagaaatggctgctgcagggcatacccgctggaactgccgaagaggaggaagccaggaggcggcagtctgaagaggatgagttcagagtcaagcaacttgaagataacattcagaggctggagcaagaaatacaaacgctagaaagtgaagagtcccagatatctgccaaagagcaaatcatcctagagaaactgaaggaaacagaaaaatccttcaaggactttcagaagggtttctccagtacggatggagatgcagtaaattacatttcctcccagcttcccgacctgccaatcctctgttcacgaacagcagaaccatcacctgggcaggacgggaccagcagagcggctgctgtgtacgccatggaaattaatgtggagaaagacaaacaaacaggagagaccaagattctctctacatctaccattggcccagagggggtccatcagaaaggagtcaaagtctatgatgatggtaccaaagtagtgtatgaggtgcgctcaggaggcaccgtagtagaaaatggagtgcacaaattaagcacaaaggatgtagaagagcttattcagaaggctggacaatcaagcttaggaggagggcacgtgtctgaaaggactgtgattgcagatgggagcctcagccatcccaaggaacacatgctctgcaaagaagctaagttagaaatggtacataagtctaggaaagaccattcttccgggaacccagggcagcaggcccaagcccccagcgctgcagggccggaggcaaacttggatcagcccgtcaccatgatttttatgggctaccaaaatatcgaggatgaagaggagacgaaaaaggtgctaggctatgatgaaaccatcaaggctgaattggtcctcattgatgaagatgatgagaagtcattgagggagaagacagtgacggacgtgtccactattgacgggaacgcggctgagcttgtgtccgggaggccggtctcagacaccacagagccctcatccccagaagggaaggaagagagcctagctacagagccagccccaggtacccaaaagaaaaagcgctgtcaatgctgtgttgtcatgtgaccacttctttcttctcctttcttctgggcagcctgtactctccacc

SEQ ID NO: 14654 - DNA, 583 bp, Homo sapiens
  source 1..583: mol_type = unassigned DNA
atcaaataaatctcacccagaatttcccactgtcttattctatggaaaaaagaaagaggcagactgaaatagaaggcaagcgacaacagcttgacgagcagatacttctgctgcagcattccaagtccaaagtgcttcgggagaaatggctgctgcagggcatacccgctggaactgccgaagaggaggaagccaggaggcggcagtctgaagaggatgagttcagagtcaagcaacttgaagataacattcagaggctggagcaagaaatacaaacgctagaaagtgaagagtcccagatatctgccaaagagcaaatcatcctagagaaactgaaggaaacagaaaaatccttcaaggactttcagaagggtttctccagtacggatggagatgcagtaaattacatttcctcccagcttcccgacctgccaatcctctgttcacgaacagcagaaccatcacctgggcaggacgggaccagcagagcggctgctgtgtacgccatggaaattaatgtggagaaagacaaacaaacaggagagaccaagattctctctacatctaccattggcccagaggg

SEQ ID NO: 14655 - DNA, 547 bp, Homo sapiens
  source 1..547: mol_type = unassigned DNA
agaatttctcccactcttcgagcctacagcagacatgttaggagaatgctgctgcttgcaacacacccagagacggtggggcaggtgacactgcgtgtgtgcccggtgtctctggaagtgtctatacagatgtgtgctgctgctgctgctgctttctgccttaaaatttctggagccaacacccacccactcttacagcctctgtctctttattttcaaggaaaaaagaaagaggcagactgaaatagaaggcaagcgacaacagcttgacgagcagatacttctgctgcagcattccaagtccaaagtgcttcgggagaaatggctgctgcagggcatacccgctggaactgccgaagaggaggaagccaggaggcggcagtctgaagaggatgagttcagagtcaagcaacttgaagataacattcagaggctggagcaagaaatacaaacgctagaaagtgaagagtcccagatatctgccaaagagcaaatcatcctagagaaactgaaggaaacagaaaaatccttcaaggactttcagaag

SEQ ID NO: 14656 - DNA, 570 bp, Homo sapiens
  source 1..570: mol_type = unassigned DNA
gctaccacaccagattctgaaggggaggagttgtctggaaagaccagagctgggtgctggggatctggagcagctcgggacccgcgctgcagggagctgggatgggagaggttctgaatgatgactgacgcgggtttgggtgatacccctcacagcccctgtcattccggagtcataaggcacccgcgcgtctagccccagcgccagggcacgcgagcggcgctggagggaggaaagcttccgcctgcgggccggacaaaagtcccgcctgcccacggctttttgcccgccgctcgtgaccgagacgcctcgccgcggccagctcgctgctctcgctggcggatggtgtgtggccgccgcaggacgcccgccgtgcccgggccatgaagtagcggctgctggcggcgccgctgcccaaccgccagccccagccccgcgctgcgctgcccggtcctctcccggcggggtcgtatcggcgtggacatggctggccgcgtccctagcctgctagttctccttgtttttccaagcagctgtttggctttccgaagcccactttctgtctttaag

SEQ ID NO: 14657 - DNA, 369 bp, Homo sapiens
  source 1..369: mol_type = unassigned DNA
agttccatgcactcagccaggtctccaggctggagcaagggctgggggtcaatgggtccttccttctctcgggaaacgttcttctggcgcgaagctgggcggagggagagtcggacattttcctctgcttctctcagggcagctggcgtggccacctcgcaaggctgcttctagggacacgagactcgggagggtcagagactttcaggccgggccttcactcccttccccggggcacttgggcaagagttccagctcttggctacctctggcccgcgcgttctgaatgatgactgacgcgggtttgggtgatacccctcacagcccctgtcattccggagtcataaggcacccgcgcgtctagcccca

SEQ ID NO: 14658 - DNA, 824 bp, Homo sapiens
  source 1..824: mol_type = unassigned DNA
attttcctctgcttctctcagggcagctggcgtggccacctcgcaaggctgcttctagggacacgagactcgggagggtcagagactttcaggccgggccttcactcccttccccggggcacttgggcaagagttccagctcttggctacctctggcccgcgcgtgagttcagacacccagcacacgcgacccccgcagggaaaccccgggaagctgcgcgcaatcgctggggactcgccagggctccacttcccaagctccgcgccccctgcgcccaaagaggcagggcggagcagaggccgccggcgtggaggaggcgagcgcggggctggcccgggagccgcccccggggagggactgagacctgccccaggagtcgagggcgagcggcggacccggctgggcccggcgcacgccgaggagagggagcccccgccaccgccgctgcctccgcgtgctcagcctgtccccgcccagggagccggagcctccaactaactccgcccgccgctccgccgcccgcaggctccggcttccgtcccggacagagcccgtggtcgcgcaggttctgaatgatgactgacgcgggtttgggtgatacccctcacagcccctgtcattccggagtcataaggcacccgcgcgtctagccccagcgccagggcacgcgagcggcgctggagggaggaaagcttccgcctgcgggccggacaaaagtcccgcctgcccacggctttttgcccgccgctcgtgaccgagacgcctcgccgcggccagctcgctgctctcgctggcggatggtgtgtggccgccgcaggacgcc

SEQ ID NO: 14659 - DNA, 510 bp, Homo sapiens
  source 1..510: mol_type = unassigned DNA
ggcttccgtcccggacagagcccgtggtcgcgcagagagcaggatgctgaaccatacttagaattaatcaggagaaacatgggaaacatgcagaaaacaacataattatatgtgcacttttaagctacaaagtgaaattagagtcttttaagtctgcatgtgatttcatcatttttaataataccaatcttaaagaatggccatcatgttctttggacattgattactccagaaggggaagaatataaaaaacaccaatgcccaagtttgtttgttgtgaaaatagccacacttgaagtctacttttatattgttcttgtaaaacatcaattattatacagtaaaagataaattcagctgaatatgtggggagaagggaaggaaagatttgaagattatttaataatgttttaacttttatgttcttcatgtatggcataaaaacttatttaaactcctgaggttttagttgagtgtatgttttaaataaatattattatttaagtaaaa

SEQ ID NO: 14660 - DNA, 575 bp, Homo sapiens
  source 1..575: mol_type = unassigned DNA
gcgcaggttggtgttgttgccgctgctgccgccactgcgaggcggtcagggcaagggtgagggtgggggcgcggaagggggcctgggctcgggatcctgctgccaccaattcctggtgccccaggaggttctgaatgatgactgacgcgggtttgggtgatacccctcacagcccctgtcattccggagtcataaggcacccgcgcgtctagccccagcgccagggcacgcgagcggcgctggagggaggaaagcttccgcctgcgggccggacaaaagtcccgcctgcccacggctttttgcccgccgctcgtgaccgagacgcctcgccgcggccagctcgctgctctcgctggcggatggtgtgtggccgccgcaggacgcccgccgtgcccgggccatgaagtagcggctgctggcggcgccgctgcccaaccgccagccccagccccgcgctgcgctgcccggtcctctcccggcggggtcgtatcggcgtggacatggctggccgcgtccctagcctgctagttctccttgtttttccaagcagctgtttggctttccgaagcccactt

SEQ ID NO: 14661 - DNA, 540 bp, Homo sapiens
  source 1..540: mol_type = unassigned DNA
agcacattgcttggttaccatagtatcctctgcctccaagtctctcctgatgatgtcagtatgcatacaggggttgttcagatcatctacgtggggatgattcaccccacaataaagcccctctctctcgttgctcgctttccagtgtgatttcagacatctgtagcaatggaagtccgatacatacttctgcatgtctatgcgaataccagtggatgaggaagccttcgtgattgacttcaagcctcgagccagcatggatactgtccatcacatgttactttttggatgcaatatgccttcatccactggaagttactggttttgtgatgaaggaacctgtacagataaagccaatattctgtatgcctgggcgagaaatgctccccctacccggctccccaaaggtgttggattcagagttggaggagagactggaagtaaatactttgtactacaggtacactatggggatattagtgcttttagagataataacaaggactgttctggtgtgtccttacacctcacacgtctgcc

SEQ ID NO: 14662 - DNA, 539 bp, Homo sapiens
  source 1..539: mol_type = unassigned DNA
ttgcttggttaccatagtatcctctgcctccaagtctctcctgatgatgtcagtatgcatacaggggttgttcagatcatctacgtggggatgattcaccccacaataaagcccctctctctcgttgctcgctttccagtgtgatttcagacatctgtagcaatggaaggttctgaatgatgactgacgcgggtttgggtgatacccctcacagcccctgtcattccggagtcataaggcacccgcgcgtctagccccagcgccagggcacgcgagcggcgctggagggaggaaagcttccgcctgcgggccggacaaaagtcccgcctgcccacggctttttgcccgccgctcgtgaccgagacgcctcgccgcggccagctcgctgctctcgctggcggatggtgtgtggccgccgcaggacgcccgccgtgcccgggccatgaagtagcggctgctggcggcgccgctgcccaaccgccagccccagccccgcgctgcgctgcccggtcctctcccggcggggtcgtatcggcgtg

SEQ ID NO: 14663 - DNA, 609 bp, Homo sapiens
  source 1..609: mol_type = unassigned DNA
acttatcatgaagaatctcacttcatttaaggttctgaatgatgactgacgcgggtttgggtgatacccctcacagcccctgtcattccggagtcataaggcacccgcgcgtctagccccagcgccagggcacgcgagcggcgctggagggaggaaagcttccgcctgcgggccggacaaaagtcccgcctgcccacggctttttgcccgccgctcgtgaccgagacgcctcgccgcggccagctcgctgctctcgctggcggatggtgtgtggccgccgcaggacgcccgccgtgcccgggccatgaagtagcggctgctggcggcgccgctgcccaaccgccagccccagccccgcgctgcgctgcccggtcctctcccggcggggtcgtatcggcgtggacatggctggccgcgtccctagcctgctagttctccttgtttttccaagcagctgtttggctttccgaagcccactttctgtctttaagaggtttaaagaaactaccagaccattttccaatgaatgtcttggtaccaccagacccgtagttcctattgattcatcagattttgcattggatattcgcatgcctggggttacaccta

SEQ ID NO: 14664 - DNA, 528 bp, Homo sapiens
  source 1..528: mol_type = unassigned DNA
aattctgtgatgatccttgggagctcttggttctgaatgatgactgacgcgggtttgggtgatacccctcacagcccctgtcattccggagtcataaggcacccgcgcgtctagccccagcgccagggcacgcgagcggcgctggagggaggaaagcttccgcctgcgggccggacaaaagtcccgcctgcccacggctttttgcccgccgctcgtgaccgagacgcctcgccgcggccagctcgctgctctcgctggcggatggtgtgtggccgccgcaggacgcccgccgtgcccgggccatgaagtagcggctgctggcggcgccgctgcccaaccgccagccccagccccgcgctgcgctgcccggtcctctcccggcggggtcgtatcggcgtggacatggctggccgcgtccctagcctgctagttctccttgtttttccaagcagctgtttggctttccgaagcccactttctgtctttaagaggtttaaagaaactaccagaccattttccaatgaatgt

SEQ ID NO: 14665 - DNA, 616 bp, Homo sapiens
  source 1..616: mol_type = unassigned DNA
gatgcatgtatataagcatgcctttgttctcaaaagtctttttctatctgattactgtggtatccagtgctttgtctttgcctctcttcgttttttgttttgtttttttccttgcgccttagccggtcatttgtgtgatgtttacattcagcagagaggttctgaatgatgactgacgcgggtttgggtgatacccctcacagcccctgtcattccggagtcataaggcacccgcgcgtctagccccagcgccagggcacgcgagcggcgctggagggaggaaagcttccgcctgcgggccggacaaaagtcccgcctgcccacggctttttgcccgccgctcgtgaccgagacgcctcgccgcggccagctcgctgctctcgctggcggatggtgtgtggccgccgcaggacgcccgccgtgcccgggccatgaagtagcggctgctggcggcgccgctgcccaaccgccagccccagccccgcgctgcgctgcccggtcctctcccggcggggtcgtatcggcgtggacatggctggccgcgtccctagcctgctagttctccttgtttttccaagcagctgtttggctttccgaagcccactttctgtcttta

SEQ ID NO: 14666 - DNA, 564 bp, Homo sapiens
  source 1..564: mol_type = unassigned DNA
atttttggtgagagaaaggagtgatagaggaagttctgaatgatgactgacgcgggtttgggtgatacccctcacagcccctgtcattccggagtcataaggcacccgcgcgtctagccccagcgccagggcacgcgagcggcgctggagggaggaaagcttccgcctgcgggccggacaaaagtcccgcctgcccacggctttttgcccgccgctcgtgaccgagacgcctcgccgcggccagctcgctgctctcgctggcggatggtgtgtggccgccgcaggacgcccgccgtgcccgggccatgaagtagcggctgctggcggcgccgctgcccaaccgccagccccagccccgcgctgcgctgcccggtcctctcccggcggggtcgtatcggcgtggacatggctggccgcgtccctagcctgctagttctccttgtttttccaagcagctgtttggctttccgaagcccactttctgtctttaagaggtttaaagaaactaccagaccattttccaatgaatgtcttggtaccaccagacccgtagttcctattgat

SEQ ID NO: 14667 - DNA, 5432 bp, Homo sapiens
  source 1..5432: mol_type = unassigned DNA
gtgaaactactaatgtattaaagaacctcagctgggatttgctgaggacaaatgctgtaacgtgttagtcatccattatctgcttctatttttgcaggttctgaatgatgactgacgcgggtttgggtgatacccctcacagcccctgtcattccggagtcataaggcacccgcgcgtctagccccagcgccagggcacgcgagcggcgctggagggaggaaagcttccgcctgcgggccggacaaaagtcccgcctgcccacggctttttgcccgccgctcgtgaccgagacgcctcgccgcggccagctcgctgctctcgctggcggatggtgtgtggccgccgcaggacgcccgccgtgcccgggccatgaagtagcggctgctggcggcgccgctgcccaaccgccagccccagccccgcgctgcgctgcccggtcctctcccggcggggtcgtatcggcgtggacatggctggccgcgtccctagcctgctagttctccttgtttttccaagcagctgtttggctttccgaagcccactttctgtctttaagaggtttaaagaaactaccagaccattttccaatgaatgtcttggtaccaccagacccgtagttcctattgattcatcagattttgcattggatattcgcatgcctggggttacacctaaacagtccgatacatacttctgcatgtctatgcgaataccagtggatgaggaagccttcgtgattgacttcaagcctcgagccagcatggatactgtccatcacatgttactttttggatgcaatatgccttcatccactggaagttactggttttgtgatgaaggaacctgtacagataaagccaatattctgtatgcctgggcgagaaatgctccccctacccggctccccaaaggtgttggattcagagttggaggagagactggaagtaaatactttgtactacaggtacactatggggatattagtgcttttagagataataacaaggactgttctggtgtgtccttacacctcacacgtctgccacagcctttaattgctggcatgtaccttatgatgtctgttgacactgttatcccagcaggagaaaaagtggtgaattctgacatttcatgccattataaaaattatccaatgcatgtctttgcctatagagttcacactcaccatttaggtaaggtagtaagtggatacagagtaagaaatggacagtggacactgattggacggcagagccctcagctgccacaggctttctaccctgtggggcatccagttgatgtaagttttggtgacctactggctgcaagatgtgtattcactggtgaaggaaggacagaagccacacacattggtggcacgtctagtgatgaaatgtgcaacttatacattatgtattacatggaagccaagcatgcagtttctttcatgacctgtacccagaatgtagctccagatatgttcagaaccataccaccagaggccaacattccaattcccgtgaagtctgatatggttatgatgcatgaacatcataaagaaacagaatataaagataagattcctttactacagcagccaaaacgagaagaagaagaagtgttagaccagggtgatttctattcactactttccaagctgctaggagaaagggaagatgttgttcatgtgcacaaatataatcctacagaaaaggcagaatcagagtcagacctggtagctgagattgcaaatgtagtccaaaaaaaggatcttggtcgatctgatgccagagagggtgcagaacatgagaggggtaatgctattcttgtcagagacagaattcacaaattccacagactagtatctaccttgaggccaccagagagcagagttttctcattacagcagcccccacctggtgaaggcacctgggaaccagaacacacaggagatttccacatggaagaggcactggattggcctggagtatacttgttaccaggccaggtttctggggtggctctagaccctaagaataacctggtgattttccacagaggtgaccatgtctgggatggaaactcgtttgacagcaagtttgtttaccagcaaataggactcggaccaattgaagaagacactattcttgtcatagatccaaataatgctgcagtactccagtccagtggaaaaaatctgttttacttgccacatggcttgagtatagataaagatgggaattattgggtcacagacgtggctctccatcaggtgttcaaactggatccaaacaataaagaaggccctgtattaatcctgggaaggagcatgcaaccaggcagtgaccagaatcacttctgtcaacccactgatgtggctgtggatccaggcactggagccatttatgtatcagatggttactgcaacagcaggattgtgcagttttcaccaagtggaaagttcatcacacagtggggagaagagtcttcagggagcagtcctctgccaggccagttcactgttcctcacagcttggctcttgtgcctcttttgggccaattatgtgtggcagaccgggaaaatggtcggatccagtgttttaaaactgacaccaaagaatttgtgagagagattaagcattcatcatttggaagaaatgtatttgcaatttcatatataccaggcttgctctttgcagtgaatgggaagcctcattttggggaccaagaacctgtacaaggatttgtgatgaacttttccaatggggaaattatagacatcttcaagccagtgcgcaagcactttgatatgcctcatgatattgttgcatctgaagatgggactgtgtacattggagatgctcataccaacaccgtgtggaagttcaccttgactgagaaattggaacatcgatcagttaaaaaggctggcattgaggtccaggaaatcaaagaagccgaggcagttgttgaaaccaaaatggagaacaaacccacctcctcagaattgcagaagatgcaagagaaacagaaactgatcaaagagccaggctcgggagtgcctgttgttctcattacaacccttctggttattccggtggttgtcctgctggccattgccatatttattcggtggaaaaaatcaagggcctttggagattctgaacacaaactcgagacgagttcaggaagagtactgggaagatttagaggaaagggaagtggaggcttaaaccttggtaatttctttgcaagccgtaagggctacagtcgaaaagggtttgaccggcttagcactgagggcagtgaccaagagaaagaggatgatggaagtgaatcagaagaggagtattcagcacctctgcctgcgctcgcaccttcctcctcctgaaaaccaagctttgatttagattgagtaagatttacccagaatgtcagattcctttccctttagcacgtttaaagttctgtgtatttaattgtaaactgtactagtctgtgtgggactgtacacactttatttacttcgttttggttaagttggcttctgtttctagttgaggagtttcctaaaagttcataacagtgccattgtctttatatgaacatagactagagaaaccgtcctctttttccatcataattctaatctaacaatggaagatttgcccatttacacttttgagactttttggtggatgtaaataaccccattctttgcttgaacacagtattttcccaatagcactttcattgccagtgtctttctttggtgcctttcctgttcagcattcttagcctgtggcagtaaagagaaactttgtgctacatgacgacaaagctgctaaatctcctatttttttaaaatcactaacattatattgcaatgaaggaaataaaaaagtctctatttaaattcttttttaaattttcttcagttggtgtgtttttgggatgtcttatttttagatggttacactgttagaacactattttcagaatctgaatgtaatttgtgtaataaagtgttttcagagcattagctgtcagtgtattttccagtttttgcgtatttgcagattttacatacaacttttataataattacacaaacccacaaatattagtgaaacttactcgatgtcttcaactaaaagaaatgtgtgtattgtacaaaatttagaagatactttagccaatataaattaaaaaccagcctgagtttacataaatttgtaaagtcaggctcttctaaaatccaaagagggtttttgcctatatatcaatcagaggataaatactttaataaaaggtaatcacagctaagtggatacctgtgtctcaaattacatatgcaaatgatccatcagtagggatcactaataatagttttccttttaaaaaataatttcagggcaggtacagtggctcaagcctatacttccaggactttgggaggccaagcagaaggattgtgggaggccaagcagaaggattgtttgagcccagaaattcaaggctgcagtgagctatgatcaatccactgtactccagcctaggctacagagtgagatcctttctctaaaataaaatacaatttccatgtatccataggaatatattcatcttttacagtgattgcagattagttttaaaacgtctttttcgtaattcgtcaatgcaagttagtaagaaccagataattttccattttaaaatgataggaatctaaaactctttttcaaaaatgccaacctgtttttccggcatcatagtagttggaataatacagatataattgactaatcataaagtacatgagagtacagaagggaaatttggaaacggtaagtctgctagggcattacaatcctgtcctagcactccacctttattctgccaacctgggttaattaaagatggtagcctggaaagtaatgaatgacattgacttcaggcaatctttccactgattattcttggctgaacttcatttatcgagtcagagaatgcactgcctgagaaatgtcccagaggagtgaatcctaggcctggccacagtagaatcgcctggagaatttaagaaaaaaattgttgggcactcactctttccagtgatctttatttagttggcttacaatggaatacaggtatggttcatgtttttaaatttgtccaggtgtttctattgtgcagtcacagttgaaaaccattgtcttcgagaatagctattctatcttgccagttacaataagtggatagctatattttcacataaattatagtttacagatgtttggagggggaagacaggatctgaggtgttttgatatgactgttagcaccaaaatctgaatgccttaattgttgaatgtgttaaattggataattaaaatgggcataaatgacttattaaaaaagcaaagggaaa

SEQ ID NO: 14668 - DNA, 3302 bp, Homo sapiens
  source 1..3302: mol_type = unassigned DNA
aatgtattaaagaacctcagctgggatttgctgaggacaaatgctgtaacgtgttagtcatccattatctgcttctatttttgcaggttctgaatgatgactgacgcgggtttgggtgatacccctcacagcccctgtcattccggagtcataaggcacccgcgcgtctagccccagcgccagggcacgcgagcggcgctggagggaggaaagcttccgcctgcgggccggacaaaagtcccgcctgcccacggctttttgcccgccgctcgtgaccgagacgcctcgccgcggccagctcgctgctctcgctggcggatggtgtgtggccgccgcaggacgcccgccgtgcccgggccatgaagtagcggctgctggcggcgccgctgcccaaccgccagccccagccccgcgctgcgctgcccggtcctctcccggcggggtcgtatcggcgtggacatggctggccgcgtccctagcctgctagttctccttgtttttccaagcagctgtttggctttccgaagcccactttctgtctttaagaggtttaaagaaactaccagaccattttccaatgaatgtcttggtaccaccagacccgtagttcctattgattcatcagattttgcattggatattcgcatgcctggggttacacctaaacagtccgatacatacttctgcatgtctatgcgaataccagtggatgaggaagccttcgtgattgacttcaagcctcgagccagcatggatactgtccatcacatgttactttttggatgcaatatgccttcatccactggaagttactggttttgtgatgaaggaacctgtacagataaagccaatattctgtatgcctgggcgagaaatgctccccctacccggctccccaaaggtgttggattcagagttggaggagagactggaagtaaatactttgtactacaggtacactatggggatattagtgcttttagagataataacaaggactgttctggtgtgtccttacacctcacacgtctgccacagcctttaattgctggcatgtaccttatgatgtctgttgacactgttatcccagcaggagaaaaagtggtgaattctgacatttcatgccattataaaaattatccaatgcatgtctttgcctatagagttcacactcaccatttaggtaaggtagtaagtggatacagagtaagaaatggacagtggacactgattggacggcagagccctcagctgccacaggctttctaccctgtggggcatccagttgatgtaagttttggtgacctactggctgcaagatgtgtattcactggtgaaggaaggacagaagccacacacattggtggcacgtctagtgatgaaatgtgcaacttatacattatgtattacatggaagccaagcatgcagtttctttcatgacctgtacccagaatgtagctccagatatgttcagaaccataccaccagaggccaacattccaattcccgtgaagtctgatatggttatgatgcatgaacatcataaagaaacagaatataaagataagattcctttactacagcagccaaaacgagaagaagaagaagtgttagaccagggtgatttctattcactactttccaagctgctaggagaaagggaagatgttgttcatgtgcacaaatataatcctacagaaaaggcagaatcagagtcagacctggtagctgagattgcaaatgtagtccaaaaaaaggatcttggtcgatctgatgccagagagggtgcagaacatgagaggggtaatgctattcttgtcagagacagaattcacaaattccacagactagtatctaccttgaggccaccagagagcagagttttctcattacagcagcccccacctggtgaaggcacctgggaaccagaacacacaggagatttccacatggaagaggcactggattggcctggagtatacttgttaccaggccaggtttctggggtggctctagaccctaagaataacctggtgattttccacagaggtgaccatgtctgggatggaaactcgtttgacagcaagtttgtttaccagcaaataggactcggaccaattgaagaagacactattcttgtcatagatccaaataatgctgcagtactccagtccagtggaaaaaatctgttttacttgccacatggcttgagtatagataaagatgggaattattgggtcacagacgtggctctccatcaggtgttcaaactggatccaaacaataaagaaggccctgtattaatcctgggaaggagcatgcaaccaggcagtgaccagaatcacttctgtcaacccactgatgtggctgtggatccaggcactggagccatttatgtatcagatggttactgcaacagcaggattgtgcagttttcaccaagtggaaagttcatcacacagtggggagaagagtcttcagggagcagtcctctgccaggccagttcactgttcctcacagcttggctcttgtgcctcttttgggccaattatgtgtggcagaccgggaaaatggtcggatccagtgttttaaaactgacaccaaagaatttgtgagagagattaagcattcatcatttggaagaaatgtatttgcaatttcatatataccaggcttgctctttgcagtgaatgggaagcctcattttggggaccaagaacctgtacaaggatttgtgatgaacttttccaatggggaaattatagacatcttcaagccagtgcgcaagcactttgatatgcctcatgatattgttgcatctgaagatgggactgtgtacattggagatgctcataccaacaccgtgtggaagttcaccttgactgagaaattggaacatcgatcagttaaaaaggctggcattgaggtccaggaaatcaaaggaaagggaagtggaggcttaaaccttggtaatttctttgcaagccgtaagggctacagtcgaaaagggtttgaccggcttagcactgagggcagtgaccaagagaaagaggatgatggaagtgaatcagaagaggagtattcagcacctctgcctgcgctcgcaccttcctcctcctgaaaaccaagctttgatttagattgagtaagatttacccagaatgtcagattcctttccctttagcacgtttaaagttctgtgtatttaattgtaaactgtactagtctgtgtgggactgtacacactttatttacttcgttttggttaagttggcttctgtttctagttgaggagtttcc

SEQ ID NO: 14669 - DNA, 1099 bp, Homo sapiens
  source 1..1099: mol_type = unassigned DNA
gcaggttctgaatgatgactgacgcgggtttgggtgatacccctcacagcccctgtcattccggagtcataaggcacccgcgcgtctagccccagcgccagggcacgcgagcggcgctggagggaggaaagcttccgcctgcgggccggacaaaagtcccgcctgcccacggctttttgcccgccgctcgtgaccgagacgcctcgccgcggccagctcgctgctctcgctggcggatggtgtgtggccgccgcaggacgcccgccgtgcccgggccatgaagtagcggctgctggcggcgccgctgcccaaccgccagccccagccccgcgctgcgctgcccggtcctctcccggcggggtcgtatcggcgtggacatggctggccgcgtccctagcctgctagttctccttgtttttccaagcagctgtttggctttccgaagcccactttctgtctttaagaggtttaaagaaactaccagaccattttccaatgaatgtcttggtaccaccagacccgtagttcctattgattcatcagattttgcattggatattcgcatgcctggggttacacctaaacaggctagcttgactttgagtttaaacctcactgcagaaggggagaaaaccaacagccttttgggcaccagctggtgggatatctattatactctttttgagaaaatggatccaagctcttcgcgaagcagctgtgcgattgctgggaagtgcctaaagaagatccccatccaactccaggagccccatggatttccttatcacctctgtgtggtcagcagccatggtccagcctaccttccctagtgctgtgatctgtccaccactacaggcccgaccctcgtctaattgaatctgtacagcagaatagacatagcaaatgagggttacttcttgagtcaaatacatttgattgggaagagctgcctggaaagtgttaagaattatgagaccacattgggacttgatgggaaacggtgcagcgacccataaacaacatctgccacgaatgtgaaagataaaagtcgctccagtggccagcctctagaaagaagaatcctgggtgaagattgatt

SEQ ID NO: 14670 - DNA, 3684 bp, Homo sapiens
  source 1..3684: mol_type = unassigned DNA
gcaggttctgaatgatgactgacgcgggtttgggtgatacccctcacagcccctgtcattccggagtcataaggcacccgcgcgtctagccccagcgccagggcacgcgagcggcgctggagggaggaaagcttccgcctgcgggccggacaaaagtcccgcctgcccacggctttttgcccgccgctcgtgaccgagacgcctcgccgcggccagctcgctgctctcgctggcggatggtgtgtggccgccgcaggacgcccgccgtgcccgggccatgaagtagcggctgctggcggcgccgctgcccaaccgccagccccagccccgcgctgcgctgcccggtcctctcccggcggggtcgtatcggcgtggacatggctggccgcgtccctagcctgctagttctccttgtttttccaagcagctgtttggctttccgaagcccactttctgtctttaagaggtttaaagaaactaccagaccattttccaatgaatgtcttggtaccaccagacccgtagttcctattgattcatcagattttgcattggatattcgcatgcctggggttacacctaaacagttgacttcaagcctcgagccagcatggatactgtccatcacatgttactttttggatgcaatatgccttcatccactggaagttactggttttgtgatgaaggaacctgtacagataaagccaatattctgtatgcctgggcgagaaatgctccccctacccggctccccaaaggtgttggattcagagttggaggagagactggaagtaaatactttgtactacaggtacactatggggatattagtgcttttagagataataacaaggactgttctggtgtgtccttacacctcacacgtctgccacagcctttaattgctggcatgtaccttatgatgtctgttgacactgttatcccagcaggagaaaaagtggtgaattctgacatttcatgccattataaaaattatccaatgcatgtctttgcctatagagttcacactcaccatttaggtaaggtagtaagtggatacagagtaagaaatggacagtggacactgattggacggcagagccctcagctgccacaggctttctaccctgtggggcatccagttgatgtaagttttggtgacctactggctgcaagatgtgtattcactggtgaaggaaggacagaagccacacacattggtggcacgtctagtgatgaaatgtgcaacttatacattatgtattacatggaagccaagcatgcagtttctttcatgacctgtacccagaatgtagctccagatatgttcagaaccataccaccagaggccaacattccaattcccgtgaagtctgatatggttatgatgcatgaacatcataaagaaacagaatataaagataagattcctttactacagcagccaaaacgagaagaagaagaagtgttagaccagggtgatttctattcactactttccaagctgctaggagaaagggaagatgttgttcatgtgcacaaatataatcctacagaaaaggcagaatcagagtcagacctggtagctgagattgcaaatgtagtccaaaaaaaggatcttggtcgatctgatgccagagagggtgcagaacatgagaggggtaatgctattcttgtcagagacagaattcacaaattccacagactagtatctaccttgaggccaccagagagcagagttttctcattacagcagcccccacctggtgaaggcacctgggaaccagaacacacaggagatttccacatggaagaggcactggattggcctggagtatacttgttaccaggccaggtttctggggtggctctagaccctaagaataacctggtgattttccacagaggtgaccatgtctgggatggaaactcgtttgacagcaagtttgtttaccagcaaataggactcggaccaattgaagaagacactattcttgtcatagatccaaataatgctgcagtactccagtccagtggaaaaaatctgttttacttgccacatggcttgagtatagataaagatgggaattattgggtcacagacgtggctctccatcaggtgttcaaactggatccaaacaataaagaaggccctgtattaatcctgggaaggagcatgcaaccaggcagtgaccagaatcacttctgtcaacccactgatgtggctgtggatccaggcactggagccatttatgtatcagatggttactgcaacagcaggattgtgcagttttcaccaagtggaaagttcatcacacagtggggagaagagtcttcagggagcagtcctctgccaggccagttcactgttcctcacagcttggctcttgtgcctcttttgggccaattatgtgtggcagaccgggaaaatggtcggatccagtgttttaaaactgacaccaaagaatttgtgagagagattaagcattcatcatttggaagaaatgtatttgcaatttcatatataccaggcttgctctttgcagtgaatgggaagcctcattttggggaccaagaacctgtacaaggatttgtgatgaacttttccaatggggaaattatagacatcttcaagccagtgcgcaagcactttgatatgcctcatgatattgttgcatctgaagatgggactgtgtacattggagatgctcataccaacaccgtgtggaagttcaccttgactgagaaattggaacatcgatcagttaaaaaggctggcattgaggtccaggaaatcaaagccgaggcagttgttgaaaccaaaatggagaacaaacccacctcctcagaattgcagaagatgcaagagaaacagaaactgatcaaagagccaggctcgggagtgcctgttgttctcattacaacccttctggttattccggtggttgtcctgctggccattgccatatttattcggtggaaaaaatcaagggcctttggagattctgaacacaaactcgagacgagttcaggaagagtactgggaagatttagaggaaagggaagtggaggcttaaaccttggtaatttctttgcaagccgtaagggctacagtcgaaaagggtttgaccggcttagcactgagggcagtgaccaagagaaagaggatgatggaagtgaatcagaagaggagtattcagcacctctgcctgcgctcgcaccttcctcctcctgaaaaccaagctttgatttagattgagtaagatttacccagaatgtcagattcctttccctttagcacgtttaaagttctgtgtatttaattgtaaactgtactagtctgtgtgggactgtacacactttatttacttcgttttggttaagttggcttctgtttctagttgaggagtttcctaaaagttcataacagtgccattgtctttatatgaacatagactagagaaaccgtcctctttttccatcataattctaatctaacaatggaagatttgcccatttacacttttgagactttttggtggatgtaaataaccccattctttgcttgaacacagtattttcccaatagcactttcattgccagtgtctttctttggtgcctttcctgttcagcattcttagcctgtggcagtaaagagaaactttgtgctacatgacgac

SEQ ID NO: 14671 - DNA, 3622 bp, Homo sapiens
  source 1..3622: mol_type = unassigned DNA
gttctgaatgatgactgacgcgggtttgggtgatacccctcacagcccctgtcattccggagtcataaggcacccgcgcgtctagccccagcgccagggcacgcgagcggcgctggagggaggaaagcttccgcctgcgggccggacaaaagtcccgcctgcccacggctttttgcccgccgctcgtgaccgagacgcctcgccgcggccagctcgctgctctcgctggcggatggtgtgtggccgccgcaggacgcccgccgtgcccgggccatgaagtagcggctgctggcggcgccgctgcccaaccgccagccccagccccgcgctgcgctgcccggtcctctcccggcggggtcgtatcggcgtggacatggctggccgcgtccctagcctgctagttctccttgtttttccaagcagctgtttggctttccgaagcccactttctgtctttaagaggtttaaagaaactaccagaccattttccaatgaatgtcttggtaccaccagacccgtagttcctattgattcatcagattttgcattggatattcgcatgcctggggttacacctaaacagtccgatacatacttctgcatgtctatgcgaataccagtggatgaggaagccttcgtgattgacttcaagcctcgagccagcatggatactgtccatcacatgttactttttggatgcaatatgccttcatccactggaagttactggttttgtgatgaaggaacctgtacagataaagccaatattctgtatgcctgggcgagaaatgctccccctacccggctccccaaaggtgttggattcagagttggaggagagactggaagtaaatactttgtactacaggtacactatggggatattagtgcttttagagataataacaaggactgttctggtgtgtccttacacctcacacgtctgccacagcctttaattgctggcatgtaccttatgatgtctgttgacactgttatcccagcaggagaaaaagtggtgaattctgacatttcatgccattataaaaattatccaatgcatgtctttgcctatagagttcacactcaccatttaggtaaggtagtaagtggatacagagtaagaaatggacagtggacactgattggacggcagagccctcagctgccacaggctttctaccctgtggggcatccagttgatgtaagttttggtgacctactggctgcaagatgtgtattcactggtgaaggaaggacagaagccacacacattggtggcacgtctagtgatgaaatgtgcaacttatacattatgtattacatggaagccaagcatgcagtttctttcatgacctgtacccagaatgtagctccagatatgttcagaaccataccaccagaggccaacattccaattcccgtgaagtctgatatggttatgatgcatgaacatcataaagaaacagaatataaagataagattcctttactacagcagccaaaacgagaagaagaagaagtgttagaccaggatttccacatggaagaggcactggattggcctggagtatacttgttaccaggccaggtttctggggtggctctagaccctaagaataacctggtgattttccacagaggtgaccatgtctgggatggaaactcgtttgacagcaagtttgtttaccagcaaataggactcggaccaattgaagaagacactattcttgtcatagatccaaataatgctgcagtactccagtccagtggaaaaaatctgttttacttgccacatggcttgagtatagataaagatgggaattattgggtcacagacgtggctctccatcaggtgttcaaactggatccaaacaataaagaaggccctgtattaatcctgggaaggagcatgcaaccaggcagtgaccagaatcacttctgtcaacccactgatgtggctgtggatccaggcactggagccatttatgtatcagatggttactgcaacagcaggattgtgcagttttcaccaagtggaaagttcatcacacagtggggagaagagtcttcagggagcagtcctctgccaggccagttcactgttcctcacagcttggctcttgtgcctcttttgggccaattatgtgtggcagaccgggaaaatggtcggatccagtgttttaaaactgacaccaaagaatttgtgagagagattaagcattcatcatttggaagaaatgtatttgcaatttcatatataccaggcttgctctttgcagtgaatgggaagcctcattttggggaccaagaacctgtacaaggatttgtgatgaacttttccaatggggaaattatagacatcttcaagccagtgcgcaagcactttgatatgcctcatgatattgttgcatctgaagatgggactgtgtacattggagatgctcataccaacaccgtgtggaagttcaccttgactgagaaattggaacatcgatcagttaaaaaggctggcattgaggtccaggaaatcaaagaagccgaggcagttgttgaaaccaaaatggagaacaaacccacctcctcagaattgcagaagatgcaagagaaacagaaactgatcaaagagccaggctcgggagtgcctgttgttctcattacaacccttctggttattccggtggttgtcctgctggccattgccatatttattcggtggaaaaaatcaagggcctttggagattctgaacacaaactcgagacgagttcaggaagagtactgggaagatttagaggaaagggaagtggaggcttaaaccttggtaatttctttgcaagccgtaagggctacagtcgaaaagggtttgaccggcttagcactgagggcagtgaccaagagaaagaggatgatggaagtgaatcagaagaggagtattcagcacctctgcctgcgctcgcaccttcctcctcctgaaaaccaagctttgatttagattgagtaagatttacccagaatgtcagattcctttccctttagcacgtttaaagttctgtgtatttaattgtaaactgtactagtctgtgtgggactgtacacactttatttacttcgttttggttaagttggcttctgtttctagttgaggagtttcctaaaagttcataacagtgccattgtctttatatgaacatagactagagaaaccgtcctctttttccatcataattctaatctaacaatggaagatttgcccatttacacttttgagactttttggtggatgtaaataaccccattctttgcttgaacacagtattttcccaatagcactttcattgccagtgtctttctttggtgcctttcctgttcagcattcttagcctgtggcagtaaagagaaactttgtgctacatgacgacaaagctgctaaatctcctatttttttaaaatcactaacattatattgcaatgaaggaaataaaaaagtctctatttaaattcttttttaaattttcttcagttggtgtgtttttgggatgtcttatttttagatggttacactgttagaacactattttcagaatctgaatgtaatttgtgtaataaagtgttttcagagca

SEQ ID NO: 14672 - DNA, 3156 bp, Homo sapiens
  source 1..3156: mol_type = unassigned DNA
gaccgagacgcctcgccgcggccagctcgctgctctcgctggcggatggtgtgtggccgccgcaggacgcccgccgtgcccgggccatgaagtagcggctgctggcggcgccgctgcccaaccgccagccccagccccgcgctgcgctgcccggtcctctcccggcggggtcgtatcggcgtggacatggctggccgcgtccctagcctgctagttctccttgtttttccaagcagctgtttggctttccgaagcccactttctgtctttaagaggtttaaagaaactaccagaccattttccaatgaatgtcttggtaccaccagacccgtagttcctattgattcatcagattttgcattggatattcgcatgcctggggttacacctaaacagtccgatacatacttctgcatgtctatgcgaataccagtggatgaggaagccttcgtgattgacttcaagcctcgagccagcatggatactgtccatcacatgttactttttggatgcaatatgccttcatccactggaagttactggttttgtgatgaaggaacctgtacagataaagccaatattctgtatgcctgggcgagaaatgctccccctacccggctccccaaaggtgttggattcagagttggaggagagactggaagtaaatactttgtactacaggtacactatggggatattagtgcttttagagataataacaaggactgttctggtgtgtccttacacctcacacgtctgccacagcctttaattgctggcatgtaccttatgatgtctgttgacactgttatcccagcaggagaaaaagtggtgaattctgacatttcatgccattataaaaattatccaatgcatgtctttgcctatagagttcacactcaccatttaggtaaggtagtaagtggatacagagtaagaaatggacagtggacactgattggacggcagagccctcagctgccacaggctttctaccctgtggggcatccagttgatgtaagttttggtgacctactggctgcaagatgtgtattcactggtgaaggaaggacagaagccacacacattggtggcacgtctagtgatgaaatgtgcaacttatacattatgtattacatggaagccaagcatgcagtttctttcatgacctgtacccagaatgtagctccagatatgttcagaaccataccaccagaggccaacattccaattcccgtgaagtctgatatggttatgatgcatgaacatcataaagaaacagaatataaagataagattcctttactacagcagccaaaacgagaagaagaagaagtgttagaccagggtgatttctattcactactttccaagctgctaggagaaagggaagatgttgttcatgtgcacaaatataatcctacagaaaaggcagaatcagagtcagacctggtagctgagattgcaaatgtagtccaaaaaaaggatcttggtcgatctgatgccagagagggtgcagaacatgagaggggtaatgctattcttgtcagagacagaattcacaaattccacagactagtatctaccttgaggccaccagagagcagagttttctcattacagcagcccccacctggtgaaggcacctgggaaccagaacacacaggagatttccacatggaagaggcactggattggcctggagtatacttgttaccaggccaggtttctggggtggctctagaccctaagaataacctggtgattttccacagaggtgaccatgtctgggatggaaactcgtttgacagcaagtttgtttaccagcaaataggactcggaccaattgaagaagacactattcttgtcatagatccaaataatgctgcagtactccagtccagtggaaaaaatctgttttacttgccacatggcttgagtatagataaagatgggaattattgggtcacagacgtggctctccatcaggtgttcaaactggatccaaacaataaagaaggccctgtattaatcctgggaaggagcatgcaaccaggcagtgaccagaatcacttctgtcaacccactgatgtggctgtggatccaggcactggagccatttatgtatcagatggttactgcaacagcaggattgtgcagttttcaccaagtggaaagttcatcacacagtggggagaagagtcttcagggagcagtcctctgccaggccagttcactgttcctcacagcttggctcttgtgcctcttttgggccaattatgtgtggcagaccgggaaaatggtcggatccagtgttttaaaactgacaccaaagaatttgtgagagagattaagcattcatcatttggaagaaatgtatttgcaatttcatatataccaggcttgctctttgcagtgaatgggaagcctcattttggggaccaagaacctgtacaaggatttgtgatgaacttttccaatggggaaattatagacatcttcaagccagtgcgcaagcactttgatatgcctcatgatattgttgcatctgaagatgggactgtgtacattggagatgctcataccaacaccgtgtggaagttcaccttgactgagaaattggaacatcgatcagttaaaaaggctggcattgaggtccaggaaatcaaagaagccgaggcagttgttgaaaccaaaatggagaacaaacccacctcctcagaattgcagaagatgcaagagaaacagaaactgatcaaagagccaggctcgggagtgcctgttgttctcattacaacccttctggttattccggtggttgtcctgctggccattgccatatttattcggtggaaaaaatcaagggcctttggagcagattctgaacacaaactcgagacgagttcaggaagagtactgggaagatttagaggaaagggaagtggaggcttaaaccttggtaatttctttgcaagccgtaagggctacagtcgaaaagggtttgaccggcttagcactgagggcagtgaccaagagaaagaggatgatggaagtgaatcagaagaggagtattcagcacctctgcctgcgctcgcaccttcctcctcctgaaaaccaagctttgatttagattgagtaagatttacccagaatgtc

SEQ ID NO: 14673 - DNA, 2898 bp, Homo sapiens
  source 1..2898: mol_type = unassigned DNA
ggcgccgctgcccaaccgccagccccagccccgcgctgcgctgcccggtcctctcccggcggggtcgtatcggcgtggacatggctggccgcgtccctagcctgctagttctccttgtttttccaagcagctgtttggctttccgaagcccactttctgtctttaagaggtttaaagaaactaccagaccattttccaatgaatgtcttggtaccaccagacccgtagttcctattgattcatcagattttgcattggatattcgcatgcctggggttacacctaaacagtccgatacatacttctgcatgtctatgcgaataccagtggatgaggaagccttcgtgattgacttcaagcctcgagccagcatggatactgtccatcacatgttactttttggatgcaatatgccttcatccactggaagttactggttttgtgatgaaggaacctgtacagataaagccaatattctgtatgcctgggcgagaaatgctccccctacccggctccccaaaggtgttggattcagagttggaggagagactggaagtaaatactttgtactacaggtacactatggggatattagtgcttttagagataataacaaggactgttctggtgtgtccttacacctcacacgtctgccacagcctttaattgctggcatgtaccttatgatgtctgttgacactgttatcccagcaggagaaaaagtggtgaattctgacatttcatgccattataaaaattatccaatgcatgtctttgcctatagagttcacactcaccatttaggtaaggtagtaagtggatacagagtaagaaatggacagtggacactgattggacggcagagccctcagctgccacaggctttctaccctgtggggcatccagttgatgtaagttttggtgacctactggctgcaagatgtgtattcactggtgaaggaaggacagaagccacacacattggtggcacgtctagtgatgaaatgtgcaacttatacattatgtattacatggaagccaagcatgcagtttctttcatgacctgtacccagaatgtagctccagatatgttcagaaccataccaccagaggccaacattccaattcccgtgaagtctgatatggttatgatgcatgaacatcataaagaaacagaatataaagataagattcctttactacagcagccaaaacgagaagaagaagaagtgttagaccagggtgatttctattcactactttccaagctgctaggagaaagggaagatgttgttcatgtgcacaaatataatcctacagaaaaggcagaatcagagtcagacctggtagctgagattgcaaatgtagtccaaaaaaaggatcttggtcgatctgatgccagagagggtgcagaacatgagaggggtaatgctattcttgtcagagacagaattcacaaattccacagactagtatctaccttgaggccaccagagagcagagttttctcattacagcagcccccacctggtgaaggcacctgggaaccagaacacacaggagatttccacatggaagaggcactggattggcctggagtatacttgttaccaggccaggtttctggggtggctctagaccctaagaataacctggtgattttccacagaggtgaccatgtctgggatggaaactcgtttgacagcaagtttgtttaccagcaaataggactcggaccaattgaagaagacactattcttgtcatagatccaaataatgctgcagtactccagtccagtggaaaaaatctgttttacttgccacatggcttgagtatagataaagatgggaattattgggtcacagacgtggctctccatcaggtgttcaaactggatccaaacaataaagaaggccctgtattaatcctgggaaggagcatgcaaccaggcagtgaccagaatcacttctgtcaacccactgatgtggctgtggatccaggcactggagccatttatgtatcagatggttactgcaacagcaggattgtgcagttttcaccaagtggaaagttcatcacacagtggggagaagagtcttcagggagcagtcctctgccaggccagttcactgttcctcacagcttggctcttgtgcctcttttgggccaattatgtgtggcagaccgggaaaatggtcggatccagtgttttaaaactgacaccaaagaatttgtgagagagattaagcattcatcatttggaagaaatgtatttgcaatttcatatataccaggcttgctctttgcagtgaatgggaagcctcattttggggaccaagaacctgtacaaggatttgtgatgaacttttccaatggggaaattatagacatcttcaagccagtgcgcaagcactttgatatgcctcatgatattgttgcatctgaagatgggactgtgtacattggagatgctcataccaacaccgtgtggaagttcaccttgactgagaaattggaacatcgatcagttaaaaaggctggcattgaggtccaggaaatcaaagattctgaacacaaactcgagacgagttcaggaagagtactgggaagatttagaggaaagggaagtggaggcttaaaccttggtaatttctttgcaagccgtaagggctacagtcgaaaagggtttgaccggcttagcactgagggcagtgaccaagagaaagaggatgatggaagtgaatcagaagaggagtattcagcacctctgcctgcgctcgcaccttcctcctcctgaaaaccaagctttgatttagattgagtaagatttacccagaatgtcagattcctttccctttagcacgtttaaagttctgtgtatttaattgtaaactgta

SEQ ID NO: 14674 - DNA, 607 bp, Homo sapiens
  source 1..607: mol_type = unassigned DNA
ataacagctcgaagaataaaatataaggatacatcagtgtcgaggagaagcagatcatagactgtaatagctcacaaggaaacactgagctgtatacaaacgcctcataattactttattaaatatttatgtttaaagaaactaccagaccattttccaatgaatgtcttggtaccaccagacccgtagttcctattgattcatcagattttgcattggatattcgcatgcctggggttacacctaaacagtccgatacatacttctgcatgtctatgcgaataccagtggatgaggaagccttcgtgattgacttcaagcctcgagccagcatggatactgtccatcacatgttactttttggatgcaatatgccttcatccactggaagttactggttttgtgatgaaggaacctgtacagataaagccaatattctgtatgcctgggcgagaaatgctccccctacccggctccccaaaggtgttggattcagagttggaggagagactggaagtaaatactttgtactacaggtacactatggggatattagtgcttttagagataataacaaggactgttctggtgtgtccttacacctcac

SEQ ID NO: 14675 - DNA, 520 bp, Homo sapiens
  source 1..520: mol_type = unassigned DNA
tcaggggaacttgatgaaaagcatgaaccactagcttaaagttgggaaagtccgatacatacttctgcatgtctatgcgaataccagtggatgaggaagccttcgtgattgacttcaagcctcgagccagcatggatactgtccatcacatgttactttttggatgcaatatgccttcatccactggaagttactggttttgtgatgaaggaacctgtacagataaagccaatattctgtatgcctgggcgagaaatgctccccctacccggctccccaaaggtgttggattcagagttggaggagagactggaagtaaatactttgtactacaggtacactatggggatattagtgcttttagagataataacaaggactgttctggtgtgtccttacacctcacacgtctgccacagcctttaattgctggcatgtaccttatgatgtctgttgacactgttatcccagcaggagaaaaagtggtgaattctgacatttcatgccattataaaaatta

SEQ ID NO: 14676 - DNA, 2567 bp, Homo sapiens
  source 1..2567: mol_type = unassigned DNA
aatgcatgtctttgcctatagagttcacactcaccatttaggtaaggtagtaagtggatacagagtaagaaatggacagtggacactgattggacggcagagccctcagctgccacaggctttctaccctgtggggcatccagttgatgtaagttttggtgacctactggctgcaagatgtgtattcactggtgaaggaaggacagaagccacacacattggtggcacgtctagtgatgaaatgtgcaacttatacattatgtattacatggaagccaagcatgcagtttctttcatgacctgtacccagaatgtagctccagatatgttcagaaccataccaccagaggccaacattccaattcccgtgaagtctgatatggttatgatgcatgaacatcataaagaaacagaatataaagataagattcctttactacagcagccaaaacgagaagaagaagaagtgttagaccagggtgatttctattcactactttccaagctgctaggagaaagggaagatgttgttcatgtgcacaaatataatcctacagaaaaggcagaatcagagtcagacctggtagctgagattgcaaatgtagtccaaaaaaaggatcttggtcgatctgatgccagagagggtgcagaacatgagaggggtaatgctattcttgtcagagacagaattcacaaattccacagactagtatctaccttgaggccaccagagagcagagttttctcattacagcagcccccacctggtgaaggcacctgggaaccagaacacacaggagatttccacatggaagaggcactggattggcctggagtatacttgttaccaggccaggtttctggggtggctctagaccctaagaataacctggtgattttccacagaggtgaccatgtctgggatggaaactcgtttgacagcaagtttgtttaccagcaaataggactcggaccaattgaagaagacactattcttgtcatagatccaaataatgctgcagtactccagtccagtggaaaaaatctgttttacttgccacatggcttgagtatagataaagatgggaattattgggtcacagacgtggctctccatcaggtgttcaaactggatccaaacaataaagaaggccctgtattaatcctgggaaggagcatgcaaccaggcagtgaccagaatcacttctgtcaacccactgatgtggctgtggatccaggcactggagccatttatgtatcagatggttactgcaacagcaggattgtgcagttttcaccaagtggaaagttcatcacacagtggggagaagagtcttcagggagcagtcctctgccaggccagttcactgttcctcacagcttggctcttgtgcctcttttgggccaattatgtgtggcagaccgggaaaatggtcggatccagtgttttaaaactgacaccaaagaatttgtgagagagattaagcattcatcatttggaagaaatgtatttgcaatttcatatataccaggcttgctctttgcagtgaatgggaagcctcattttggggaccaagaacctgtacaaggatttgtgatgaacttttccaatggggaaattatagacatcttcaagccagtgcgcaagcactttgatatgcctcatgatattgttgcatctgaagatgggactgtgtacattggagatgctcataccaacaccgtgtggaagttcaccttgactgagaaattggaacatcgatcagttaaaaaggctggcattgaggtccaggaaatcaaagcagattctgaacacaaactcgagacgagttcaggaagagtactgggaagatttagaggaaagggaagtggaggcttaaaccttggtaatttctttgcaagccgtaagggctacagtcgaaaagggtttgaccggcttagcactgagggcagtgaccaagagaaagaggatgatggaagtgaatcagaagaggagtattcagcacctctgcctgcgctcgcaccttcctcctcctgaaaaccaagctttgatttagattgagtaagatttacccagaatgtcagattcctttccctttagcacgtttaaagttctgtgtatttaattgtaaactgtactagtctgtgtgggactgtacacactttatttacttcgttttggttaagttggcttctgtttctagttgaggagtttcctaaaagttcataacagtgccattgtctttatatgaacatagactagagaaaccgtcctctttttccatcataattctaatctaacaatggaagatttgcccatttacacttttgagactttttggtggatgtaaataaccccattctttgcttgaacacagtattttcccaatagcactttcattgccagtgtctttctttggtgcctttcctgttcagcattcttagcctgtggcagtaaagagaaactttgtgctacatgacgacaaagctgctaaatctcctatttttttaaaatcactaacattatattgcaatgaaggaaataaaaaagtctctatttaaattct

SEQ ID NO: 14677 - DNA, 857 bp, Homo sapiens
  source 1..857: mol_type = unassigned DNA
cagaggccaacattccaattcccgtgaagtctgatatggttatgatgcatgaacatcataaagaaacagaatataaagataagattcctttactacagcagccaaaacgagaagaagaagaagtgttagaccagggtgatttctattcactactttccaagctgctaggagaaagggaagatgttgttcatgtgcacaaatataatcctacagaaaaggcagaatcagagtcagacctggtagctgagattgcaaatgtagtccaaaaaaaggatcttggtcgatctgatgccagagagggtgcagaacatgagaggggtaatgctattcttgtcagagacagaattcacaaattccacagactagtatctaccttgaggccaccagagagcagagttttctcattacagcagcccccacctggtgaaggcacctgggaaccagaacacacaggaggtgcgtgtagggtttcttttaagcagtaaagtgtgaaatgctacaatccacgttagcaaaacctgaagggaataagaattaatgggtgaaaaaattcatcaatgaaaaggacttatcattagaaaaaaattactcagatttgggctatcagataacatctttgaagatttttttttgttttggttttggtctattactgcataaatttagtgtctgttctattggtgagccagaactacaaggaccaaaaaatatttggatcatttggggaaaggaggcatatgaaattcaggataaaaattcttacaattgaatatttttcattttgctcaatggaaatacattgaaaatttaaaacctgatatgtaaagtcccagtttaagaaatgctcatatactgtc

SEQ ID NO: 14678 - DNA, 880 bp, Homo sapiens
  source 1..880: mol_type = unassigned DNA
cagaatttactcaggagatgatagattagatagatagatagatagatagatagatagatagatagatgagggaaaaggacagaggaacacagagtgccaggcttattgcccattcttcctatttatttaaaacatttaaaagcgttgtattaaaatgccatgtatgttgtcgtattttccaaagagagtaaagtaaaaatcttgttgagaagaaggctgtctcaaatttaccctttaatgacttgggttagctggctttacaggcatcttatcaaaaggagaagaaaacagtcctaatgcaagttcccagtcacttcatcactcagaaagctacttggaatgtgcatgtggtataatttatgtagagcacggcttgattgtctttttttatttctttgcatctagtgatgttattgcatgagcttcttgtaactattatgaatcctcatgaggcaattcgacctttcccttttacactaaatgtgtggatatatcttttagatttccacatggaagaggcactggattggcctggagtatacttgttaccaggccaggtttctggggtggctctagaccctaagaataacctggtgattttccacagaggtgaccatgtctgggatggaaactcgtttgacagcaagtttgtttaccagcaaataggactcggaccaattgaagaagacactattcttgtcatagatccaaataatgctgcagtactccagtccagtggaaaaaatctgttttacttgccacatggcttgagtatagataaagatgggaattattgggtcacagacgtggctctccatcaggtgttcaaactggatccaaacaataaagaaggccctgtattaatcctgggaaggagcat

SEQ ID NO: 14679 - DNA, 810 bp, Homo sapiens
  source 1..810: mol_type = unassigned DNA
gcagagtcttcagggagcagtcctctgccaggccagttcactgttcctcacagcttggctcttgtgcctcttttgggccaattatgtgtggcagaccgggaaaatggtcggatccagtgttttaaaactgacaccaaagaatttgtgagagagattaagcattcatcatttggaagaaatgtatttgcaatttcatatataccaggcttgctctttgcagtgaatgggaagcctcattttggggaccaagaacctgtacaaggatttgtgatgaacttttccaatggggaaattatagacatcttcaagccagtgcgcaagaattggaacatcgatcagttaaaaaggctggcattgaggtccaggaaatcaaagattctgaacacaaactcgagacgagttcaggaagagtactgggaagatttagaggaaagggaagtggaggcttaaaccttggtaatttctttgcaagccgtaagggctacagtcgaaaagggtttgaccggcttagcactgagggcagtgaccaagagaaagaggatgatggaagtgaatcagaagaggagtattcagcacctctgcctgcgctcgcaccttcctcctcctgaaaaccaagctttgatttagattgagtaagatttacccagaatgtcagattcctttccctttagcacgtttaaagttctgtgtatttaattgtaaactgtactagtctgtgtgggactgtacacactttatttacttcgttttggttaagttggcttctgtttctagttgaggagtttcctaaaagttcataacagtgccatt

SEQ ID NO: 14680 - DNA, 631 bp, Homo sapiens
  source 1..631: mol_type = unassigned DNA
ggcagaccgggaaaatggtcggatccagtgttttaaaactgacaccaaagaatttgtgagagagattaagcattcatcatttggaagaaatgtatttgcaatttcatatataccaggcttgctctttgcagtgaatgggaagcctcattttggggaccaagaacctgtacaaggatttgtgatgaacttttccaatggggaaattatagacatcttcaagccagtgcgcaagcactttgatatgcctcatgatattgttgcatctgaagatgggactgtgtacattggagatgctcataccaacaccgtgtggaagttcaccttgactgagaaattggaacatcgatcagttaaaaaggctggcattgaggtccaggaaatcaaagaagccgaggcagttgttgaaaccaaaatggagaacaaacccacctcctcagaattgcagaagatgcaagagaaacagaaactgatcaaagagccaggctcgggagtgcctgttgttctcattacaacccttctggttattccggtggttgtcctgctggccattgccatatttattcggtggaaaaaatcaagggcctttggagcagattctgaacacaaactcgagacgagttcaggaagagta

SEQ ID NO: 14681 - DNA, 1417 bp, Homo sapiens
  source 1..1417: mol_type = unassigned DNA
gtcggatccagtgttttaaaactgacaccaaagaatttgtgagagagattaagcattcatcatttggaagaaatgtatttgcaatttcatatataccaggcttgctctttgcagtgaatgggaagcctcattttggggaccaagaacctgtacaaggatttgtgatgaacttttccaatggggaaattatagacatcttcaagccagtgcgcaagcactttgatatgcctcatgatattgttgcatctgaagatgggactgtgtacattggagatgctcataccaacaccgtgtggaagttcaccttgactgagaaattggaacatcgatcagttaaaaaggctggcattgaggtccaggaaatcaaagaagccgaggcagttgttgaaaccaaaatggagaacaaacccacctcctcagaattgcagaagatgcaagagaaacagaaactgatcaaagagccaggctcgggagtgcctgttgttctcattacaacccttctggttattccggtggttgtcctgctggccattgccatatttattcggtggaaaaaatcaagggcctttggaggaaagggaagtggaggcttaaaccttggtaatttctttgcaagccgtaagggctacagtcgaaaagggtttgaccggcttagcactgagggcagtgaccaagagaaagaggatgatggaagtgaatcagaagaggagtattcagcacctctgcctgcgctcgcaccttcctcctcctgaaaaccaagctttgatttagattgagtaagatttacccagaatgtcagattcctttccctttagcacgtttaaagttctgtgtatttaattgtaaactgtactagtctgtgtgggactgtacacactttatttacttcgttttggttaagttggcttctgtttctagttgaggagtttcctaaaagttcataacagtgccattgtctttatatgaacatagactagagaaaccgtcctctttttccatcataattctaatctaacaatggaagatttgcccatttacacttttgagactttttggtggatgtaaataaccccattctttgcttgaacacagtattttcccaatagcactttcattgccagtgtctttctttggtgcctttcctgttcagcattcttagcctgtggcagtaaagagaaactttgtgctacatgacgacaaagctgctaaatctcctatttttttaaaatcactaacattatattgcaatgaaggaaataaaaaagtctctatttaaattcttttttaaattttcttcagttggtgtgtttttgggatgtcttatttttagatggttacactgttagaacactattttcagaatctgaatgtaatttgtgtaataaagtgttttcagagcattagctgtcagtgtatt

SEQ ID NO: 14682 - DNA, 923 bp, Homo sapiens
  source 1..923: mol_type = unassigned DNA
gtgttttaaaactgacaccaaagaatttgtgagagagattaagcattcatcatttggaagaaatgtatttgcaatttcatatataccaggcttgctctttgcagtgaatgggaagcctcattttggggaccaagaacctgtacaaggatttgtgatgaacttttccaatggggaaattatagacatcttcaagccagtgcgcaagcactttgatatgcctcatgatattgttgcatctgaagatgggactgtgtacattggagatgctcataccaacaccgtgtggaagttcaccttgactgagaaattggaacatcgatcagttaaaaaggctggcattgaggtccaggaaatcaaagccgaggcagttgttgaaaccaaaatggagaacaaacccacctcctcagaattgcagaagatgcaagagaaacagaaactgatcaaagagccaggctcgggagtgcctgttgttctcattacaacccttctggttattccggtggttgtcctgctggccattgccatatttattcggtggaaaaaatcaagggcctttggagcagattctgaacacaaactcgagacgagttcaggaagagtactgggaagatttagaggaaagggaagtggaggcttaaaccttggtaatttctttgcaagccgtaagggctacagtcgaaaagggtttgaccggcttagcactgagggcagtgaccaagagaaagaggatgatggaagtgaatcagaagaggagtattcagcacctctgcctgcgctcgcaccttcctcctcctgaaaaccaagctttgatttagattgagtaagatttacccagaatgtcagattcctttccctttagcacgtttaaagttctgtgtatttaattgtaaactgtactagtctgtgtgggactgtacacactt

SEQ ID NO: 14683 - DNA, 2964 bp, Homo sapiens
  source 1..2964: mol_type = unassigned DNA
atgcaccacctcctggagcagtcggcggacatggcgaccgcgctgctggcgggagagaagctgcgggagctgatcctgccgggcgcgcaggacgacaaggcgggcgcgctggccgcgctgcttctgcagctgaagctggagctgccgttcgaccgggtggtcaccatcggcaccgtgctggtgcccatcctgctggtcaccctggtcttcaccaagaacttcgcagaggaacccatttactgttacaccccgcacaacttcacgcgcgaccaggcgctgtacgcccgcggctactgctggacggagctgcgggacgcgctgcccggcgtggacgccagcctgtggccgtcgctgtttgagcacaagttcctgccctacgcgctgctggccttcgccgccatcatgtacgtgcccgcgctgggctgggagttcctggcctccacgcgcctcacctccgagctcaacttcctgctgcaggagatcgacaactgttaccaccgggcggccgagggccgcgcgcccaagatcgagaagcagatccagtccaagggcccgggcatcacggagcgcgagaagcgcgagatcatcgagaacgcggagaaggagaagagcccggagcagaacctgttcgagaagtacctggagcgccgcggccgcagcaacttcctggccaagctgtacctggcgcggcacgtgctgatcctgctgctgagcgccgtgcccatctcctacctgtgcacctactacgccacgcagaagcagaacgagttcacctgcgcgctgggcgcgtccccggacggggcggcaggtgcggggcccgcggtgcgcgtgagctgcaagctcccgtccgtgcaactgcagcgcatcatcgcgggcgtggacatcgtgctgctgtgcgtcatgaacctcatcatcctcgtcaacctcatccacctcttcatcttccgcaagagcaacttcatcttcgacaagctgcacaaggtgggcatcaagacgcgccggcagtggcgccgctcgcagttctgcgacatcaacatcctggccatgttctgcaacgagaaccgcgaccacatcaagtcgctcaaccggctggacttcatcaccaacgagagcgacctcatgtacgacaacgtggtccggcagctgctggcggcgctggcgcagtccaaccacgacgccacccccacggtgcgcgactcgggggtgcagaccgtggaccccagcgccaaccccgccgagcccgacggcgccgccgagccgcccgtggtcaagcggccgcgcaagaagatgaagtggatccccaccagcaacccgcttccgcagcccttcaaggagccgctggccatcatgcgcgtggagaacagcaaggcggagaagccgaagcccgcgcgcaggaagacggccacggacacgctgatcgcgccgctgctggaccgctccgcccaccactacaagggcggagggggcgacccgggccccggccccgcccctgcccccgccccgccgcccgcccctgacaagaagcacgcgcgccacttctccctggacgtgcacccctacatcctcggcaccaagaaggccaaggccgaggcggtgcccgccgccctgcccgcctcccggagccaggaggggggcttcctgtcccaggcggaggactgtgggctaggcctggccccggcgcccatcaaagatgctccgctccccgagaaggaaatcccgtaccccacagagccagcccgggcagggcttccctcggggggcccgttccacgtccgctcacctcccgccgcccctgctgtggcccctctgacaccagccagcctgggcaaggcggagcccctcaccatcctgagccgaaacgccacacacccgctgctgcacatcaacacgctatcctcatcgccaccttcgacgagccgagaacggtcgtgagtactgtggagttttgagggatggcaccgtccaggccgccgagagcccctctgcctgtgtcgtgtggcctggccagcctcccggtggacaccagccctgcgtggacgtggcctgtgcttcgcccgcactgcgcgcatccccaacctctgtccgcatgcctggggccttcgcccccacgtgctcgacaggggaacccgcccggacggcatcgccaggcactggctggggtggggaaaggtggcccagtggagccggtggccaggaaggctgaagcccgcttcccatgctcctgcatcaggtgcccagccgtgggtgggggccctgaggtgaagagtttatttttttagtccgtttcgtcctggccccgggctgtggcgagacagcccaactcccccagcccagctcccccagcccagagccagggaagaggaaggtggggccagtcccaccagtggggtggccacgcccatggggtcacatgctcaggggtcaccccctgcagggacctgatgccctcgggtgggagggaccgaggtccaccctcgggtcaaaggtcaacgtgcactttctccttgtcgcctgacagacattttattttactaagactgctgtaccgaacaagcatatttatcatcaggagacaggatgggtttaaagcaggatggtgtgtgtgtgaacgggcatgagcagaggtgagcgtgagcgagcgggtgtgtatgtacgagtgtgcacgtgtgtgcgtgtgcacagagggtgtggtgccagcttgagtgggagtgtgtgagtgtgagcaggcgggcgagtgcgtgagtgcacgccagcgcgtggcccatgtatgaggagtgaaggggcccaacgcaataaccacgtcccccacccgggccccccgccgcggctgaggccacatggcttcctgtgggagccccggccggcacccggctggtcccaccccaaatacctcagccatggagaccatgtcatgcagaattaacaaggtagcaccgagcatatcaataaatattattctgataa

SEQ ID NO: 14684 - DNA, 3051 bp, Homo sapiens
  source 1..3051: mol_type = unassigned DNA
atgcaccacctcctggagcagtcggcggacatggcgaccgcgctgctggcgggagagaagctgcgggagctgatcctgccgggcgcgcaggacgacaaggcgggcgcgctggccgcgctgcttctgcagctgaagctggagctgccgttcgaccgggtggtcaccatcggcaccgtgctggtgcccatcctgctggtcaccctggtcttcaccaagaacttcgcagaggaacccatttactgttacaccccgcacaacttcacgcgcgaccaggcgctgtacgcccgcggctactgctggacggagctgcgggacgcgctgcccggcgtggacgccagcctgtggccgtcgctgtttgagcacaagttcctgccctacgcgctgctggccttcgccgccatcatgtacgtgcccgcgctgggctgggagttcctggcctccacgcgcctcacctccgagctcaacttcctgctgcaggagatcgacaactgttaccaccgggcggccgagggccgcgcgcccaagatcgagaagcagatccagtccaagggcccgggcatcacggagcgcgagaagcgcgagatcatcgagaacgcggagaaggagaagagcccggagcagaacctgttcgagaagtacctggagcgccgcggccgcagcaacttcctggccaagctgtacctggcgcggcacgtgctgatcctgctgctgagcgccgtgcccatctcctacctgtgcacctactacgccacgcagaagcagaacgagttcacctgcgcgctgggcgcgtccccggacggggcggcaggtgcggggcccgcggtgcgcgtgagctgcaagctcccgtccgtgcaactgcagcgcatcatcgcgggcgtggacatcgtgctgctgtgcgtcatgaacctcatcatcctcgtcaacctcatccacctcttcatcttccgcaagagcaacttcatcttcgacaagctgcacaaggtgggcatcaagacgcgccggcagtggcgccgctcgcagttctgcgacatcaacatcctggccatgttctgcaacgagaaccgcgaccacatcaagtcgctcaaccggctggacttcatcaccaacgagagcgacctcatgtacgacaacgtggtccggcagctgctggcggcgctggcgcagtccaaccacgacgccacccccacggtgcgcgactcgggggtgcagaccgtggaccccagcgccaaccccgccgagcccgacggcgccgccgagccgcccgtggtcaagcggccgcgcaagaagatgaagtggatccccaccagcaacccgcttccgcagcccttcaaggagccgctggccatcatgcgcgtggagaacagcaaggcggagaagccgaagcccgcgcgcaggaagacggccacggacacgctgatcgcgccgctgctggaccgctccgcccaccactacaagggcggagggggcgacccgggccccggccccgcccctgcccccgccccgccgcccgcccctgacaagaagcacgcgcgccacttctccctggacgtgcacccctacatcctcggcaccaagaaggccaaggccgaggcggtgcccgccgccctgcccgcctcccggagccaggaggggggcttcctgtcccaggcggaggactgtgggctaggcctggccccggcgcccatcaaagatgctccgctccccgagaaggaaatcccgtaccccacagagccagcccgggcagggcttccctcggggggcccgttccacgtccgctcacctcccgccgcccctgctgtggcccctctgacaccagccagcctgggcaaggcggagcccctcaccatcctgagccgaaacgccacacacccgctgctgcacatcaacacgctgtacgaggcccgggaggaggaggacgggggcccccgcctgccgcaggacgtgggggacctcatcgccatccctgccccacagcagatcctcatcgccaccttcgacgagccgagaacggtcgtgagtactgtggagttttgagggatggcaccgtccaggccgccgagagcccctctgcctgtgtcgtgtggcctggccagcctcccggtggacaccagccctgcgtggacgtggcctgtgcttcgcccgcactgcgcgcatccccaacctctgtccgcatgcctggggccttcgcccccacgtgctcgacaggggaacccgcccggacggcatcgccaggcactggctggggtggggaaaggtggcccagtggagccggtggccaggaaggctgaagcccgcttcccatgctcctgcatcaggtgcccagccgtgggtgggggccctgaggtgaagagtttatttttttagtccgtttcgtcctggccccgggctgtggcgagacagcccaactcccccagcccagctcccccagcccagagccagggaagaggaaggtggggccagtcccaccagtggggtggccacgcccatggggtcacatgctcaggggtcaccccctgcagggacctgatgccctcgggtgggagggaccgaggtccaccctcgggtcaaaggtcaacgtgcactttctccttgtcgcctgacagacattttattttactaagactgctgtaccgaacaagcatatttatcatcaggagacaggatgggtttaaagcaggatggtgtgtgtgtgaacgggcatgagcagaggtgagcgtgagcgagcgggtgtgtatgtacgagtgtgcacgtgtgtgcgtgtgcacagagggtgtggtgccagcttgagtgggagtgtgtgagtgtgagcaggcgggcgagtgcgtgagtgcacgccagcgcgtggcccatgtatgaggagtgaaggggcccaacgcaataaccacgtcccccacccgggccccccgccgcggctgaggccacatggcttcctgtgggagccccggccggcacccggctggtcccaccccaaatacctcagccatggagaccatgtcatgcagaattaacaaggtagcaccgagcatatcaataaatattattctgataatc

SEQ ID NO: 14685 - DNA, 2291 bp, Homo sapiens
  source 1..2291: mol_type = unassigned DNA
atggcgaccgcgctgctggcgggagagaagctgcgggagctgatcctgccgggcgcgcaggacgacaaggcgggcgcgctggccgcgctgcttctgcagctgaagctggagctgccgttcgaccgggtggtcaccatcggcaccgtgctggtgcccatcctgctggtcaccctggtcttcaccaagaacttcgcagggtggacgctcttctctggctcctgggattggctgtgaggacaaaacataaaggaacccatttactgttacaccccgcacaacttcacgcgcgaccaggcgctgtacgcccgcggctactgctggacggagctgcgggacgcgctgcccggcgtggacgccagcctgtggccgtcgctgtttgagcacaagttcctgccctacgcgctgctggccttcgccgccatcatgtacgtgcccgcgctgggctgggagttcctggcctccacgcgcctcacctccgagctcaacttcctgctgcaggagatcgacaactgttaccaccgggcggccgagggccgcgcgcccaagatcgagaagcagatccagtccaagggcccgggcatcacggagcgcgagaagcgcgagatcatcgagaacgcggagaaggagaagagcccggagcagaacctgttcgagaagtacctggagcgccgcggccgcagcaacttcctggccaagctgtacctggcgcggcacgtgctgatcctgctgctgagcgccgtgcccatctcctacctgtgcacctactacgccacgcagaagcagaacgagttcacctgcgcgctgggcgcgtccccggacggggcggcaggtgcggggcccgcggtgcgcgtgagctgcaagctcccgtccgtgcaactgcagcgcatcatcgcgggcgtggacatcgtgctgctgtgcgtcatgaacctcatcatcctcgtcaacctcatccacctcttcatcttccgcaagagcaacttcatcttcgacaagctgcacaaggtgggcatcaagacgcgccggcagtggcgccgctcgcagttctgcgacatcaacatcctggccatgttctgcaacgagaaccgcgaccacatcaagtcgctcaaccggctggacttcatcaccaacgagagcgacctcatgtacgacaacgtggtccggcagctgctggcggcgctggcgcagtccaaccacgacgccacccccacggtgcgcgactcgggggtgcagaccgtggaccccagcgccaaccccgccgagcccgacggcgccgccgagccgcccgtggtcaagcggccgcgcaagaagatgaagtggatccccaccagcaacccgcttccgcagcccttcaaggagccgctggccatcatgcgcgtggagaacagcaaggcggagaagccgaagcccgcgcgcaggaagacggccacggacacgctgatcgcgccgctgctggaccgctccgcccaccactacaagggcggagggggcgacccgggccccggccccgcccctgcccccgccccgccgcccgcccctgacaagaagcacgcgcgccacttctccctggacgtgcacccctacatcctcggcaccaagaaggccaaggccgaggcggtgcccgccgccctgcccgcctcccggagccaggaggggggcttcctgtcccaggcggaggactgtgggctaggcctggccccggcgcccatcaaagatgctccgctccccgagaaggaaatcccgtaccccacagagccagcccgggcagggcttccctcggggggcccgttccacgtccgctcacctcccgccgcccctgctgtggcccctctgacaccagccagcctgggcaaggcggagcccctcaccatcctgagccgaaacgccacacacccgctgctgcacatcaacacgctatcctcatcgccaccttcgacgagccgagaacggtcgtgagtactgtggagttttgagggatggcaccgtccaggccgccgagagcccctctgcctgtgtcgtgtggcctggccagcctcccggtggacaccagccctgcgtggacgtggcctgtgcttcgcccgcactgcgcgcatccccaacctctgtccgcatgcctggggccttcgcccccacgtgctcgacaggggaacccgcccggacggcatcgccaggcactggctggggtggggaaaggtggcccagtggagccggtggccaggaaggctgaagcccgcttcccatgctcctgcatcaggtgcccagccgtgggtgggggccctgaggtgaagagttta

SEQ ID NO: 14686 - DNA, 2793 bp, Homo sapiens
  source 1..2793: mol_type = unassigned DNA
aggagcccggcgcgcgaaacgctggccggccggcgggaactaggagcctgggcggagcctggcgtcccctcccgcgtccggccgcgcccgtcctcctggctgcagagagactaccggccaccgccgccgccgccgccgcgagctgtccctgcggcgcgtctgccttggcggagccgaccgcagtgcgctcaggcgtccggtgcgtccccagcctccgccccggcgcgggggcgacggactcgcgcgtgcgcagcgccggaggggcgcgggctgggaccccctagccagcgcgtgcgccgatcgagcgcagggcgatgggtgggcgccgggcgccgggcgccaggcagtgatgggccttcccgcgctgcggccccactgaggaggaggctcggggacagcaggagcacgggctgcccgcgcggtgcggaccatggcgttcctggccgggccgcgcctgctggactgggccagctcgccgccgcacctgcagttcaataagttcgtgctgaccgggtaccggcccgccagcagcggctcgggctgcctgcgcagcctcttctacctgcacaacgaactgggcaacatctacacgcacgggctggccctgctgggcttcctggtgctggtgccaatgaccatgccctggggtcagctgggcaaggatggctggctgggaggcacacattgcgtggcctgccttgcaccccctgcaggctccgtgctctatcacctctttatgtgccaccaagggggcagcgctgtgtacgcccggctcctcgccctggacatgtgtggggtctgccttgtcaacacccttggggccctgcccatcatccactgcaccctggcctgcaggccctggctgcgcccggctgccctggtgggctacactgtgttgtcgggtgtggccggctggcgtgctctcaccgccccctccaccagtgctcggctccgggcatttggatggcaggctgctgcccgcctactggtatttggggcccggggagtgggtctgggttcaggggctccaggctccctgccctgctacctgcgcatggacgcactggcgctgcttgggggactggtaaatgtagcccgtctgcccgagcgctggggacctggccgctttgactactggggcaactcccaccagatcatgcacctgctgagcgtgggctccatcctgcagctgcacgccggcgtcgtgcccgacctgctctgggctgcccaccacgcctgtccccgggactgagctgccatgccagcctgcccacagcagcctcctagagttagcaacaccaggtgttcctcccaactcgtctgcaaggggctggctccttggatgcttccagctcatgagatgtctcagcaggagccctgttcacccgttcttccctgtggactgacctcttccacccacgccgtggcgctccaacttccttccctgccttttccctccaagctcctattttactgtgtcagctggaaggaaacctttccctcttgggacctctttaccctctgtgacctgtggggttagaccagagagggactctggggtcacgtcttgctctgagagttcaagtcctgccaggccgccagcccagagcctcctcaccctatcctgttcctcccaccaggcctgtggccagtcttcctgatctccatctttctgccctgcataccagccctcccagcagccacaagcttgcccgccctggctccctctgcccagagactatggagtaaggcattcaggacaaaaggaccaagggggcgtggacccgtcttgtaccagctggccacaggcacaagggctgcagctgcttcttccaggaaactgacacagggagctcagcggcctcagatcctgggacccctgggccgtgcctgccctccaccttgagtgccatactcccaacagctccaggtacccaccgggggatgtgcctgctcaggaaacctctttgctccacacagcatggggcttcagctgctggcccaaggccaggagcgctgggttctgcagcagggctcagcctcaggggcgttaagaccctggatgacatcaataaagggacaggaagggccatgttgccacatgagcaagcttgggtgctcccaaggttcaaatactttttattagacacggccaggcagagaagaccatgggagttcccgaggggccccagctttcaagggcgacgggagagacacaggataaaaggttaaaagtgcagaggcagagtctggggctcaggttgggtctagggtgtcctcaaacaggctgaggaggttccgaggctcaaaggaggggaaggagccccgaggaggctctgagttgatgtcacttaggtccagggcatccctgggaggagagagtagtgacactcaggatccaaaagctagccctgcccaccccagcccctggacctgcttacctgggtgtgcacctgctccggggggtggaggtgctccccacagtccgggccaggacagcctcaggggagagtgaaggcctgcaggagggcaggcgagacaaggagggtgtccagggctagggagtgccggatgaaaccagctctgtccctgtgcaggctccaggctcccgcctgacaaacaggcagggagccacagtcagggacaataaaaacttggtgcactctgaaagcagcacttggacagccttcaaagtccttccatctggctgcactccaaggccccctctgtccttttcagaacacatggacttggaggcagatttgaaataaacttttagtaaatgtaagcctt

SEQ ID NO: 14687 - DNA, 2644 bp, Homo sapiens
  source 1..2644: mol_type = unassigned DNA
ccggccggcgggaactaggagcctgggcggagcctggcgtcccctcccgcgtccggccgcgcccgtcctcctggctgcagagagactaccggccaccgccgccgccgccgccgcgagctgtccctgcggcgcgtctgccttggcggagccgaccgcagtgcgctcaggcgtccggtgcgtccccagcctccgccccggcgcgggggcgacggactcgcgcgtgcgcagcgccggaggggcgcgggctgggaccccctagccagcgcgtgcgccgatcgagcgcagggcgatgggtgggcgccgggcgccgggcgccaggcagtgatgggccttcccgcgctgcggccccactgaggaggaggctcggggacagcaggagcacgggctgcccgcgcggtgcggaccatggcgttcctggccgggccgcgcctgctggactgggccagctcgccgccgcacctgcagttcaataagttcgtgctgaccgggtaccggcccgccagcagcggctcgggctgcctgcgcagcctcttctacctgcacaacgaactgggcaacatctacacgcacggctccgtgctctatcacctctttatgtgccaccaagggggcagcgctgtgtacgcccggctcctcgccctggacatgtgtggggtctgccttgtcaacacccttggggccctgcccatcatccactgcaccctggcctgcaggccctggctgcgcccggctgccctggtgggctacactgtgttgtcgggtgtggccggctggcgtgctctcaccgccccctccaccagtgctcggctccgggcatttggatggcaggctgctgcccgcctactggtatttggggcccggggagtgggtctgggttcaggggctccaggctccctgccctgctacctgcgcatggacgcactggcgctgcttgggggactggtaaatgtagcccgtctgcccgagcgctggggacctggccgctttgactactggggcaactcccaccagatcatgcacctgctgagcgtgggctccatcctgcagctgcacgccggcgtcgtgcccgacctgctctgggctgcccaccacgcctgtccccgggactgagctgccatgccagcctgcccacagcagcctcctagagttagcaacaccaggtgttcctcccaactcgtctgcaaggggctggctccttggatgcttccagctcatgagatgtctcagcaggagccctgttcacccgttcttccctgtggactgacctcttccacccacgccgtggcgctccaacttccttccctgccttttccctccaagctcctattttactgtgtcagctggaaggaaacctttccctcttgggacctctttaccctctgtgacctgtggggttagaccagagagggactctggggtcacgtcttgctctgagagttcaagtcctgccaggccgccagcccagagcctcctcaccctatcctgttcctcccaccaggcctgtggccagtcttcctgatctccatctttctgccctgcataccagccctcccagcagccacaagcttgcccgccctggctccctctgcccagagactatggagtaaggcattcaggacaaaaggaccaagggggcgtggacccgtcttgtaccagctggccacaggcacaagggctgcagctgcttcttccaggaaactgacacagggagctcagcggcctcagatcctgggacccctgggccgtgcctgccctccaccttgagtgccatactcccaacagctccaggtacccaccgggggatgtgcctgctcaggaaacctctttgctccacacagcatggggcttcagctgctggcccaaggccaggagcgctgggttctgcagcagggctcagcctcaggggcgttaagaccctggatgacatcaataaagggacaggaagggccatgttgccacatgagcaagcttgggtgctcccaaggttcaaatactttttattagacacggccaggcagagaagaccatgggagttcccgaggggccccagctttcaagggcgacgggagagacacaggataaaaggttaaaagtgcagaggcagagtctggggctcaggttgggtctagggtgtcctcaaacaggctgaggaggttccgaggctcaaaggaggggaaggagccccgaggaggctctgagttgatgtcacttaggtccagggcatccctgggaggagagagtagtgacactcaggatccaaaagctagccctgcccaccccagcccctggacctgcttacctgggtgtgcacctgctccggggggtggaggtgctccccacagtccgggccaggacagcctcaggggagagtgaaggcctgcaggagggcaggcgagacaaggagggtgtccagggctagggagtgccggatgaaaccagctctgtccctgtgcaggctccaggctcccgcctgacaaacaggcagggagccacagtcagggacaataaaaacttggtgcactctgaaagcagcacttggacagccttcaaagtccttccatctggctgcactccaaggccccctctgtccttttcagaacacatggacttggaggcagatttgaaataaacttttagtaaatgt

SEQ ID NO: 14688 - DNA, 842 bp, Homo sapiens
  source 1..842: mol_type = unassigned DNA
tggctgcagagagactaccggccaccgccgccgccgccgccgcgagctgtccctgcggcgcgtctgccttggcggagccgaccgcagtgcgctcaggcgtccgggctggccctgctgggcttcctggtgctggtgccaatgaccatgccctggggtcagctgggcaaggatggctggctgggaggcacacattgcgtggcctgccttgcaccccctgcaggctccgtgctctatcacctctttatgtgccaccaagggggcagcgctgtgtacgcccggctcctcgccctggacatgtgtggggtctgccttgtcaacacccttggggccctgcccatcatccactgcaccctggcctgcaggccctggctgcgcccggctgccctggtgggctacactgtgttgtcgggtgtggccggctggcgtgctctcaccgccccctccaccagtgctcggctccgggcatttggatggcaggctgctgcccgcctactggtatttggggcccggggagtgggtctgggttcaggggctccaggctccctgccctgctacctgcgcatggacgcactggcgctgcttgggggactggtaaatgtagcccgtctgcccgagcgctggggacctggccgctttgactactggggcaactcccaccagatcatgcacctgctgagcgtgggctccatcctgcagctgcacgccggcgtcgtgcccgacctgctctgggctgcccaccacgcctgtccccgggactgagctgccatgccagcctgcccacagcagcctcctagagttagcaacaccaggtgttcctcccaactcgtctgcaaggggctggc

SEQ ID NO: 14689 - DNA, 2251 bp, Homo sapiens
  source 1..2251: mol_type = unassigned DNA
gatgggtgggcgccgggcgccgggcgccaggcagtgatgggccttcccgcgctgcggccccactgaggaggaggctcggggacagcaggagcacgggctgcccgcgcggtgcggaccatggcgttcctggccgggccgcgcctgctggactgggccagctcgccgccgcacctgcagttcaataagttcgtgctgaccgggtaccggcccgccagcagcggctcgggctgcctgcgcagcctcttctacctgcacaacgaactgggcaacatctacacgcacggggccctgcccatcatccactgcaccctggcctgcaggccctggctgcgcccggctgccctggtgggctacactgtgttgtcgggtgtggccggctggcgtgctctcaccgccccctccaccagtgctcggctccgggcatttggatggcaggctgctgcccgcctactggtatttggggcccggggagtgggtctgggttcaggggctccaggctccctgccctgctacctgcgcatggacgcactggcgctgcttgggggactggtaaatgtagcccgtctgcccgagcgctggggacctggccgctttgactactggggcaactcccaccagatcatgcacctgctgagcgtgggctccatcctgcagctgcacgccggcgtcgtgcccgacctgctctgggctgcccaccacgcctgtccccgggactgagctgccatgccagcctgcccacagcagcctcctagagttagcaacaccaggtgttcctcccaactcgtctgcaaggggctggctccttggatgcttccagctcatgagatgtctcagcaggagccctgttcacccgttcttccctgtggactgacctcttccacccacgccgtggcgctccaacttccttccctgccttttccctccaagctcctattttactgtgtcagctggaaggaaacctttccctcttgggacctctttaccctctgtgacctgtggggttagaccagagagggactctggggtcacgtcttgctctgagagttcaagtcctgccaggccgccagcccagagcctcctcaccctatcctgttcctcccaccaggcctgtggccagtcttcctgatctccatctttctgccctgcataccagccctcccagcagccacaagcttgcccgccctggctccctctgcccagagactatggagtaaggcattcaggacaaaaggaccaagggggcgtggacccgtcttgtaccagctggccacaggcacaagggctgcagctgcttcttccaggaaactgacacagggagctcagcggcctcagatcctgggacccctgggccgtgcctgccctccaccttgagtgccatactcccaacagctccaggtacccaccgggggatgtgcctgctcaggaaacctctttgctccacacagcatggggcttcagctgctggcccaaggccaggagcgctgggttctgcagcagggctcagcctcaggggcgttaagaccctggatgacatcaataaagggacaggaagggccatgttgccacatgagcaagcttgggtgctcccaaggttcaaatactttttattagacacggccaggcagagaagaccatgggagttcccgaggggccccagctttcaagggcgacgggagagacacaggataaaaggttaaaagtgcagaggcagagtctggggctcaggttgggtctagggtgtcctcaaacaggctgaggaggttccgaggctcaaaggaggggaaggagccccgaggaggctctgagttgatgtcacttaggtccagggcatccctgggaggagagagtagtgacactcaggatccaaaagctagccctgcccaccccagcccctggacctgcttacctgggtgtgcacctgctccggggggtggaggtgctccccacagtccgggccaggacagcctcaggggagagtgaaggcctgcaggagggcaggcgagacaaggagggtgtccagggctagggagtgccggatgaaaccagctctgtccctgtgcaggctccaggctcccgcctgacaaacaggcagggagccacagtcagggacaataaaaacttggtgcactctgaaagcagcacttggacagccttcaaagtccttccatctggctgcactccaaggccccctctgtccttttcagaacacatggacttggaggcagatttgaaataaacttttagtaaatgt

SEQ ID NO: 14690 - DNA, 869 bp, Homo sapiens
  source 1..869: mol_type = unassigned DNA
gataagtaaccagtgccaaaagccttttgcccagggcctgtctctggccaaggccaggccgccaactggatgacagcattacctggacctgtcttgccctgtcctgtgttgtgtctgaaccgtggtccccttgaggatgtgactgaaactatctggtagatgactgtctccctccctagggctggccctgctgggcttcctggtgctggtgccaatgaccatgccctggggtcagctgggcaaggatggctggctgggaggcacacattgcgtggcctgccttgcaccccctgcaggctccgtgctctatcacctctttatgtgccaccaagggggcagcgctgtgtacgcccggctcctcgccctggacatgtgtggggtctgccttgtcaacacccttggggccctgcccatcatccactgcaccctggcctgcaggccctggctgcgcccggctgccctggtgggctacactgtgttgtcgggtgtggccggctggcgtgctctcaccgccccctccaccagtgctcggctccgggcatttggatggcaggctgctgcccgcctactggtatttggggcccggggagtgggtctgggttcaggggctccaggctccctgccctgctacctgcgcatggacgcactggcgctgcttgggggactggtaaatgtagcccgtctgcccgagcgctggggacctggccgctttgactactggggcaactcccaccagatcatgcacctgctgagcgtgggctccatcctgcagctgcacgccggcgtcgtgcccgacctgctctgggctgcccaccacgcctgtccccgggactgagctgccatgccagcctgcccacagcagcctccta

SEQ ID NO: 14691 - DNA, 2029 bp, Homo sapiens
  source 1..2029: mol_type = unassigned DNA
cctggcccgcctgcctggccactcttcctccatcagcctggctggcagcagccttggactccgcccgtggagccctgggcctgttgacccaccagcttaggagcacccaccaagctctgggtcaacgtggaggtaccaggccaccatgctcagtctcaagctgccccaacttcttcaagtccaccaggtcccccgggtgttctgggaagatggcatcatgtctggctaccgccgccccaccagctcggctttggactgtgtcctcagctccttccagatgaccaacgagacggtcaacatctggactcacttcctgcccacctggtgaggggaggctccgccccaggccgcggccttgagctcagagggggtacccaggcgggcagggaccgtccaggcccacgggctgcagcggcagtcgcgggggtccgcggcggcctgagcacgcgcccgccgcaggtacttcctgtggcggctcctggcgctggcgggcggccccggcttccgtgcggagccgtaccactggccgctgctggtcttcctgctgcccgcctgcctctaccccttcgcgtcgtgctgcgcgcacaccttcagctccatgtcgccccgcatgcgccacatctgctacttcctcgactacggcgcgctcagcctctacagtctgggctgcgccttcccctatgccgcctactccatgccggcctcctggctgcacggccacctgcaccagttctttgtgcctgccgccgcactcaactccttcctgtgcaccggcctctcctgctactcccgtttcctggagctggaaagccctgggctcagtaaggtcctccgcacaggagccttcgcctatccattcctgttcgacaacctcccactcttttatcggctcgggctgtgctggggcaggggccacggctgtgggcaggaggccctgagcaccagccatggctaccatctcttctgcgcgctgctcactggcttcctcttcgcctcccacctgcctgaaaggctggcaccaggacgctttgattacatcggccacagccaccagttattccacatctgtgcagtgctgggcacccacttccagctggaggcagtgctggctgatatgggatcacgcagagcctggctggccacacaggaacctgccctgggcctggcaggcacagtggccacactggtcttggctgcagctgggaacctactcattattgctgctttcacagccaccctgcttcgggcccccagtacatgccctctgctgcagggtggcccactggaggggggtacccaggccaaacaacagtgaggccccatccctgaccctgtcctggagggggcagaggccaggccccagtgctgacgaggagcccagatttgggcctaatcaggtggggacgcatctcagcctggaaccaacaggggctgaggagagagggcacaggagagagggcagagaagaggaggggtgtctagggggactggcagagtgtgagagggaccgtgagggggctcttgatgggagtggaagaagtgctgagggtctgagaggggagatgcatgcgtgtccaggctgaagatgcccctatattctgtcaaaggttggcggggggaggtgttggggtcctttcatctggctccgtttctggtgcttctggaagtctctgctcagcacagggaagaactaacacgactaacctaggcctaccctgaatgcttcttgctaaccaggccgagaggccacacacttgcccccccatccccacaaaccaggtaatgccagtttgccagcagctatttgcctatagagatgagtctgtcctggtcataactgtgtgctcaaggtgtccaggcttttgggggtgggcctatctgggtgcattatggatggtttggtggattgaggtgtggggaggagggtcctaggctagagggggtatccctagttagactttgggaagccaccttcaacgttttctggaacaaggcaggtacaaataaaaaaataaaactttggaaagca

SEQ ID NO: 14692 - DNA, 1908 bp, Homo sapiens
  source 1..1908: mol_type = unassigned DNA
actccccgcccaggcctggcccgcctgcctggccactcttcctccatcagcctggctggcagcagccttggactccgcccgtggagccctgggcctgttgacccaccagcttaggagcacccaccaagctctgggtcaacgtggaggtaccaggccaccatgctcagtctcaagctgccccaacttcttcaagtccaccaggtcccccgggtgttctgggaagatggcatcatgtctggctaccgccgccccaccagctcggctttggactgtgtcctcagctccttccagatgaccaacgagacggtcaacatctggactcacttcctgcccacctggtacttcctgtggcggctcctggcgctggcgggcggccccggcttccgtgcggagccgtaccactggccgctgctggtcttcctgctgcccgcctgcctctaccccttcgcgtcgtgctgcgcgcacaccttcagctccatgtcgccccgcatgcgccacatctgctacttcctcgactacggcgcgctcagcctctacagtctgggctgcgccttcccctatgccgcctactccatgccggcctcctggctgcacggccacctgcaccagttctttgtgcctgccgccgcactcaactccttcctgtgcaccggcctctcctgctactcccgtttcctggagctggaaagccctgggctcagtaaggtcctccgcacaggagccttcgcctatccattcctgttcgacaacctcccactcttttatcggctcgggctgtgctggggcaggggccacggctgtgggcaggaggccctgagcaccagccatggctaccatctcttctgcgcgctgctcactggcttcctcttcgcctcccacctgcctgaaaggctggcaccaggacgctttgattacatcggccacagccaccagttattccacatctgtgcagtgctgggcacccacttccagctggaggcagtgctggctgatatgggatcacgcagagcctggctggccacacaggaacctgccctgggcctggcaggcacagtggccacactggtcttggctgcagctgggaacctactcattattgctgctttcacagccaccctgcttcgggcccccagtacatgccctctgctgcagggtggcccactggaggggggtacccaggccaaacaacagtgaggccccatccctgaccctgtcctggagggggcagaggccaggccccagtgctgacgaggagcccagatttgggcctaatcaggtggggacgcatctcagcctggaaccaacaggggctgaggagagagggcacaggagagagggcagagaagaggaggggtgtctagggggactggcagagtgtgagagggaccgtgagggggctcttgatgggagtggaagaagtgctgagggtctgagaggggagatgcatgcgtgtccaggctgaagatgcccctatattctgtcaaaggttggcggggggaggtgttggggtcctttcatctggctccgtttctggtgcttctggaagtctctgctcagcacagggaagaactaacacgactaacctaggcctaccctgaatgcttcttgctaaccaggccgagaggccacacacttgcccccccatccccacaaaccaggtaatgccagtttgccagcagctatttgcctatagagatgagtctgtcctggtcataactgtgtgctcaaggtgtccaggcttttgggggtgggcctatctgggtgcattatggatggtttggtggattgaggtgtggggaggagggtcctaggctagagggggtatccctagttagactttgggaagccaccttcaacgttttctggaacaaggcaggtacaaataaaaaaataaaactttggaaagca

SEQ ID NO: 14693 - DNA, 2117 bp, Homo sapiens
  source 1..2117: mol_type = unassigned DNA
ttcctccatcagcctggctggcagcagccttggactccgcccgtggagccctgggcctgttgacccaccagcttaggagcacccaccaagctctgggtaaggaagctcaccttctggggctcttctgggaaaatagaggtcaacgtggaggtaccaggccaccatgctcagtctcaagctgccccaacttcttcaagtccaccaggtcccccgggtgttctgggaagatggcatcatgtctggctaccgccgccccaccagctcggctttggactgtgtcctcagctccttccagatgaccaacgagacggtcaacatctggactcacttcctgcccacctggtgaggggaggctccgccccaggccgcggccttgagctcagagggggtacccaggcgggcagggaccgtccaggcccacgggctgcagcggcagtcgcgggggtccgcggcggcctgagcacgcgcccgccgcaggtacttcctgtggcggctcctggcgctggcgggcggccccggcttccgtgcggagccgtaccactggccgctgctggtcttcctgctgcccgcctgcctctaccccttcgcgtcgtgctgcgcgcacaccttcagctccatgtcgccccgcatgcgccacatctgctacttcctcgactacggcgcgctcagcctctacagtctgggctgcgccttcccctatgccgcctactccatgccggcctcctggctgcacggccacctgcaccagttctttgtgcctgccgccgcactcaactccttcctgtgcaccggcctctcctgctactcccgtttcctggagctggaaagccctgggctcagtaaggtcctccgcacaggagccttcgcctatccattcctgttcgacaacctcccactcttttatcggctcgggctgtgctggggcaggggccacggctgtgggcaggaggccctgagcaccagccatggctaccatctcttctgcgcgctgctcactggcttcctcttcgcctcccacctgcctgaaaggctggcaccaggacgctttgattacatcggtgagggcacgcctggcccggcccgggaagaggcaggggcagatgccttcccagagcacagaatgaactgggccacagccaccagttattccacatctgtgcagtgctgggcacccacttccagctggaggcagtgctggctgatatgggatcacgcagagcctggctggccacacaggaacctgccctgggcctggcaggcacagtggccacactggtcttggctgcagctgggaacctactcattattgctgctttcacagccaccctgcttcgggcccccagtacatgccctctgctgcagggtggcccactggaggggggtacccaggccaaacaacagtgaggccccatccctgaccctgtcctggagggggcagaggccaggccccagtgctgacgaggagcccagatttgggcctaatcaggtggggacgcatctcagcctggaaccaacaggggctgaggagagagggcacaggagagagggcagagaagaggaggggtgtctagggggactggcagagtgtgagagggaccgtgagggggctcttgatgggagtggaagaagtgctgagggtctgagaggggagatgcatgcgtgtccaggctgaagatgcccctatattctgtcaaaggttggcggggggaggtgttggggtcctttcatctggctccgtttctggtgcttctggaagtctctgctcagcacagggaagaactaacacgactaacctaggcctaccctgaatgcttcttgctaaccaggccgagaggccacacacttgcccccccatccccacaaaccaggtaatgccagtttgccagcagctatttgcctatagagatgagtctgtcctggtcataactgtgtgctcaaggtgtccaggcttttgggggtgggcctatctgggtgcattatggatggtttggtggattgaggtgtggggaggagggtcctaggctagagggggtatccctagttagactttgggaagccaccttcaacgttttctggaacaaggcaggtacaaataaaaaaataaaactttggaaagc

SEQ ID NO: 14694 - DNA, 1799 bp, Homo sapiens
  source 1..1799: mol_type = unassigned DNA
actcttcctccatcagcctggctggcagcagccttggactccgcccgtggagccctgggcctgttgacccaccagcttaggagcacccaccaagctctgggtgttctgggaagatggcatcatgtctggctaccgccgccccaccagctcggctttggactgtgtcctcagctccttccagatgaccaacgagacggtcaacatctggactcacttcctgcccacctggtgaggggaggctccgccccaggccgcggccttgagctcagagggggtacccaggcgggcagggaccgtccaggcccacgggctgcagcggcagtcgcgggggtccgcggcggcctgagcacgcgcccgccgcaggtacttcctgtggcggctcctggcgctggcgggcggccccggcttccgtgcggagccgtaccactggccgctgctggtcttcctgctgcccgcctgcctctaccccttcgcgtcgtgctgcgcgcacaccttcagctccatgtcgccccgcatgcgccacatctgctacttcctcgactacggcgcgctcagcctctacagtctggtttcctggagctggaaagccctgggctcagtaaggtcctccgcacaggagccttcgcctatccattcctgttcgacaacctcccactcttttatcggctcgggctgtgctggggcaggggccacggctgtgggcaggaggccctgagcaccagccatggctaccatctcttctgcgcgctgctcactggcttcctcttcgcctcccacctgcctgaaaggctggcaccaggacgctttgattacatcggccacagccaccagttattccacatctgtgcagtgctgggcacccacttccagctggaggcagtgctggctgatatgggatcacgcagagcctggctggccacacaggaacctgccctgggcctggcaggcacagtggccacactggtcttggctgcagctgggaacctactcattattgctgctttcacagccaccctgcttcgggcccccagtacatgccctctgctgcagggtggcccactggaggggggtacccaggccaaacaacagtgaggccccatccctgaccctgtcctggagggggcagaggccaggccccagtgctgacgaggagcccagatttgggcctaatcaggtggggacgcatctcagcctggaaccaacaggggctgaggagagagggcacaggagagagggcagagaagaggaggggtgtctagggggactggcagagtgtgagagggaccgtgagggggctcttgatgggagtggaagaagtgctgagggtctgagaggggagatgcatgcgtgtccaggctgaagatgcccctatattctgtcaaaggttggcggggggaggtgttggggtcctttcatctggctccgtttctggtgcttctggaagtctctgctcagcacagggaagaactaacacgactaacctaggcctaccctgaatgcttcttgctaaccaggccgagaggccacacacttgcccccccatccccacaaaccaggtaatgccagtttgccagcagctatttgcctatagagatgagtctgtcctggtcataactgtgtgctcaaggtgtccaggcttttgggggtgggcctatctgggtgcattatggatggtttggtggattgaggtgtggggaggagggtcctaggctagagggggtatccctagttagactttgggaagccaccttcaacgttttctggaacaaggcaggtacaaataaaaaaataaaactttg

SEQ ID NO: 14695 - DNA, 1782 bp, Homo sapiens
  source 1..1782: mol_type = unassigned DNA
actcttcctccatcagcctggctggcagcagccttggactccgcccgtggagccctgggcctgttgacccaccagcttaggagcacccaccaagctctgggtaaggaagctcaccttctggggctcttctgggaaaatagaggtcaacgtggaggtaccaggccaccatgctcagtctcaagctgccccaacttcttcaagtccaccaggtcccccgggtgttctgggaagatggcatcatgtctggctaccgccgccccaccagctcggctttggactgtgtcctcagctccttccagatgaccaacgagacggtcaacatctggactcacttcctgcccacctggtacttcctgtggcggctcctggcgctggcgggcggccccggcttccgtgcggagccgtaccactggccgctgctggtcttcctgctgcccgcctgcctctaccccttcgcgtcgtgctgcgcgcacaccttcagctccatgtcgccccgcatgcgccacatctgctacttcctcgactacggcgcgctcagcctctacagtctggtttcctggagctggaaagccctgggctcagtaaggtcctccgcacaggagccttcgcctatccattcctgttcgacaacctcccactcttttatcggctcgggctgtgctggggcaggggccacggctgtgggcaggaggccctgagcaccagccatggctaccatctcttctgcgcgctgctcactggcttcctcttcgcctcccacctgcctgaaaggctggcaccaggacgctttgattacatcggccacagccaccagttattccacatctgtgcagtgctgggcacccacttccagctggaggcagtgctggctgatatgggatcacgcagagcctggctggccacacaggaacctgccctgggcctggcaggcacagtggccacactggtcttggctgcagctgggaacctactcattattgctgctttcacagccaccctgcttcgggcccccagtacatgccctctgctgcagggtggcccactggaggggggtacccaggccaaacaacagtgaggccccatccctgaccctgtcctggagggggcagaggccaggccccagtgctgacgaggagcccagatttgggcctaatcaggtggggacgcatctcagcctggaaccaacaggggctgaggagagagggcacaggagagagggcagagaagaggaggggtgtctagggggactggcagagtgtgagagggaccgtgagggggctcttgatgggagtggaagaagtgctgagggtctgagaggggagatgcatgcgtgtccaggctgaagatgcccctatattctgtcaaaggttggcggggggaggtgttggggtcctttcatctggctccgtttctggtgcttctggaagtctctgctcagcacagggaagaactaacacgactaacctaggcctaccctgaatgcttcttgctaaccaggccgagaggccacacacttgcccccccatccccacaaaccaggtaatgccagtttgccagcagctatttgcctatagagatgagtctgtcctggtcataactgtgtgctcaaggtgtccaggcttttgggggtgggcctatctgggtgcattatggatggtttggtggattgaggtgtggggaggagggtcctaggctagagggggtatccctagttagactttgggaagccaccttcaacgttttctggaacaaggcaggtacaaataaaaaaataaaactttg

SEQ ID NO: 14696 - DNA, 1765 bp, Homo sapiens
  source 1..1765: mol_type = unassigned DNA
cagcagccttggactccgcccgtggagccctgggcctgttgacccaccagcttaggagcacccaccaagctctgggtgttctgggaagatggcatcatgtctggctaccgccgccccaccagctcggctttggactgtgtcctcagctccttccagatgaccaacgagacggtcaacatctggactcacttcctgcccacctggtacttcctgtggcggctcctggcgctggcgggcggccccggcttccgtgcggagccgtaccactggccgctgctggtcttcctgctgcccgcctgcctctaccccttcgcgtcgtgctgcgcgcacaccttcagctccatgtcgccccgcatgcgccacatctgctacttcctcgactacggcgcgctcagcctctacagtctgggctgcgccttcccctatgccgcctactccatgccggcctcctggctgcacggccacctgcaccagttctttgtgcctgccgccgcactcaactccttcctgtgcaccggcctctcctgctactcccgtttcctggagctggaaagccctgggctcagtaaggtcctccgcacaggagccttcgcctatccattcctgttcgacaacctcccactcttttatcggctcgggctgtgctggggcaggggccacggctgtgggcaggaggccctgagcaccagccatggctaccatctcttctgcgcgctgctcactggcttcctcttcgcctcccacctgcctgaaaggctggcaccaggacgctttgattacatcggccacagccaccagttattccacatctgtgcagtgctgggcacccacttccagctggaggcagtgctggctgatatgggatcacgcagagcctggctggccacacaggaacctgccctgggcctggcaggcacagtggccacactggtcttggctgcagctgggaacctactcattattgctgctttcacagccaccctgcttcgggcccccagtacatgccctctgctgcagggtggcccactggaggggggtacccaggccaaacaacagtgaggccccatccctgaccctgtcctggagggggcagaggccaggccccagtgctgacgaggagcccagatttgggcctaatcaggtggggacgcatctcagcctggaaccaacaggggctgaggagagagggcacaggagagagggcagagaagaggaggggtgtctagggggactggcagagtgtgagagggaccgtgagggggctcttgatgggagtggaagaagtgctgagggtctgagaggggagatgcatgcgtgtccaggctgaagatgcccctatattctgtcaaaggttggcggggggaggtgttggggtcctttcatctggctccgtttctggtgcttctggaagtctctgctcagcacagggaagaactaacacgactaacctaggcctaccctgaatgcttcttgctaaccaggccgagaggccacacacttgcccccccatccccacaaaccaggtaatgccagtttgccagcagctatttgcctatagagatgagtctgtcctggtcataactgtgtgctcaaggtgtccaggcttttgggggtgggcctatctgggtgcattatggatggtttggtggattgaggtgtggggaggagggtcctaggctagagggggtatccctagttagactttgggaagccaccttcaacgttttctggaacaaggcaggtacaaataaaaaaataaaacttt

SEQ ID NO: 14697 - DNA, 2023 bp, Homo sapiens
  source 1..2023: mol_type = unassigned DNA
gctggcagcagccttggactccgcccgtggagccctgggcctgttgacccaccagcttaggagcacccaccaagctctgggtaaggaagctcaccttctggggctcttctgggaaaatagaggtcaacgtggaggtaccaggccaccatgctcagtctcaagctgccccaacttcttcaagtccaccaggtcccccgggtgttctgggaagatggcatcatgtctggctaccgccgccccaccagctcggctttggactgtgtcctcagctccttccagatgaccaacgagacggtcaacatctggactcacttcctgcccacctggtgaggggaggctccgccccaggccgcggccttgagctcagagggggtacccaggcgggcagggaccgtccaggcccacgggctgcagcggcagtcgcgggggtccgcggcggcctgagcacgcgcccgccgcaggtacttcctgtggcggctcctggcgctggcgggcggccccggcttccgtgcggagccgtaccactggccgctgctggtcttcctgctgcccgcctgcctctaccccttcgcgtcgtgctgcgcgcacaccttcagctccatgtcgccccgcatgcgccacatctgctacttcctcgactacggcgcgctcagcctctacagtctgggctgcgccttcccctatgccgcctactccatgccggcctcctggctgcacggccacctgcaccagttctttgtgcctgccgccgcactcaactccttcctgtgcaccggcctctcctgctactcccgtttcctggagctggaaagccctgggctcagtaaggtcctccgcacaggagccttcgcctatccattcctgttcgacaacctcccactcttttatcggctcgggctgtgctggggcaggggccacggctgtgggcaggaggccctgagcaccagccatggctaccatctcttctgcgcgctgctcactggcttcctcttcgcctcccacctgcctgaaaggctggcaccaggacgctttgattacatcggccacagccaccagttattccacatctgtgcagtgctgggcacccacttccagctggaggcagtgctggctgatatgggatcacgcagagcctggctggccacacaggaacctgccctgggcctggcaggcacagtggccacactggtcttggctgcagctgggaacctactcattattgctgctttcacagccaccctgcttcgggcccccagtacatgccctctgctgcagggtggcccactggaggggggtacccaggccaaacaacagtgaggccccatccctgaccctgtcctggagggggcagaggccaggccccagtgctgacgaggagcccagatttgggcctaatcaggtggggacgcatctcagcctggaaccaacaggggctgaggagagagggcacaggagagagggcagagaagaggaggggtgtctagggggactggcagagtgtgagagggaccgtgagggggctcttgatgggagtggaagaagtgctgagggtctgagaggggagatgcatgcgtgtccaggctgaagatgcccctatattctgtcaaaggttggcggggggaggtgttggggtcctttcatctggctccgtttctggtgcttctggaagtctctgctcagcacagggaagaactaacacgactaacctaggcctaccctgaatgcttcttgctaaccaggccgagaggccacacacttgcccccccatccccacaaaccaggtaatgccagtttgccagcagctatttgcctatagagatgagtctgtcctggtcataactgtgtgctcaaggtgtccaggcttttgggggtgggcctatctgggtgcattatggatggtttggtggattgaggtgtggggaggagggtcctaggctagagggggtatccctagttagactttgggaagccaccttcaacgttttctggaacaaggcaggtacaaataaaaaaataaaacttt

SEQ ID NO: 14698 - DNA, 742 bp, Homo sapiens
  source 1..742: mol_type = unassigned DNA
gcccgtggagccctgggcctgttgacccaccagcttaggagcacccaccaagctctgggtcaacgtggaggtaccaggccaccatgctcagtctcaagctgccccaacttcttcaagtccaccaggtcccccgggtgttctgggaagatggcatcatgtctggctaccgccgccccaccagctcggctttggactgtgtcctcagctccttccagatgaccaacgagacggtcaacatctggactcacttcctgcccacctggtacttcctgtggcggctcctggcgctggcgggcggccccggcttccgtgcggagccgtaccactggccgctgctggtcttcctgctgcccgcctgcctctaccccttcgcgtcgtgctgcgcgcacaccttcagctccatgtcgccccgcatgcgccacatctgctacttcctcgactacggcgcgctcagcctctacagtctggcacagcgatggtgaccggccttttcctcccgcctcccagtttcctggagctggaaagccctgggctcagtaaggtcctccgcacaggagccttcgcctatccattcctgttcgacaacctcccactcttttatcggctcgggctgtgctggggcaggggccacggctgtgggcaggaggccctgagcaccagccatggctaccatctcttctgcgcgctgctcactggcttcctcttcgcctcccacctgcctgaaaggctggcaccaggacgc

SEQ ID NO: 14699 - DNA, 759 bp, Homo sapiens
  source 1..759: mol_type = unassigned DNA
tcttcctccatcagcctggctggcagcagccttggactccgcccgtggagccctgggcctgttgacccaccagcttaggagcacccaccaagctctgggtcaacgtggaggtaccaggccaccatgctcagtctcaagctgccccaacttcttcaagtccaccaggtcccccgggtgttctgggaagatggcatcatgtctggctaccgccgccccaccagctcggctttggactgtgtcctcagctccttccagatgaccaacgagacggtcaacatctggactcacttcctgcccacctggtacttcctgtggcggctcctggcgctggcgggcggccccggcttccgtgcggagccgtaccactggccgctgctggtcttcctgctgcccgcctgcctctaccccttcgcgtcgtgctgcgcgcacaccttcagctccatgtcgccccgcatgcgccacatctgctacttcctcgactacggcgcgctcagcctctacagtctgggctgcgccttcccctatgccgcctactccatgccggcctcctggctgcacggccacctgcaccagttctttgtgcctgccgccgcactcaactccttcctgtgcaccggcctctcctgctactcccgcacagcgatggtgaccggccttttcctcccgcctcccagtttcctggagctggaaagccctgggctcagtaaggtcctccgcacaggagccttcgcctatccattcctgttcgacaacctccca

SEQ ID NO: 14700 - DNA, 622 bp, Homo sapiens
  source 1..622: mol_type = unassigned DNA
actcttcctccatcagcctggctggcagcagccttggactccgcccgtggagccctgggcctgttgacccaccagcttaggagcacccaccaagctctgggtgttctgggaagatggcatcatgtctggctaccgccgccccaccagctcggctttggactgtgtcctcagctccttccagatgaccaacgagacggtcaacatctggactcacttcctgcccacctggtacttcctgtggcggctcctggcgctggcgggcggccccggcttccgtgcggagccgtaccactggccgctgctggtcttcctgctgcccgcctgcctctaccccttcgcgtcgtgctgcgcgcacaccttcagctccatgtcgccccgcatgcgccacatctgctacttcctcgactacggcgcgctcagcctctacagtctgggctgcgccttcccctatgccgcctactccatgccggcctcctggctgcacggccacctgcaccagttctttgtgcctgccgccgcactcaactccttcctgtgcaccggcctctcctgctactcccgcacagcgatggtgaccggccttttcctcccgcctcccagtttcctggagctggaaagccct

SEQ ID NO: 14701 - DNA, 1961 bp, Homo sapiens
  source 1..1961: mol_type = unassigned DNA
tgttccctggctcccctttgtctccccactccccgcccaggcctggcccgcctgcctggccactcttcctccatcagcctggctggcagcagccttggactccgcccgtggagccctgggcctgttgacccaccagcttaggagcacccaccaagctctgggtgttctgggaagatggcatcatgtctggctaccgccgccccaccagctcggctttggactgtgtcctcagctccttccagatgaccaacgagacggtcaacatctggactcacttcctgcccacctggtgaggggaggctccgccccaggccgcggccttgagctcagagggggtacccaggcgggcagggaccgtccaggcccacgggctgcagcggcagtcgcgggggtccgcggcggcctgagcacgcgcccgccgcaggtacttcctgtggcggctcctggcgctggcgggcggccccggcttccgtgcggagccgtaccactggccgctgctggtcttcctgctgcccgcctgcctctaccccttcgcgtcgtgctgcgcgcacaccttcagctccatgtcgccccgcatgcgccacatctgctacttcctcgactacggcgcgctcagcctctacagtctggtttcctggagctggaaagccctgggctcagtaaggtcctccgcacaggagccttcgcctatccattcctgttcgacaacctcccactcttttatcggctcgggctgtgctggggcaggggccacggctgtgggcaggaggccctgagcaccagccatggctaccatctcttctgcgcgctgctcactggcttcctcttcgcctcccacctgcctgaaaggctggcaccaggacgctttgattacatcggccacagccaccagttattccacatctgtgcagtgctgggcacccacttccagctggaggcagtgctggctgatatgggatcacgcagagcctggctggccacacaggaacctgccctgggcctggcaggcacagtggccacactggtcttggctgcagctgggaacctactcattattgctgctttcacagccaccctgcttcgggcccccagtacatgccctctgctgcagggtggcccactggaggggggtacccaggccaaacaacagtgaggccccatccctgaccctgtcctggagggggcagaggccaggccccagtgctgacgaggagcccagatttgggcctaatcaggtggggacgcatctcagcctggaaccaacaggggctgaggagagagggcacaggagagagggcagagaagaggaggggtgtctagggggactggcagagtgtgagagggaccgtgagggggctcttgatgggagtggaagaagtgctgagggtctgagaggggagatgcatgcgtgtccaggctgaagatgcccctatattctgtcaaaggttggcggggggaggtgttggggtcctttcatctggctccgtttctggtgcttctggaagtctctgctcagcacagggaagaactaacacgactaacctaggcctaccctgaatgcttcttgctaaccaggccgagaggccacacacttgcccccccatccccacaaaccaggtaatgccagtttgccagcagctatttgcctatagagatgagtctgtcctggtcataactgtgtgctcaaggtgtccaggcttttgggggtgggcctatctgggtgcattatggatggtttggtggattgaggtgtggggaggagggtcctaggctagagggggtatccctagttagactttgggaagccaccttcaacgttttctggaacaaggcaggtacaaataaaaaaataaaactttggaaagcactttctagaactgaagaaggtaaaacctcctcacccccatcctcctgacacctccctcccacactccataaactggacagactcacaggcccac

SEQ ID NO: 14702 - DNA, 1599 bp, Homo sapiens
  source 1..1599: mol_type = unassigned DNA
tgttccctggctcccctttgtctccccactccccgcccaggcctggcccgcctgcctggccactcttcctccatcagcctggctggcagcagccttggactccgcccgtggagccctgggcctgttgacccaccagcttaggagcacccaccaagctctgggtcaacgtggaggtaccaggccaccatgctcagtctcaagctgccccaacttcttcaagtccaccaggtcccccgggtgttctgggaagatggcatcatgtctggctaccgccgccccaccagctcggctttggactgtgtcctcagctccttccagatgaccaacgagacggtcaacatctggactcacttcctgcccacctgctcgggctgtgctggggcaggggccacggctgtgggcaggaggccctgagcaccagccatggctaccatctcttctgcgcgctgctcactggcttcctcttcgcctcccacctgcctgaaaggctggcaccaggacgctttgattacatcggccacagccaccagttattccacatctgtgcagtgctgggcacccacttccagctggaggcagtgctggctgatatgggatcacgcagagcctggctggccacacaggaacctgccctgggcctggcaggcacagtggccacactggtcttggctgcagctgggaacctactcattattgctgctttcacagccaccctgcttcgggcccccagtacatgccctctgctgcagggtggcccactggaggggggtacccaggccaaacaacagtgaggccccatccctgaccctgtcctggagggggcagaggccaggccccagtgctgacgaggagcccagatttgggcctaatcaggtggggacgcatctcagcctggaaccaacaggggctgaggagagagggcacaggagagagggcagagaagaggaggggtgtctagggggactggcagagtgtgagagggaccgtgagggggctcttgatgggagtggaagaagtgctgagggtctgagaggggagatgcatgcgtgtccaggctgaagatgcccctatattctgtcaaaggttggcggggggaggtgttggggtcctttcatctggctccgtttctggtgcttctggaagtctctgctcagcacagggaagaactaacacgactaacctaggcctaccctgaatgcttcttgctaaccaggccgagaggccacacacttgcccccccatccccacaaaccaggtaatgccagtttgccagcagctatttgcctatagagatgagtctgtcctggtcataactgtgtgctcaaggtgtccaggcttttgggggtgggcctatctgggtgcattatggatggtttggtggattgaggtgtggggaggagggtcctaggctagagggggtatccctagttagactttgggaagccaccttcaacgttttctggaacaaggcaggtacaaataaaaaaataaaactttggaaagcactttctagaactgaagaaggtaaaacctcctcacccccatcctcctgacacctccctcccacactccataaactggacagactcacaggcccac

SEQ ID NO: 14703 - DNA, 2143 bp, Homo sapiens
  source 1..2143: mol_type = unassigned DNA
tgttccctggctcccctttgtctccccactccccgcccaggcctggcccgcctgcctggccactcttcctccatcagcctggctggcagcagccttggactccgcccgtggagccctgggcctgttgacccaccagcttaggagcacccaccaagctctggcagggtctccagcacccatctcgggcagaggctgggggagtgactgctggtgcaagccccaaagtgcatgcggcaaaaacatggatgcagagctggtggcaagaagaggggctaagttatagagtcaacgtggaggtaccaggccaccatgctcagtctcaagctgccccaacttcttcaagtccaccaggtgttctgggaagatggcatcatgtctggctaccgccgccccaccagctcggctttggactgtgtcctcagctccttccagatgaccaacgagacggtcaacatctggactcacttcctgcccacctggtacttcctgtggcggctcctggcgctggcgggcggccccggcttccgtgcggagccgtaccactggccgctgctggtcttcctgctgcccgcctgcctctaccccttcgcgtcgtgctgcgcgcacaccttcagctccatgtcgccccgcatgcgccacatctgctacttcctcgactacggcgcgctcagcctctacagtctgggctgcgccttcccctatgccgcctactccatgccggcctcctggctgcacggccacctgcaccagttctttgtgcctgccgccgcactcaactccttcctgtgcaccggcctctcctgctactcccgtttcctggagctggaaagccctgggctcagtaaggtcctccgcacaggagccttcgcctatccattcctgttcgacaacctcccactcttttatcggctcgggctgtgctggggcaggggccacggctgtgggcaggaggccctgagcaccagccatggctaccatctcttctgcgcgctgctcactggcttcctcttcgcctcccacctgcctgaaaggctggcaccaggacgctttgattacatcggccacagccaccagttattccacatctgtgcagtgctgggcacccacttccagctggaggcagtgctggctgatatgggatcacgcagagcctggctggccacacaggaacctgccctgggcctggcaggcacagtggccacactggtcttggctgcagctgggaacctactcattattgctgctttcacagccaccctgcttcgggcccccagtacatgccctctgctgcagggtggcccactggaggggggtacccaggccaaacaacagtgaggccccatccctgaccctgtcctggagggggcagaggccaggccccagtgctgacgaggagcccagatttgggcctaatcaggtggggacgcatctcagcctggaaccaacaggggctgaggagagagggcacaggagagagggcagagaagaggaggggtgtctagggggactggcagagtgtgagagggaccgtgagggggctcttgatgggagtggaagaagtgctgagggtctgagaggggagatgcatgcgtgtccaggctgaagatgcccctatattctgtcaaaggttggcggggggaggtgttggggtcctttcatctggctccgtttctggtgcttctggaagtctctgctcagcacagggaagaactaacacgactaacctaggcctaccctgaatgcttcttgctaaccaggccgagaggccacacacttgcccccccatccccacaaaccaggtaatgccagtttgccagcagctatttgcctatagagatgagtctgtcctggtcataactgtgtgctcaaggtgtccaggcttttgggggtgggcctatctgggtgcattatggatggtttggtggattgaggtgtggggaggagggtcctaggctagagggggtatccctagttagactttgggaagccaccttcaacgttttctggaacaaggcaggtacaaataaaaaaataaaactttggaaagcactttctagaactgaagaaggtaaaacctcctcacccccatcctcctgacacctccctcccacactccataaactggacagactcacaggcccac

SEQ ID NO: 14704 - DNA, 1729 bp, Homo sapiens
  source 1..1729: mol_type = unassigned DNA
tgttccctggctcccctttgtctccccactccccgcccaggcctggcccgcctgcctggccactcttcctccatcagcctggctggcagcagccttggactccgcccgtggagccctgggcctgttgacccaccagcttaggagcacccaccaagctctgggtgttctgggaagatggcatcatgtctggctaccgccgccccaccagctcggctttggactgtgtcctcagctccttccagatgaccaacgagacggtcaacatctggactcacttcctgcccacctggtacttcctgtggcggctcctggcgctggcgggcggccccggcttccgtgcggagccgtaccactggccgctgctggtcttcctgctgcccgcctgcctctaccccttcgcgtcgtgctgcgcgcacaccttcagctccatgtcgccccgcatgcgccacatctgctacttcctcgactacggcgcgctcagcctctacagtctggctcgggctgtgctggggcaggggccacggctgtgggcaggaggccctgagcaccagccatggctaccatctcttctgcgcgctgctcactggcttcctcttcgcctcccacctgcctgaaaggctggcaccaggacgctttgattacatcggccacagccaccagttattccacatctgtgcagtgctgggcacccacttccagctggaggcagtgctggctgatatgggatcacgcagagcctggctggccacacaggaacctgccctgggcctggcaggcacagtggccacactggtcttggctgcagctgggaacctactcattattgctgctttcacagccaccctgcttcgggcccccagtacatgccctctgctgcagggtggcccactggaggggggtacccaggccaaacaacagtgaggccccatccctgaccctgtcctggagggggcagaggccaggccccagtgctgacgaggagcccagatttgggcctaatcaggtggggacgcatctcagcctggaaccaacaggggctgaggagagagggcacaggagagagggcagagaagaggaggggtgtctagggggactggcagagtgtgagagggaccgtgagggggctcttgatgggagtggaagaagtgctgagggtctgagaggggagatgcatgcgtgtccaggctgaagatgcccctatattctgtcaaaggttggcggggggaggtgttggggtcctttcatctggctccgtttctggtgcttctggaagtctctgctcagcacagggaagaactaacacgactaacctaggcctaccctgaatgcttcttgctaaccaggccgagaggccacacacttgcccccccatccccacaaaccaggtaatgccagtttgccagcagctatttgcctatagagatgagtctgtcctggtcataactgtgtgctcaaggtgtccaggcttttgggggtgggcctatctgggtgcattatggatggtttggtggattgaggtgtggggaggagggtcctaggctagagggggtatccctagttagactttgggaagccaccttcaacgttttctggaacaaggcaggtacaaataaaaaaataaaactttggaaagcactttctagaactgaagaaggtaaaacctcctcacccccatcctcctgacacctccctcccacactccataaactggacagactcacaggcccac

SEQ ID NO: 14705 - DNA, 2037 bp, Homo sapiens
  source 1..2037: mol_type = unassigned DNA
tgttccctggctcccctttgtctccccactccccgcccaggcctggcccgcctgcctggccactcttcctccatcagcctggctggcagcagccttggactccgcccgtggagccctgggcctgttgacccaccagcttaggagcacccaccaagctctgggtgttctgggaagatggcatcatgtctggctaccgccgccccaccagctcggctttggactgtgtcctcagctccttccagatgaccaacgagacggtcaacatctggactcacttcctgcccacctggtgaggggaggctccgccccaggccgcggccttgagctcagagggggtacccaggcgggcagggaccgtccaggcccacgggctgcagcggcagtcgcgggggtccgcggcggcctgagcacgcgcccgccgcaggtacttcctgtggcggctcctggcgctggcgggcggccccggcttccgtgcggagccgtaccactggccgctgctggtcttcctgctgcccgcctgcctctaccccttcgcgtcgtgctgcgcgcacaccttcagctccatgtcgccccgcatgcgccacatctgctacttcctcgactacggcgcgctcagcctctacagtctgggctgcgccttcccctatgccgcctactccatgccggcctcctggctgcacggccacctgcaccagttctttgtgcctgccgccgcactcaactccttcctgtgcaccggcctctcctgctactcccgtttcctggagctggaaagccctgggctcagtaaggtcctccgcacaggagccttcgcctatccattcctgttcgacaacctcccactcttttatcgggctggcaccaggacgctttgattacatcggtgagggcacgcctggcccggcccgggaagaggcaggggcagatgccttcccagagcacagaatgaactgggccacagccaccagttattccacatctgtgcagtgctgggcacccacttccagctggaggcagtgctggctgatatgggatcacgcagagcctggctggccacacaggaacctgccctgggcctggcaggcacagtggccacactggtcttggctgcagctgggaacctactcattattgctgctttcacagccaccctgcttcgggcccccagtacatgccctctgctgcagggtggcccactggaggggggtacccaggccaaacaacagtgaggccccatccctgaccctgtcctggagggggcagaggccaggccccagtgctgacgaggagcccagatttgggcctaatcaggtggggacgcatctcagcctggaaccaacaggggctgaggagagagggcacaggagagagggcagagaagaggaggggtgtctagggggactggcagagtgtgagagggaccgtgagggggctcttgatgggagtggaagaagtgctgagggtctgagaggggagatgcatgcgtgtccaggctgaagatgcccctatattctgtcaaaggttggcggggggaggtgttggggtcctttcatctggctccgtttctggtgcttctggaagtctctgctcagcacagggaagaactaacacgactaacctaggcctaccctgaatgcttcttgctaaccaggccgagaggccacacacttgcccccccatccccacaaaccaggtaatgccagtttgccagcagctatttgcctatagagatgagtctgtcctggtcataactgtgtgctcaaggtgtccaggcttttgggggtgggcctatctgggtgcattatggatggtttggtggattgaggtgtggggaggagggtcctaggctagagggggtatccctagttagactttgggaagccaccttcaacgttttctggaacaaggcaggtacaaataaaaaaataaaactttggaaagcactttctagaactgaagaaggtaaaacctcctcacccccatcctcctgacacctccctcccacactccataaactggacagactcacaggcccac

SEQ ID NO: 14706 - DNA, 6005 bp, Homo sapiens
  source 1..6005: mol_type = unassigned DNA
gcggccccgagcgagcgccagcgccacacagccccgggcagccgccggcgagcgcgccgcgacgccgaacaggtggccggaggctgcgggcgccgcggcggggagaggcgaggcaagccccgggcgaagcgaggcgaggcgagggcggccgggccgggcatgcgagctgagcggccccccggcgtcgccgccgcctgcccgcgcccctagccgcccgcgcgcccgagtccccagcggctcctccgcgcccagcgtcctcggtcccggcctcggctgctccggctgcgctcggcgaggggcgcgggcccgcccgcggcggcggcggcatgaaagtgaccgtgtgcttcggacggacccgggtggtcgtgccgtgcggggacggccacatgaaagttttcagcctcatccagcaggcggtgacccgctaccggaaggccatcgccaaggatccaaactactggatacaggtgcatcgcttggaacatggagatggaggaatactagaccttgatgacattctttgtgatgtagcagacgataaagacagactggtagcagtgtttgatgagcaggatccacatcacggaggtgatggcaccagtgccagttccacgggtacccagagcccagagatatttggtagtgagcttggcaccaacaatgtctcagcctttcagccttaccaagcaacaagtgaaattgaggtcacaccttcagtccttcgagcaaatatgcctcttcatgttcgacgcagtagtgacccagctctaattggcctctccacttctgtcagtgatagtaatttttcctctgaagagccttcaaggaaaaatcccacacgctggtcaacaacagctggcttcctcaagcagaacactgctgggagtcctaaaacctgcgacaggaagaaagatgaaaactacagaagcctcccgcgggatactagtaactggtctaaccaatttcagagagacaatgctcgctcgtctctgagtgccagtcacccaatggtgggcaagtggctggagaaacaagaacaggatgaggatgggacagaagaggataacagtcgtgttgaacctgttggacatgctgacacgggtttggagcatatacccaacttttctctggatgatatggtaaagctcgtagaagtccccaacgatggagggcctctgggaatccacgtagtgcctttcagtgctcgaggcggcagaaccctggggttattagtaaaacgattggagaaaggtggtaaagctgaacatgaaaatctttttcgtgagaatgattgcattgtcaggattaatgatggcgaccttcgaaatagaagatttgaacaagcacaacatatgtttcgccaagccatgcgtacacccatcatttggttccatgtggttcctgcagcaaataaagagcagtatgaacaactatcccaaagtgagaagaacaattactattcaagccgttttagccctgacagccagtatattgacaacaggagtgtgaacagtgcagggcttcacacggtgcagagagcaccccgactgaaccacccgcctgagcagatagactctcactcaagactacctcatagcgcacacccctcgggaaaaccaccatccgctccagcctcggcacctcagaatgtatttagtacgactgtaagcagtggttataacaccaaaaaaataggcaagaggcttaatatccagcttaagaaaggtacagaaggtttgggattcagcatcacttccagagatgtaacaataggtggctcagctccaatctatgtgaaaaacattctcccccggggggcggccattcaggatggccgacttaaggcaggagacagacttatagaggtaaatggagtagatttagtgggcaaatcccaagaggaagttgtttcgctgttgagaagcaccaagatggaaggaactgtgagccttctggtctttcgccaggaagacgccttccacccaagggaactgaatgcagagccaagccagatgcagattccaaaagaaacgaaagcagaagatgaggatattgttcttacacctgatggcaccagggaatttctgacatttgaagtcccacttaatgattcaggatctgcaggccttggtgtcagtgtcaaaggtaaccggtcaaaagagaaccacgcagatttgggaatctttgtcaagtccattattaatggaggagcagcatctaaagatggaaggcttcgggtgaatgatcaactgatagcagtaaatggagaatccctgttgggcaagacaaaccaagatgccatggaaaccctaagaaggtctatgtctactgaaggcaataaacgaggaatgatccagcttattgttgcaaggagaataagcaagtgcaatgagctgaagtcacctgggagcccccctggacctgagctgcccattgaaacagcgttggatgatagagaacgaagaatttcccattccctctacagtgggattgaggggcttgatgaatcgcccagcagaaatgctgccctcagtaggataatgggtgagtcaggtaaataccagctgtcccctacagtgaatatgccccaagatgacactgtcattatagaagatgacaggttgccagtgcttcctccacatctctctgaccagtcctcttccagctcccatgatgatgtggggtttgtgacggcagatgctggtacttgggccaaggctgcaatcagtgattcagccgactgctctttgagtccagatgttgatccagttcttgcttttcaacgagaaggatttggacgtcagagtatgtcagaaaaacgcacaaagcaattttcagatgccagtcaattggatttcgttaaaacacgaaaatcaaaaagcatggatttaggtatagctgacgagactaaactcaatacagtggatgaccagaaagcaggttctcccagcagagatgtgggtccttccctgggtctgaagaagtcaagctcgttggagagtctgcagaccgcagttgccgaggtgactttgaatggggatattcctttccatcgtccacggccgcggataatcagaggcaggggatgcaatgagagcttcagagctgccatcgacaaatcttatgataaacccgcggtagatgatgatgatgaaggcatggagaccttggaagaagacacagaagaaagttcaagatcagggagagagtctgtatccacagccagtgatcagccttcccactctctggagagacaaatgaatggaaaccaagagaaaggtgataagactgatagaaaaaaggataaaactggaaaagaaaagaagaaagatagagataaggagaaggataaaatgaaagccaagaagggaatgctgaagggcttgggagacatgttcaggtttggcaaacatcgaaaagatgacaagattgagaaaacgggtaaaataaaaatacaggaatcctttacatcagaagaggagaggatacgaatgaagcaggagcaggagaggattcaagccaaaactcgagaatttagggaacgacaagctcgagagcgtgactatgctgaaattcaagattttcatcggacatttggctgtgatgatgagttaatgtatgggggagtttcttcttatgaaggttccatggctctcaacgctagacctcagagcccacgagaagggcatatgatggatgctttgtatgcccaagtcaagaagccgcggaattccaaaccctcacctgtagacagtaacagatcaactcctagcaatcatgatcggatacagcgtctgaggcaagaatttcagcaagcaaagcaagatgaagatgtagaagatcgtcggcggacctatagttttgagcaaccctggccgaacgcacggccggcgacgcagagcgggcgacactcggtgtccgtggaggtgcagatgcagcggcagcggcaggaggagcgcgagagctcccagcaggcccagcgccagtacagctctctgcctcggcaaagcaggaaaaatgccagctcggtctcccaggactcttgggagcagaactactcccctggggaaggcttccagagtgccaaagagaaccccaggtactccagctaccaaggctccaggaacggctacctgggaggacatggcttcaacgccagggtcatgctggaaactcaggagctccttcgccaggaacagaggcggaaggagcagcagatgaagaagcagcctccttccgaggggcccagcaactatgactcgtataagaaagtccaggaccccagttacgcccctcccaaggggcccttccggcaagatgtgcccccctccccttctcaggttgcgaggctgaacagacttcagactcctgagaaagggaggcccttctattcctgagcacgcaaataacggatgcttcatgtcgcgcaataaaagacattttcctatgaagacttgtattttgggagtttttttaaaacctcgatggtactatggagtatttctgttgttggtatcagtgcctttaagcggtgtaggcaaagaaatggaaggccttaatgtctttgccactatgtctcaagtgtctgtttcatggaaggatttcccaccctgtgacaatcatctgtttgaggtgttcatatgctctgcgcctctccacagtaccaggaatctcggccctactcatgagttgtccgcggcttggttgtaacatccctgcaccacttgcagtgacaaattcacctgaagtggaggatgacgtgcggccctgtttctccctctaagttctcttagctatgggatgacatcttagtctctggtggaggaaaagtgggcgacatacaccaaaaattggggctttctggtacttcacagcacagccatttgtcgtactttgtcatcactgtggttttctctttcctttctcagctctttgtgacgggagagtcggtcatcctattacagaagctaagccatagtccaacattgtttggtcaccatgggggtccttttgtaactgccttatgactcaacattaccaataaagtgatgatcctggtctgcgtttatacatacgcttgttcggtcctgttcctgacacgtgggttgagtcaccacagctctgtgtggggaacgtgggagacaggagtggctcctgccgggggaagctgggcctgccattggccctgtgtctatcatgaggggagagctaagaaagaaattctcctaggaagagctcatggcccagtacatcctagtaattattttaattagtttttgttctgacagcttgtcaggaagggcacagaatgggacagagataaaccagacagtcattttgatctgctctctacggtttttcaagtcagaggcaattgatgcttgtctaatgcatccacacactgcatgtctgactggcgatgccgcgctcctaagtagttctgccatgaaacataaaagacaaaggaaaagccgttacacatcacacagagaacattttcgggtcccacagcggtggtggcaggaagctcactctcgcgtcagtattagagtgtgtgtgtgggtctcggggatctcggtggctcccatcttccttcattgttctgaacatcctgtattgtaaaccatggctggggtgctaaagtgcctgtgaatcccgatgtggaaaaagctggaggtgaaagctcagcataccatgtatttactttaaaaacagaaaaaaagacatgtatggatatgtctattttttttttattggcacattgtatttttgtgttgacttgtttttagaaatgatgtgtccacacacgtacccgtgtctcttctgcatttctgtgtcatggttctgtttcttaatcacgtgcggcggtgtctaagtggtgttaccagtgtacgcgcagtgaccttggatgacagtggctctttctcacagcctcccctgagctgtgagaaacagctttctctgtacatatgcaactcctaataaaaggcatatttcttcctgtt

SEQ ID NO: 14707 - DNA, 5996 bp, Homo sapiens
  source 1..5996: mol_type = unassigned DNA
gcggccccgagcgagcgccagcgccacacagccccgggcagccgccggcgagcgcgccgcgacgccgaacaggtggccggaggctgcgggcgccgcggcggggagaggcgaggcaagccccgggcgaagcgaggcgaggcgagggcggccgggccgggcatgcgagctgagcggccccccggcgtcgccgccgcctgcccgcgcccctagccgcccgcgcgcccgagtccccagcggctcctccgcgcccagcgtcctcggtcccggcctcggctgctccggctgcgctcggcgaggggcgcgggcccgcccgcggcggcggcggcatgaaagtgaccgtgtgcttcggacggacccgggtggtcgtgccgtgcggggacggccacatgaaagttttcagcctcatccagcaggcggtgacccgctaccggaaggccatcgccaaggatccaaactactggatacaggtgcatcgcttggaacatggagatggaggaatactagaccttgatgacattctttgtgatgtagcagacgataaagacagactggtagcagtgtttgatgagcaggatccacatcacggaggtgatggcaccagtgccagttccacgggtacccagagcccagagatatttggtagtgagcttggcaccaacaatgtctcagcctttcagccttaccaagcaacaagtgaaattgaggtcacaccttcagtccttcgagcaaatatgcctcttcatgttcgacgcagtagtgacccagctctaattggcctctccacttctgtcagtgatagtaatttttcctctgaagagccttcaaggaaaaatcccacacgctggtcaacaacagctggcttcctcaagcagaacactgctgggagtcctaaaacctgcgacaggaagaaagatgaaaactacagaagcctcccgcgggatactagtaactggtctaaccaatttcagagagacaatgctcgctcgtctctgagtgccagtcacccaatggtgggcaagtggctggagaaacaagaacaggatgaggatgggacagaagaggataacagtcgtgttgaacctgttggacatgctgacacgggtttggagcatatacccaacttttctctggatgatatggtaaagctcgtagaagtccccaacgatggagggcctctgggaatccacgtagtgcctttcagtgctcgaggcggcagaaccctggggttattagtaaaacgattggagaaaggtggtaaagctgaacatgaaaatctttttcgtgagaatgattgcattgtcaggattaatgatggcgaccttcgaaatagaagatttgaacaagcacaacatatgtttcgccaagccatgcgtacacccatcatttggttccatgtggttcctgcagcaaataaagagcagtatgaacaactatcccaaagtgagaagaacaattactattcaagccgttttagccctgacagccagtatattgacaacaggagtgtgaacagtgcagggcttcacacggtgcagagagcaccccgactgaaccacccgcctgagcagatagactctcactcaagactacctcatagcgcacacccctcgggaaaaccaccatccgctccagcctcggcacctcagaatgtatttagtacgactgtaagcagtggttataacaccaaaaaaataggcaagaggcttaatatccagcttaagaaaggtacagaaggtttgggattcagcatcacttccagagatgtaacaataggtggctcagctccaatctatgtgaaaaacattctcccccggggggcggccattcaggatggccgacttaaggcaggagacagacttatagaggtaaatggagtagatttagtgggcaaatcccaagaggaagttgtttcgctgttgagaagcaccaagatggaaggaactgtgagccttctggtctttcgccaggaagacgccttccacccaagggaactgaatgcagagccaagccagatgcagattccaaaagaaacgaaagcagaagatgaggatattgttcttacacctgatggcaccagggaatttctgacatttgaagtcccacttaatgattcaggatctgcaggccttggtgtcagtgtcaaaggtaaccggtcaaaagagaaccacgcagatttgggaatctttgtcaagtccattattaatggaggagcagcatctaaagatggaaggcttcgggtgaatgatcaactgatagcagtaaatggagaatccctgttgggcaagacaaaccaagatgccatggaaaccctaagaaggtctatgtctactgaaggcaataaacgaggaatgatccagcttattgttgcaaggagaataagcaagtgcaatgagctgaagtcacctgggagcccccctggacctgagctgcccattgaaacagcgttggatgatagagaacgaagaatttcccattccctctacagtgggattgaggggcttgatgaatcgcccagcagaaatgctgccctcagtaggataatgggtaaataccagctgtcccctacagtgaatatgccccaagatgacactgtcattatagaagatgacaggttgccagtgcttcctccacatctctctgaccagtcctcttccagctcccatgatgatgtggggtttgtgacggcagatgctggtacttgggccaaggctgcaatcagtgattcagccgactgctctttgagtccagatgttgatccagttcttgcttttcaacgagaaggatttggacgtcagagtatgtcagaaaaacgcacaaagcaattttcagatgccagtcaattggatttcgttaaaacacgaaaatcaaaaagcatggatttaggtatagctgacgagactaaactcaatacagtggatgaccagaaagcaggttctcccagcagagatgtgggtccttccctgggtctgaagaagtcaagctcgttggagagtctgcagaccgcagttgccgaggtgactttgaatggggatattcctttccatcgtccacggccgcggataatcagaggcaggggatgcaatgagagcttcagagctgccatcgacaaatcttatgataaacccgcggtagatgatgatgatgaaggcatggagaccttggaagaagacacagaagaaagttcaagatcagggagagagtctgtatccacagccagtgatcagccttcccactctctggagagacaaatgaatggaaaccaagagaaaggtgataagactgatagaaaaaaggataaaactggaaaagaaaagaagaaagatagagataaggagaaggataaaatgaaagccaagaagggaatgctgaagggcttgggagacatgttcaggtttggcaaacatcgaaaagatgacaagattgagaaaacgggtaaaataaaaatacaggaatcctttacatcagaagaggagaggatacgaatgaagcaggagcaggagaggattcaagccaaaactcgagaatttagggaacgacaagctcgagagcgtgactatgctgaaattcaagattttcatcggacatttggctgtgatgatgagttaatgtatgggggagtttcttcttatgaaggttccatggctctcaacgctagacctcagagcccacgagaagggcatatgatggatgctttgtatgcccaagtcaagaagccgcggaattccaaaccctcacctgtagacagtaacagatcaactcctagcaatcatgatcggatacagcgtctgaggcaagaatttcagcaagcaaagcaagatgaagatgtagaagatcgtcggcggacctatagttttgagcaaccctggccgaacgcacggccggcgacgcagagcgggcgacactcggtgtccgtggaggtgcagatgcagcggcagcggcaggaggagcgcgagagctcccagcaggcccagcgccagtacagctctctgcctcggcaaagcaggaaaaatgccagctcggtctcccaggactcttgggagcagaactactcccctggggaaggcttccagagtgccaaagagaaccccaggtactccagctaccaaggctccaggaacggctacctgggaggacatggcttcaacgccagggtcatgctggaaactcaggagctccttcgccaggaacagaggcggaaggagcagcagatgaagaagcagcctccttccgaggggcccagcaactatgactcgtataagaaagtccaggaccccagttacgcccctcccaaggggcccttccggcaagatgtgcccccctccccttctcaggttgcgaggctgaacagacttcagactcctgagaaagggaggcccttctattcctgagcacgcaaataacggatgcttcatgtcgcgcaataaaagacattttcctatgaagacttgtattttgggagtttttttaaaacctcgatggtactatggagtatttctgttgttggtatcagtgcctttaagcggtgtaggcaaagaaatggaaggccttaatgtctttgccactatgtctcaagtgtctgtttcatggaaggatttcccaccctgtgacaatcatctgtttgaggtgttcatatgctctgcgcctctccacagtaccaggaatctcggccctactcatgagttgtccgcggcttggttgtaacatccctgcaccacttgcagtgacaaattcacctgaagtggaggatgacgtgcggccctgtttctccctctaagttctcttagctatgggatgacatcttagtctctggtggaggaaaagtgggcgacatacaccaaaaattggggctttctggtacttcacagcacagccatttgtcgtactttgtcatcactgtggttttctctttcctttctcagctctttgtgacgggagagtcggtcatcctattacagaagctaagccatagtccaacattgtttggtcaccatgggggtccttttgtaactgccttatgactcaacattaccaataaagtgatgatcctggtctgcgtttatacatacgcttgttcggtcctgttcctgacacgtgggttgagtcaccacagctctgtgtggggaacgtgggagacaggagtggctcctgccgggggaagctgggcctgccattggccctgtgtctatcatgaggggagagctaagaaagaaattctcctaggaagagctcatggcccagtacatcctagtaattattttaattagtttttgttctgacagcttgtcaggaagggcacagaatgggacagagataaaccagacagtcattttgatctgctctctacggtttttcaagtcagaggcaattgatgcttgtctaatgcatccacacactgcatgtctgactggcgatgccgcgctcctaagtagttctgccatgaaacataaaagacaaaggaaaagccgttacacatcacacagagaacattttcgggtcccacagcggtggtggcaggaagctcactctcgcgtcagtattagagtgtgtgtgtgggtctcggggatctcggtggctcccatcttccttcattgttctgaacatcctgtattgtaaaccatggctggggtgctaaagtgcctgtgaatcccgatgtggaaaaagctggaggtgaaagctcagcataccatgtatttactttaaaaacagaaaaaaagacatgtatggatatgtctattttttttttattggcacattgtatttttgtgttgacttgtttttagaaatgatgtgtccacacacgtacccgtgtctcttctgcatttctgtgtcatggttctgtttcttaatcacgtgcggcggtgtctaagtggtgttaccagtgtacgcgcagtgaccttggatgacagtggctctttctcacagcctcccctgagctgtgagaaacagctttctctgtacatatgcaactcctaataaaaggcatatttcttcctgtt

SEQ ID NO: 14708 - DNA, 5894 bp, Homo sapiens
  source 1..5894: mol_type = unassigned DNA
gcggccccgagcgagcgccagcgccacacagccccgggcagccgccggcgagcgcgccgcgacgccgaacaggtggccggaggctgcgggcgccgcggcggggagaggcgaggcaagccccgggcgaagcgaggcgaggcgagggcggccgggccgggcatgcgagctgagcggccccccggcgtcgccgccgcctgcccgcgcccctagccgcccgcgcgcccgagtccccagcggctcctccgcgcccagcgtcctcggtcccggcctcggctgctccggctgcgctcggcgaggggcgcgggcccgcccgcggcggcggcggcatgaaagtgaccgtgtgcttcggacggacccgggtggtcgtgccgtgcggggacggccacatgaaagttttcagcctcatccagcaggcggtgacccgctaccggaaggccatcgccaaggatccaaactactggatacaggtgcatcgcttggaacatggagatggaggaatactagaccttgatgacattctttgtgatgtagcagacgataaagacagactggtagcagtgtttgatgagcaggatccacatcacggaggtgatggcaccagtgccagttccacgggtacccagagcccagagatatttggtagtgagcttggcaccaacaatgtctcagcctttcagccttaccaagcaacaagtgaaattgaggtcacaccttcagtccttcgagcaaatatgcctcttcatgttcgacgcagtagtgacccagctctaattggcctctccacttctgtcagtgatagtaatttttcctctgaagagccttcaaggaaaaatcccacacgctggtcaacaacagctggcttcctcaagcagaacactgctgggagtcctaaaacctgcgacaggaagaaagatgaaaactacagaagcctcccgcgggatactagtaactggtctaaccaatttcagagagacaatgctcgctcgtctctgagtgccagtcacccaatggtgggcaagtggctggagaaacaagaacaggatgaggatgggacagaagaggataacagtcgtgttgaacctgttggacatgctgacacgggtttggagcatatacccaacttttctctggatgatatggtaaagctcgtagaagtccccaacgatggagggcctctgggaatccacgtagtgcctttcagtgctcgaggcggcagaaccctggggttattagtaaaacgattggagaaaggtggtaaagctgaacatgaaaatctttttcgtgagaatgattgcattgtcaggattaatgatggcgaccttcgaaatagaagatttgaacaagcacaacatatgtttcgccaagccatgcgtacacccatcatttggttccatgtggttcctgcagcaaataaagagcagtatgaacaactatcccaaagtgagaagaacaattactattcaagccgttttagccctgacagccagtatattgacaacaggagtgtgaacagtgcagggcttcacacggtgcagagagcaccccgactgaaccacccgcctgagcagatagactctcactcaagactacctcatagcgcacacccctcgggaaaaccaccatccgctccagcctcggcacctcagaatgtatttagtacgactgtaagcagtggttataacaccaaaaaaataggcaagaggcttaatatccagcttaagaaaggtacagaaggtttgggattcagcatcacttccagagatgtaacaataggtggctcagctccaatctatgtgaaaaacattctcccccggggggcggccattcaggatggccgacttaaggcaggagacagacttatagaggtaaatggagtagatttagtgggcaaatcccaagaggaagttgtttcgctgttgagaagcaccaagatggaaggaactgtgagccttctggtctttcgccaggaagacgccttccacccaagggaactgaatgcagagccaagccagatgcagattccaaaagaaacgaaagcagaagatgaggatattgttcttacacctgatggcaccagggaatttctgacatttgaagtcccacttaatgattcaggatctgcaggccttggtgtcagtgtcaaaggtaaccggtcaaaagagaaccacgcagatttgggaatctttgtcaagtccattattaatggaggagcagcatctaaagatggaaggcttcgggtgaatgatcaactgatagcagtaaatggagaatccctgttgggcaagacaaaccaagatgccatggaaaccctaagaaggtctatgtctactgaaggcaataaacgaggaatgatccagcttattgttgcaaggagaataagcaagtgcaatgagctgaagtcacctgggagcccccctggacctgagctgcccattgaaacagcgttggatgatagagaacgaagaatttcccattccctctacagtgggattgaggggcttgatgaatcgcccagcagaaatgctgccctcagtaggataatgggtgagtcaggtaaataccagctgtcccctacagtgaatatgccccaagatgacactgtcattatagaagatgacaggttgccagtgcttcctccacatctctctgaccagtcctcttccagctcccatgatgatgtggggtttgtgacggcagatgctggtacttgggccaaggctgcaatcagtgattcagccgactgctctttgagtccagatgttgatccagttcttgcttttcaacgagaaggatttggacgtcagagtatgtcagaaaaacgcacaaagcaattttcagatgccagtcaattggatttcgttaaaacacgaaaatcaaaaagcatggatttaggtatagctgacgagactaaactcaatacagtggatgaccagaaagcaggttctcccagcagagatgtgggtccttccctgggtctgaagaagtcaagctcgttggagagtctgcagaccgcagttgccgaggtgactttgaatggggatattcctttccatcgtccacggccgcggataatcagaggcaggggatgcaatgagagcttcagagctgccatcgacaaatcttatgataaacccgcggtagatgatgatgatgaaggcatggagaccttggaagaagacacagaagaaagttcaagatcagggagagagtctgtatccacagccagtgatcagccttcccactctctggagagacaaatgaatggaaaccaagagaaaggtgataagactgatagaaaaaaggataaaactggaaaagaaaagaagaaagatagagataaggagaaggataaaatgaaagccaagaagggaatgctgaagggcttgggagacatgttcaggattcaagccaaaactcgagaatttagggaacgacaagctcgagagcgtgactatgctgaaattcaagattttcatcggacatttggctgtgatgatgagttaatgtatgggggagtttcttcttatgaaggttccatggctctcaacgctagacctcagagcccacgagaagggcatatgatggatgctttgtatgcccaagtcaagaagccgcggaattccaaaccctcacctgtagacagtaacagatcaactcctagcaatcatgatcggatacagcgtctgaggcaagaatttcagcaagcaaagcaagatgaagatgtagaagatcgtcggcggacctatagttttgagcaaccctggccgaacgcacggccggcgacgcagagcgggcgacactcggtgtccgtggaggtgcagatgcagcggcagcggcaggaggagcgcgagagctcccagcaggcccagcgccagtacagctctctgcctcggcaaagcaggaaaaatgccagctcggtctcccaggactcttgggagcagaactactcccctggggaaggcttccagagtgccaaagagaaccccaggtactccagctaccaaggctccaggaacggctacctgggaggacatggcttcaacgccagggtcatgctggaaactcaggagctccttcgccaggaacagaggcggaaggagcagcagatgaagaagcagcctccttccgaggggcccagcaactatgactcgtataagaaagtccaggaccccagttacgcccctcccaaggggcccttccggcaagatgtgcccccctccccttctcaggttgcgaggctgaacagacttcagactcctgagaaagggaggcccttctattcctgagcacgcaaataacggatgcttcatgtcgcgcaataaaagacattttcctatgaagacttgtattttgggagtttttttaaaacctcgatggtactatggagtatttctgttgttggtatcagtgcctttaagcggtgtaggcaaagaaatggaaggccttaatgtctttgccactatgtctcaagtgtctgtttcatggaaggatttcccaccctgtgacaatcatctgtttgaggtgttcatatgctctgcgcctctccacagtaccaggaatctcggccctactcatgagttgtccgcggcttggttgtaacatccctgcaccacttgcagtgacaaattcacctgaagtggaggatgacgtgcggccctgtttctccctctaagttctcttagctatgggatgacatcttagtctctggtggaggaaaagtgggcgacatacaccaaaaattggggctttctggtacttcacagcacagccatttgtcgtactttgtcatcactgtggttttctctttcctttctcagctctttgtgacgggagagtcggtcatcctattacagaagctaagccatagtccaacattgtttggtcaccatgggggtccttttgtaactgccttatgactcaacattaccaataaagtgatgatcctggtctgcgtttatacatacgcttgttcggtcctgttcctgacacgtgggttgagtcaccacagctctgtgtggggaacgtgggagacaggagtggctcctgccgggggaagctgggcctgccattggccctgtgtctatcatgaggggagagctaagaaagaaattctcctaggaagagctcatggcccagtacatcctagtaattattttaattagtttttgttctgacagcttgtcaggaagggcacagaatgggacagagataaaccagacagtcattttgatctgctctctacggtttttcaagtcagaggcaattgatgcttgtctaatgcatccacacactgcatgtctgactggcgatgccgcgctcctaagtagttctgccatgaaacataaaagacaaaggaaaagccgttacacatcacacagagaacattttcgggtcccacagcggtggtggcaggaagctcactctcgcgtcagtattagagtgtgtgtgtgggtctcggggatctcggtggctcccatcttccttcattgttctgaacatcctgtattgtaaaccatggctggggtgctaaagtgcctgtgaatcccgatgtggaaaaagctggaggtgaaagctcagcataccatgtatttactttaaaaacagaaaaaaagacatgtatggatatgtctattttttttttattggcacattgtatttttgtgttgacttgtttttagaaatgatgtgtccacacacgtacccgtgtctcttctgcatttctgtgtcatggttctgtttcttaatcacgtgcggcggtgtctaagtggtgttaccagtgtacgcgcagtgaccttggatgacagtggctctttctcacagcctcccctgagctgtgagaaacagctttctctgtacatatgcaactcctaataaaaggcatatttcttcctgtt

SEQ ID NO: 14709 - DNA, 5669 bp, Homo sapiens
  source 1..5669: mol_type = unassigned DNA
gcggccccgagcgagcgccagcgccacacagccccgggcagccgccggcgagcgcgccgcgacgccgaacaggtggccggaggctgcgggcgccgcggcggggagaggcgaggcaagccccgggcgaagcgaggcgaggcgagggcggccgggccgggcatgcgagctgagcggccccccggcgtcgccgccgcctgcccgcgcccctagccgcccgcgcgcccgagtccccagcggctcctccgcgcccagcgtcctcggtcccggcctcggctgctccggctgcgctcggcgaggggcgcgggcccgcccgcggcggcggcggcatgaaagtgaccgtgtgcttcggacggacccgggtggtcgtgccgtgcggggacggccacatgaaagttttcagcctcatccagcaggcggtgacccgctaccggaaggccatcgccaaggatccaaactactggatacaggtgcatcgcttggaacatggagatggaggaatactagaccttgatgacattctttgtgatgtagcagacgataaagacagactggtagcagtgtttgatgagcaggatccacatcacggaggtgatggcaccagtgccagttccacgggtacccagagcccagagatatttggtagtgagcttggcaccaacaatgtctcagcctttcagccttaccaagcaacaagtgaaattgaggtcacaccttcagtccttcgagcaaatatgcctcttcatgttcgacgcagtagtgacccagctctaattggcctctccacttctgtcagtgatagtaatttttcctctgaagagccttcaaggaaaaatcccacacgctggtcaacaacagctggcttcctcaagcagaacactgctgggagtcctaaaacctgcgacaggaaggatgaggatgggacagaagaggataacagtcgtgttgaacctgttggacatgctgacacgggtttggagcatatacccaacttttctctggatgatatggtaaagctcgtagaagtccccaacgatggagggcctctgggaatccacgtagtgcctttcagtgctcgaggcggcagaaccctggggttattagtaaaacgattggagaaaggtggtaaagctgaacatgaaaatctttttcgtgagaatgattgcattgtcaggattaatgatggcgaccttcgaaatagaagatttgaacaagcacaacatatgtttcgccaagccatgcgtacacccatcatttggttccatgtggttcctgcagcaaataaagagcagtatgaacaactatcccaaagtgagaagaacaattactattcaagccgttttagccctgacagccagtatattgacaacaggagtgtgaacagtgcagggcttcacacggtgcagagagcaccccgactgaaccacccgcctgagcagatagactctcactcaagactacctcatagcgcacacccctcgggaaaaccaccatccgctccagcctcggcacctcagaatgtatttagtacgactgtaagcagtggttataacaccaaaaaaataggcaagaggcttaatatccagcttaagaaaggtacagaaggtttgggattcagcatcacttccagagatgtaacaataggtggctcagctccaatctatgtgaaaaacattctcccccggggggcggccattcaggatggccgacttaaggcaggagacagacttatagaggtaaatggagtagatttagtgggcaaatcccaagaggaagttgtttcgctgttgagaagcaccaagatggaaggaactgtgagccttctggtctttcgccaggaagacgccttccacccaagggaactgaaagcagaagatgaggatattgttcttacacctgatggcaccagggaatttctgacatttgaagtcccacttaatgattcaggatctgcaggccttggtgtcagtgtcaaaggtaaccggtcaaaagagaaccacgcagatttgggaatctttgtcaagtccattattaatggaggagcagcatctaaagatggaaggcttcgggtgaatgatcaactgatagcagtaaatggagaatccctgttgggcaagacaaaccaagatgccatggaaaccctaagaaggtctatgtctactgaaggcaataaacgaggaatgatccagcttattgttgcaaggagaataagcaagtgcaatgagctgaagtcacctgggagcccccctggacctgagctgcccattgaaacagcgttggatgatagagaacgaagaatttcccattccctctacagtgggattgaggggcttgatgaatcgcccagcagaaatgctgccctcagtaggataatgggtaaataccagctgtcccctacagtgaatatgccccaagatgacactgtcattatagaagatgacaggttgccagtgcttcctccacatctctctgaccagtcctcttccagctcccatgatgatgtggggtttgtgacggcagatgctggtacttgggccaaggctgcaatcagtgattcagccgactgctctttgagtccagatgttgatccagttcttgcttttcaacgagaaggatttggacgtcagagtatgtcagaaaaacgcacaaagcaattttcagatgccagtcaattggatttcgttaaaacacgaaaatcaaaaagcatggatttaggtagttctcccagcagagatgtgggtccttccctgggtctgaagaagtcaagctcgttggagagtctgcagaccgcagttgccgaggtgactttgaatggggatattcctttccatcgtccacggccgcggataatcagaggcaggggatgcaatgagagcttcagagctgccatcgacaaatcttatgataaacccgcggtagatgatgatgatgaaggcatggagaccttggaagaagacacagaagaaagttcaagatcagggagagagtctgtatccacagccagtgatcagccttcccactctctggagagacaaatgaatggaaaccaagagaaaggtgataagactgatagaaaaaaggataaaactggaaaagaaaagaagaaagatagagataaggagaaggataaaatgaaagccaagaagggaatgctgaagggcttgggagacatgttcaggattcaagccaaaactcgagaatttagggaacgacaagctcgagagcgtgactatgctgaaattcaagattttcatcggacatttggctgtgatgatgagttaatgtatgggggagtttcttcttatgaaggttccatggctctcaacgctagacctcagagcccacgagaagggcatatgatggatgctttgtatgcccaagtcaagaagccgcggaattccaaaccctcacctgtagacagtaacagatcaactcctagcaatcatgatcggatacagcgtctgaggcaagaatttcagcaagcaaagcaagatgaagatgtagaagatcgtcggcggacctatagttttgagcaaccctggccgaacgcacggccggcgacgcagagcgggcgacactcggtgtccgtggaggtgcagatgcagcggcagcggcaggaggagcgcgagagctcccagcaggcccagcgccagtacagctctctgcctcggcaaagcaggaaaaatgccagctcggtctcccaggactcttgggagcagaactactcccctggggaaggcttccagagtgccaaagagaaccccaggtactccagctaccaaggctccaggaacggctacctgggaggacatggcttcaacgccagggtcatgctggaaactcaggagctccttcgccaggaacagaggcggaaggagcagcagatgaagaagcagcctccttccgaggggcccagcaactatgactcgtataagaaagtccaggaccccagttacgcccctcccaaggggcccttccggcaagatgtgcccccctccccttctcaggttgcgaggctgaacagacttcagactcctgagaaagggaggcccttctattcctgagcacgcaaataacggatgcttcatgtcgcgcaataaaagacattttcctatgaagacttgtattttgggagtttttttaaaacctcgatggtactatggagtatttctgttgttggtatcagtgcctttaagcggtgtaggcaaagaaatggaaggccttaatgtctttgccactatgtctcaagtgtctgtttcatggaaggatttcccaccctgtgacaatcatctgtttgaggtgttcatatgctctgcgcctctccacagtaccaggaatctcggccctactcatgagttgtccgcggcttggttgtaacatccctgcaccacttgcagtgacaaattcacctgaagtggaggatgacgtgcggccctgtttctccctctaagttctcttagctatgggatgacatcttagtctctggtggaggaaaagtgggcgacatacaccaaaaattggggctttctggtacttcacagcacagccatttgtcgtactttgtcatcactgtggttttctctttcctttctcagctctttgtgacgggagagtcggtcatcctattacagaagctaagccatagtccaacattgtttggtcaccatgggggtccttttgtaactgccttatgactcaacattaccaataaagtgatgatcctggtctgcgtttatacatacgcttgttcggtcctgttcctgacacgtgggttgagtcaccacagctctgtgtggggaacgtgggagacaggagtggctcctgccgggggaagctgggcctgccattggccctgtgtctatcatgaggggagagctaagaaagaaattctcctaggaagagctcatggcccagtacatcctagtaattattttaattagtttttgttctgacagcttgtcaggaagggcacagaatgggacagagataaaccagacagtcattttgatctgctctctacggtttttcaagtcagaggcaattgatgcttgtctaatgcatccacacactgcatgtctgactggcgatgccgcgctcctaagtagttctgccatgaaacataaaagacaaaggaaaagccgttacacatcacacagagaacattttcgggtcccacagcggtggtggcaggaagctcactctcgcgtcagtattagagtgtgtgtgtgggtctcggggatctcggtggctcccatcttccttcattgttctgaacatcctgtattgtaaaccatggctggggtgctaaagtgcctgtgaatcccgatgtggaaaaagctggaggtgaaagctcagcataccatgtatttactttaaaaacagaaaaaaagacatgtatggatatgtctattttttttttattggcacattgtatttttgtgttgacttgtttttagaaatgatgtgtccacacacgtacccgtgtctcttctgcatttctgtgtcatggttctgtttcttaatcacgtgcggcggtgtctaagtggtgttaccagtgtacgcgcagtgaccttggatgacagtggctctttctcacagcctcccctgagctgtgagaaacagctttctctgtacatatgcaactcctaataaaaggcatatttcttcctgtt

SEQ ID NO: 14710 - DNA, 5867 bp, Homo sapiens
  source 1..5867: mol_type = unassigned DNA
gcggccccgagcgagcgccagcgccacacagccccgggcagccgccggcgagcgcgccgcgacgccgaacaggtggccggaggctgcgggcgccgcggcggggagaggcgaggcaagccccgggcgaagcgaggcgaggcgagggcggccgggccgggcatgcgagctgagcggccccccggcgtcgccgccgcctgcccgcgcccctagccgcccgcgcgcccgagtccccagcggctcctccgcgcccagcgtcctcggtcccggcctcggctgctccggctgcgctcggcgaggggcgcgggcccgcccgcggcggcggcggcatgaaagtgaccgtgtgcttcggacggacccgggtggtcgtgccgtgcggggacggccacatgaaagttttcagcctcatccagcaggcggtgacccgctaccggaaggccatcgccaaggatccaaactactggatacaggtgcatcgcttggaacatggagatggaggaatactagaccttgatgacattctttgtgatgtagcagacgataaagacagactggtagcagtgtttgatgagcaggatccacatcacggaggtgatggcaccagtgccagttccacgggtacccagagcccagagatatttggtagtgagcttggcaccaacaatgtctcagcctttcagccttaccaagcaacaagtgaaattgaggtcacaccttcagtccttcgagcaaatatgcctcttcatgttcgacgcagtagtgacccagctctaattggcctctccacttctgtcagtgatagtaatttttcctctgaagagccttcaaggaaaaatcccacacgctggtcaacaacagctggcttcctcaagcagaacactgctgggagtcctaaaacctgcgacaggaagaaagatgaaaactacagaagcctcccgcgggatactagtaactggtctaaccaatttcagagagacaatgctcgctcgtctctgagtgccagtcacccaatggtgggcaagtggctggagaaacaagaacaggatgaggatgggacagaagaggataacagtcgtgttgaacctgttggacatgctgacacgggtttggagcatatacccaacttttctctggatgatatggtaaagctcgtagaagtccccaacgatggagggcctctgggaatccacgtagtgcctttcagtgctcgaggcggcagaaccctggggttattagtaaaacgattggagaaaggtggtaaagctgaacatgaaaatctttttcgtgagaatgattgcattgtcaggattaatgatggcgaccttcgaaatagaagatttgaacaagcacaacatatgtttcgccaagccatgcgtacacccatcatttggttccatgtggttcctgcagcaaataaagagcagtatgaacaactatcccaaagtgagaagaacaattactattcaagccgttttagccctgacagccagtatattgacaacaggagtgtgaacagtgcagggcttcacacggtgcagagagcaccccgactgaaccacccgcctgagcagatagactctcactcaagactacctcatagcgcacacccctcgggaaaaccaccatccgctccagcctcggcacctcagaatgtatttagtacgactgtaagcagtggttataacaccaaaaaaataggcaagaggcttaatatccagcttaagaaaggtacagaaggtttgggattcagcatcacttccagagatgtaacaataggtggctcagctccaatctatgtgaaaaacattctcccccggggggcggccattcaggatggccgacttaaggcaggagacagacttatagaggtaaatggagtagatttagtgggcaaatcccaagaggaagttgtttcgctgttgagaagcaccaagatggaaggaactgtgagccttctggtctttcgccaggaagacgccttccacccaagggaactgaaagcagaagatgaggatattgttcttacacctgatggcaccagggaatttctgacatttgaagtcccacttaatgattcaggatctgcaggccttggtgtcagtgtcaaaggtaaccggtcaaaagagaaccacgcagatttgggaatctttgtcaagtccattattaatggaggagcagcatctaaagatggaaggcttcgggtgaatgatcaactgatagcagtaaatggagaatccctgttgggcaagacaaaccaagatgccatggaaaccctaagaaggtctatgtctactgaaggcaataaacgaggaatgatccagcttattgttgcaaggagaataagcaagtgcaatgagctgaagtcacctgggagcccccctggacctgagctgcccattgaaacagcgttggatgatagagaacgaagaatttcccattccctctacagtgggattgaggggcttgatgaatcgcccagcagaaatgctgccctcagtaggataatgggtaaataccagctgtcccctacagtgaatatgccccaagatgacactgtcattatagaagatgacaggttgccagtgcttcctccacatctctctgaccagtcctcttccagctcccatgatgatgtggggtttgtgacggcagatgctggtacttgggccaaggctgcaatcagtgattcagccgactgctctttgagtccagatgttgatccagttcttgcttttcaacgagaaggatttggacgtcagatagctgacgagactaaactcaatacagtggatgaccagaaagcaggttctcccagcagagatgtgggtccttccctgggtctgaagaagtcaagctcgttggagagtctgcagaccgcagttgccgaggtgactttgaatggggatattcctttccatcgtccacggccgcggataatcagaggcaggggatgcaatgagagcttcagagctgccatcgacaaatcttatgataaacccgcggtagatgatgatgatgaaggcatggagaccttggaagaagacacagaagaaagttcaagatcagggagagagtctgtatccacagccagtgatcagccttcccactctctggagagacaaatgaatggaaaccaagagaaaggtgataagactgatagaaaaaaggataaaactggaaaagaaaagaagaaagatagagataaggagaaggataaaatgaaagccaagaagggaatgctgaagggcttgggagacatgttcaggtttggcaaacatcgaaaagatgacaagattgagaaaacgggtaaaataaaaatacaggaatcctttacatcagaagaggagaggatacgaatgaagcaggagcaggagaggattcaagccaaaactcgagaatttagggaacgacaagctcgagagcgtgactatgctgaaattcaagattttcatcggacatttggctgtgatgatgagttaatgtatgggggagtttcttcttatgaaggttccatggctctcaacgctagacctcagagcccacgagaagggcatatgatggatgctttgtatgcccaagtcaagaagccgcggaattccaaaccctcacctgtagacagtaacagatcaactcctagcaatcatgatcggatacagcgtctgaggcaagaatttcagcaagcaaagcaagatgaagatgtagaagatcgtcggcggacctatagttttgagcaaccctggccgaacgcacggccggcgacgcagagcgggcgacactcggtgtccgtggaggtgcagatgcagcggcagcggcaggaggagcgcgagagctcccagcaggcccagcgccagtacagctctctgcctcggcaaagcaggaaaaatgccagctcggtctcccaggactcttgggagcagaactactcccctggggaaggcttccagagtgccaaagagaaccccaggtactccagctaccaaggctccaggaacggctacctgggaggacatggcttcaacgccagggtcatgctggaaactcaggagctccttcgccaggaacagaggcggaaggagcagcagatgaagaagcagcctccttccgaggggcccagcaactatgactcgtataagaaagtccaggaccccagttacgcccctcccaaggggcccttccggcaagatgtgcccccctccccttctcaggttgcgaggctgaacagacttcagactcctgagaaagggaggcccttctattcctgagcacgcaaataacggatgcttcatgtcgcgcaataaaagacattttcctatgaagacttgtattttgggagtttttttaaaacctcgatggtactatggagtatttctgttgttggtatcagtgcctttaagcggtgtaggcaaagaaatggaaggccttaatgtctttgccactatgtctcaagtgtctgtttcatggaaggatttcccaccctgtgacaatcatctgtttgaggtgttcatatgctctgcgcctctccacagtaccaggaatctcggccctactcatgagttgtccgcggcttggttgtaacatccctgcaccacttgcagtgacaaattcacctgaagtggaggatgacgtgcggccctgtttctccctctaagttctcttagctatgggatgacatcttagtctctggtggaggaaaagtgggcgacatacaccaaaaattggggctttctggtacttcacagcacagccatttgtcgtactttgtcatcactgtggttttctctttcctttctcagctctttgtgacgggagagtcggtcatcctattacagaagctaagccatagtccaacattgtttggtcaccatgggggtccttttgtaactgccttatgactcaacattaccaataaagtgatgatcctggtctgcgtttatacatacgcttgttcggtcctgttcctgacacgtgggttgagtcaccacagctctgtgtggggaacgtgggagacaggagtggctcctgccgggggaagctgggcctgccattggccctgtgtctatcatgaggggagagctaagaaagaaattctcctaggaagagctcatggcccagtacatcctagtaattattttaattagtttttgttctgacagcttgtcaggaagggcacagaatgggacagagataaaccagacagtcattttgatctgctctctacggtttttcaagtcagaggcaattgatgcttgtctaatgcatccacacactgcatgtctgactggcgatgccgcgctcctaagtagttctgccatgaaacataaaagacaaaggaaaagccgttacacatcacacagagaacattttcgggtcccacagcggtggtggcaggaagctcactctcgcgtcagtattagagtgtgtgtgtgggtctcggggatctcggtggctcccatcttccttcattgttctgaacatcctgtattgtaaaccatggctggggtgctaaagtgcctgtgaatcccgatgtggaaaaagctggaggtgaaagctcagcataccatgtatttactttaaaaacagaaaaaaagacatgtatggatatgtctattttttttttattggcacattgtatttttgtgttgacttgtttttagaaatgatgtgtccacacacgtacccgtgtctcttctgcatttctgtgtcatggttctgtttcttaatcacgtgcggcggtgtctaagtggtgttaccagtgtacgcgcagtgaccttggatgacagtggctctttctcacagcctcccctgagctgtgagaaacagctttctctgtacatatgcaactcctaataaaaggcatatttcttcctgtt

SEQ ID NO: 14711 - DNA, 5825 bp, Homo sapiens
  source 1..5825: mol_type = unassigned DNA
gcggccccgagcgagcgccagcgccacacagccccgggcagccgccggcgagcgcgccgcgacgccgaacaggtggccggaggctgcgggcgccgcggcggggagaggcgaggcaagccccgggcgaagcgaggcgaggcgagggcggccgggccgggcatgcgagctgagcggccccccggcgtcgccgccgcctgcccgcgcccctagccgcccgcgcgcccgagtccccagcggctcctccgcgcccagcgtcctcggtcccggcctcggctgctccggctgcgctcggcgaggggcgcgggcccgcccgcggcggcggcggcatgaaagtgaccgtgtgcttcggacggacccgggtggtcgtgccgtgcggggacggccacatgaaagttttcagcctcatccagcaggcggtgacccgctaccggaaggccatcgccaaggatccaaactactggatacaggtgcatcgcttggaacatggagatggaggaatactagaccttgatgacattctttgtgatgtagcagacgataaagacagactggtagcagtgtttgatgagcaggatccacatcacggaggtgatggcaccagtgccagttccacgggtacccagagcccagagatatttggtagtgagcttggcaccaacaatgtctcagcctttcagccttaccaagcaacaagtgaaattgaggtcacaccttcagtccttcgagcaaatatgcctcttcatgttcgacgcagtagtgacccagctctaattggcctctccacttctgtcagtgatagtaatttttcctctgaagagccttcaaggaaaaatcccacacgctggtcaacaacagctggcttcctcaagcagaacactgctgggagtcctaaaacctgcgacaggaaggatgaggatgggacagaagaggataacagtcgtgttgaacctgttggacatgctgacacgggtttggagcatatacccaacttttctctggatgatatggtaaagctcgtagaagtccccaacgatggagggcctctgggaatccacgtagtgcctttcagtgctcgaggcggcagaaccctggggttattagtaaaacgattggagaaaggtggtaaagctgaacatgaaaatctttttcgtgagaatgattgcattgtcaggattaatgatggcgaccttcgaaatagaagatttgaacaagcacaacatatgtttcgccaagccatgcgtacacccatcatttggttccatgtggttcctgcagcaaataaagagcagtatgaacaactatcccaaagtgagaagaacaattactattcaagccgttttagccctgacagccagtatattgacaacaggagtgtgaacagtgcagggcttcacacggtgcagagagcaccccgactgaaccacccgcctgagcagatagactctcactcaagactacctcatagcgcacacccctcgggaaaaccaccatccgctccagcctcggcacctcagaatgtatttagtacgactgtaagcagtggttataacaccaaaaaaataggcaagaggcttaatatccagcttaagaaaggtacagaaggtttgggattcagcatcacttccagagatgtaacaataggtggctcagctccaatctatgtgaaaaacattctcccccggggggcggccattcaggatggccgacttaaggcaggagacagacttatagaggtaaatggagtagatttagtgggcaaatcccaagaggaagttgtttcgctgttgagaagcaccaagatggaaggaactgtgagccttctggtctttcgccaggaagacgccttccacccaagggaactgaaagcagaagatgaggatattgttcttacacctgatggcaccagggaatttctgacatttgaagtcccacttaatgattcaggatctgcaggccttggtgtcagtgtcaaaggtaaccggtcaaaagagaaccacgcagatttgggaatctttgtcaagtccattattaatggaggagcagcatctaaagatggaaggcttcgggtgaatgatcaactgatagcagtaaatggagaatccctgttgggcaagacaaaccaagatgccatggaaaccctaagaaggtctatgtctactgaaggcaataaacgaggaatgatccagcttattgttgcaaggagaataagcaagtgcaatgagctgaagtcacctgggagcccccctggacctgagctgcccattgaaacagcgttggatgatagagaacgaagaatttcccattccctctacagtgggattgaggggcttgatgaatcgcccagcagaaatgctgccctcagtaggataatgggtaaataccagctgtcccctacagtgaatatgccccaagatgacactgtcattatagaagatgacaggttgccagtgcttcctccacatctctctgaccagtcctcttccagctcccatgatgatgtggggtttgtgacggcagatgctggtacttgggccaaggctgcaatcagtgattcagccgactgctctttgagtccagatgttgatccagttcttgcttttcaacgagaaggatttggacgtcagagtatgtcagaaaaacgcacaaagcaattttcagatgccagtcaattggatttcgttaaaacacgaaaatcaaaaagcatggatttaggtatagctgacgagactaaactcaatacagtggatgaccagaaagcaggttctcccagcagagatgtgggtccttccctgggtctgaagaagtcaagctcgttggagagtctgcagaccgcagttgccgaggtgactttgaatggggatattcctttccatcgtccacggccgcggataatcagaggcaggggatgcaatgagagcttcagagctgccatcgacaaatcttatgataaacccgcggtagatgatgatgatgaaggcatggagaccttggaagaagacacagaagaaagttcaagatcagggagagagtctgtatccacagccagtgatcagccttcccactctctggagagacaaatgaatggaaaccaagagaaaggtgataagactgatagaaaaaaggataaaactggaaaagaaaagaagaaagatagagataaggagaaggataaaatgaaagccaagaagggaatgctgaagggcttgggagacatgttcaggtttggcaaacatcgaaaagatgacaagattgagaaaacgggtaaaataaaaatacaggaatcctttacatcagaagaggagaggatacgaatgaagcaggagcaggagaggattcaagccaaaactcgagaatttagggaacgacaagctcgagagcgtgactatgctgaaattcaagattttcatcggacatttggctgtgatgatgagttaatgtatgggggagtttcttcttatgaaggttccatggctctcaacgctagacctcagagcccacgagaagggcatatgatggatgctttgtatgcccaagtcaagaagccgcggaattccaaaccctcacctgtagacagtaacagatcaactcctagcaatcatgatcggatacagcgtctgaggcaagaatttcagcaagcaaagcaagatgaagatgtagaagatcgtcggcggacctatagttttgagcaaccctggccgaacgcacggccggcgacgcagagcgggcgacactcggtgtccgtggaggtgcagatgcagcggcagcggcaggaggagcgcgagagctcccagcaggcccagcgccagtacagctctctgcctcggcaaagcaggaaaaatgccagctcggtctcccaggactcttgggagcagaactactcccctggggaaggcttccagagtgccaaagagaaccccaggtactccagctaccaaggctccaggaacggctacctgggaggacatggcttcaacgccagggtcatgctggaaactcaggagctccttcgccaggaacagaggcggaaggagcagcagatgaagaagcagcctccttccgaggggcccagcaactatgactcgtataagaaagtccaggaccccagttacgcccctcccaaggggcccttccggcaagatgtgcccccctccccttctcaggttgcgaggctgaacagacttcagactcctgagaaagggaggcccttctattcctgagcacgcaaataacggatgcttcatgtcgcgcaataaaagacattttcctatgaagacttgtattttgggagtttttttaaaacctcgatggtactatggagtatttctgttgttggtatcagtgcctttaagcggtgtaggcaaagaaatggaaggccttaatgtctttgccactatgtctcaagtgtctgtttcatggaaggatttcccaccctgtgacaatcatctgtttgaggtgttcatatgctctgcgcctctccacagtaccaggaatctcggccctactcatgagttgtccgcggcttggttgtaacatccctgcaccacttgcagtgacaaattcacctgaagtggaggatgacgtgcggccctgtttctccctctaagttctcttagctatgggatgacatcttagtctctggtggaggaaaagtgggcgacatacaccaaaaattggggctttctggtacttcacagcacagccatttgtcgtactttgtcatcactgtggttttctctttcctttctcagctctttgtgacgggagagtcggtcatcctattacagaagctaagccatagtccaacattgtttggtcaccatgggggtccttttgtaactgccttatgactcaacattaccaataaagtgatgatcctggtctgcgtttatacatacgcttgttcggtcctgttcctgacacgtgggttgagtcaccacagctctgtgtggggaacgtgggagacaggagtggctcctgccgggggaagctgggcctgccattggccctgtgtctatcatgaggggagagctaagaaagaaattctcctaggaagagctcatggcccagtacatcctagtaattattttaattagtttttgttctgacagcttgtcaggaagggcacagaatgggacagagataaaccagacagtcattttgatctgctctctacggtttttcaagtcagaggcaattgatgcttgtctaatgcatccacacactgcatgtctgactggcgatgccgcgctcctaagtagttctgccatgaaacataaaagacaaaggaaaagccgttacacatcacacagagaacattttcgggtcccacagcggtggtggcaggaagctcactctcgcgtcagtattagagtgtgtgtgtgggtctcggggatctcggtggctcccatcttccttcattgttctgaacatcctgtattgtaaaccatggctggggtgctaaagtgcctgtgaatcccgatgtggaaaaagctggaggtgaaagctcagcataccatgtatttactttaaaaacagaaaaaaagacatgtatggatatgtctattttttttttattggcacattgtatttttgtgttgacttgtttttagaaatgatgtgtccacacacgtacccgtgtctcttctgcatttctgtgtcatggttctgtttcttaatcacgtgcggcggtgtctaagtggtgttaccagtgtacgcgcagtgaccttggatgacagtggctctttctcacagcctcccctgagctgtgagaaacagctttctctgtacatatgcaactcctaataaaaggcatatttcttcctgtt

SEQ ID NO: 14712 - DNA, 806 bp, Homo sapiens
  source 1..806: mol_type = unassigned DNA
aagatctgggaatggtggaagcatggtgggctatgggaactaactgggctaactattatacatttaccttttaacagtagctgacgagactaaactcaatacagtggatgaccagaaagcaggttctcccagcagagatgtgggtccttccctgggtctgaagaagtcaagctcgttggagagtctgcagaccgcagttgccgaggtgactttgaatggggatattcctttccatcgtccacggccgcggataatcagaggcaggggatgcaatgagagcttcagagctgccatcgacaaatcttatgataaacccgcggtagatgatgatgatgaaggcatggagaccttggaagaagacacagaagaaagttcaagatcagggagagagtctgtatccacagccagtgatcagccttcccactctctggagagacaaatgaatggaaaccaagagaaaggtgataagactgatagaaaaaaggataaaactggaaaagaaaagaagaaagatagagataaggagaaggataaaatgaaagccaagaagggaatgctgaagggcttgggagacatgttcaggtttggcaaacatcgaaaagatgacaagattgagaaaacgggtaaaataaaaatacaggaatcctttacatcagaagaggagaggatacgaatgaagcaggagcaggagaggattcaagccaaaactcgagaatttagggaacgacaagctcgagagcgtgactatgctgaaattcaagattttcatcggacatttggctgtgatgatgagttaatgtatgggg

SEQ ID NO: 14713 - DNA, 3389 bp, Homo sapiens
  source 1..3389: mol_type = unassigned DNA
gcggccccgagcgagcgccagcgccacacagccccgggcagccgccggcgagcgcgccgcgacgccgaacaggtggccggaggctgcgggcgccgcggcggggagaggcgaggcaagccccgggcgaagcgaggcgaggcgagggcggccgggccgggcatgcgagctgagcggccccccggcgtcgccgccgcctgcccgcgcccctagccgcccgcgcgcccgagtccccagcggctcctccgcgcccagcgtcctcggtcccggcctcggctgctccggctgcgctcggcgaggggcgcgggcccgcccgcggcggcggcggcatgaaagtgaccgtgtgcttcggacggacccgggtggtcgtgccgtgcggggacggccacatgaaagttttcagcctcatccagcaggcggtgacccgctaccggaaggccatcgccaaggatccaaactactggatacaggtgcatcgcttggaacatggagatggaggaatactagaccttgatgacattctttgtgatgtagcagacgataaagacagactggtagcagtgtttgatgagcaggatccacatcacggaggtgatggcaccagtgccagttccacgggtacccagagcccagagatatttggtagtgagcttggcaccaacaatgtctcagcctttcagccttaccaagcaacaagtgaaattgaggtcacaccttcagtccttcgagcaaatatgcctcttcatgttcgacgcagtagtgacccagctctaattggcctctccacttctgtcagtgatagtaatttttcctctgaagagccttcaaggaaaaatcccacacgctggtcaacaacagctggcttcctcaagcagaacactgctgggagtcctaaaacctgcgacaggaagaaagatgaaaactacagaagcctcccgcgggatactagtaactggtctaaccaatttcagagagacaatgctcgctcgtctctgagtgccagtcacccaatggtgggcaagtggctggagaaacaagaacaggatgaggatgggacagaagaggataacagtcgtgttgaacctgttggacatgctgacacgggtttggagcatatacccaacttttctctggatgatatggtaaagctcgtagaagtccccaacgatggagggcctctgggaatccacgtagtgcctttcagtgctcgaggcggcagaaccctggggttattagtaaaacgattggagaaaggtggtaaagctgaacatgaaaatctttttcgtgagaatgattgcattgtcaggattaatgatggcgaccttcgaaatagaagatttgaacaagcacaacatatgtttcgccaagccatgcgtacacccatcatttggttccatgtggttcctgcagcaaataaagagcagtatgaacaactatcccaaagtgagaagaacaattactattcaagccgttttagccctgacagccagtatattgacaacaggagtgtgaacagtgcagggcttcacacggtgcagagagcaccccgactgaaccacccgcctgagcagatagactctcactcaagactacctcatagcgcacacccctcgggaaaaccaccatccgctccagcctcggcacctcagaatgtatttagtacgactgtaagcagtggttataacaccaaaaaaataggcaagaggcttaatatccagcttaagaaaggtacagaaggtttgggattcagcatcacttccagagatgtaacaataggtggctcagctccaatctatgtgaaaaacattctcccccggggggcggccattcaggatggccgacttaaggcaggagacagacttatagaggtaaatggagtagatttagtgggcaaatcccaagaggaagttgtttcgctgttgagaagcaccaagatggaaggaactgtgagccttctggtctttcgccaggaagacgccttccacccaagggaactgaaagcagaagatgaggatattgttcttacacctgatggcaccagggaatttctgacatttgaagtcccacttaatgattcaggatctgcaggccttggtgtcagtgtcaaaggtaaccggtcaaaagagaaccacgcagatttgggaatctttgtcaagtccattattaatggaggagcagcatctaaagatggaaggcttcgggtgaatgatcaactgatagcagtaaatggagaatccctgttgggcaagacaaaccaagatgccatggaaaccctaagaaggtctatgtctactgaaggcaataaacgaggaatgatccagcttattgttgcaaggagaataagcaagtgcaatgagctgaagtcacctgggagcccccctggacctgagctgcccattgaaacagcgttggatgatagagaacgaagaatttcccattccctctacagtgggattgaggggcttgatgaatcgcccagcagaaatgctgccctcagtaggataatgggtaaataccagctgtcccctacagtgaatatgccccaagatgacactgtcattatagaagatgacaggttgccagtgcttcctccacatctctctgaccagtcctcttccagctcccatgatgatgtggggtttgtgacggcagatgctggtacttgggccaaggctgcaatcagtgattcagccgactgctctttgagtccagatgttgatccagttcttgcttttcaacgagaaggatttggacgtcagatagctgacgagactaaactcaatacagtggatgaccagaaagcaggttctcccagcagagatgtgggtccttccctgggtctgaagaagtcaagctcgttggagagtctgcagaccgcagttgccgaggtgactttgaatggggatattcctttccatcgtccacggccgcggataatcagaggcaggggatgcaatgagagcttcagagctgccatcgacaaatcttatgataaacccgcggtagatgatgatgatgaaggcatggagaccttggaagaagacacagaagaaagttcaagatcagggagagagtctgtatccacagccagtgatcagccttcccactctctggagagacaaatgaatggaaaccaagagaaaggtgataagactgatagaaaaaaggataaaactggaaaagaaaagaagaaagatagagataaggagaaggataaaatgaaagccaagaagggaatgctgaagggcttgggagacatgttcagccttgccaaactgaagcccgagaagagatgaacaacaaagcgattcaaaacatgtcttgaacagcacatattgcacagttgttgttttttttaaacaaacaataaatttacttttaatgaattctta

SEQ ID NO: 14714 - DNA, 3420 bp, Homo sapiens
  source 1..3420: mol_type = unassigned DNA
gcggccccgagcgagcgccagcgccacacagccccgggcagccgccggcgagcgcgccgcgacgccgaacaggtggccggaggctgcgggcgccgcggcggggagaggcgaggcaagccccgggcgaagcgaggcgaggcgagggcggccgggccgggcatgcgagctgagcggccccccggcgtcgccgccgcctgcccgcgcccctagccgcccgcgcgcccgagtccccagcggctcctccgcgcccagcgtcctcggtcccggcctcggctgctccggctgcgctcggcgaggggcgcgggcccgcccgcggcggcggcggcatgaaagtgaccgtgtgcttcggacggacccgggtggtcgtgccgtgcggggacggccacatgaaagttttcagcctcatccagcaggcggtgacccgctaccggaaggccatcgccaaggatccaaactactggatacaggtgcatcgcttggaacatggagatggaggaatactagaccttgatgacattctttgtgatgtagcagacgataaagacagactggtagcagtgtttgatgagcaggatccacatcacggaggtgatggcaccagtgccagttccacgggtacccagagcccagagatatttggtagtgagcttggcaccaacaatgtctcagcctttcagccttaccaagcaacaagtgaaattgaggtcacaccttcagtccttcgagcaaatatgcctcttcatgttcgacgcagtagtgacccagctctaattggcctctccacttctgtcagtgatagtaatttttcctctgaagagccttcaaggaaaaatcccacacgctggtcaacaacagctggcttcctcaagcagaacactgctgggagtcctaaaacctgcgacaggaagaaagatgaaaactacagaagcctcccgcgggatactagtaactggtctaaccaatttcagagagacaatgctcgctcgtctctgagtgccagtcacccaatggtgggcaagtggctggagaaacaagaacaggatgaggatgggacagaagaggataacagtcgtgttgaacctgttggacatgctgacacgggtttggagcatatacccaacttttctctggatgatatggtaaagctcgtagaagtccccaacgatggagggcctctgggaatccacgtagtgcctttcagtgctcgaggcggcagaaccctggggttattagtaaaacgattggagaaaggtggtaaagctgaacatgaaaatctttttcgtgagaatgattgcattgtcaggattaatgatggcgaccttcgaaatagaagatttgaacaagcacaacatatgtttcgccaagccatgcgtacacccatcatttggttccatgtggttcctgcagcaaataaagagcagtatgaacaactatcccaaagtgagaagaacaattactattcaagccgttttagccctgacagccagtatattgacaacaggagtgtgaacagtgcagggcttcacacggtgcagagagcaccccgactgaaccacccgcctgagcagatagactctcactcaagactacctcatagcgcacacccctcgggaaaaccaccatccgctccagcctcggcacctcagaatgtatttagtacgactgtaagcagtggttataacaccaaaaaaataggcaagaggcttaatatccagcttaagaaaggtacagaaggtttgggattcagcatcacttccagagatgtaacaataggtggctcagctccaatctatgtgaaaaacattctcccccggggggcggccattcaggatggccgacttaaggcaggagacagacttatagaggtaaatggagtagatttagtgggcaaatcccaagaggaagttgtttcgctgttgagaagcaccaagatggaaggaactgtgagccttctggtctttcgccaggaagacgccttccacccaagggaactgaatgcagagccaagccagatgcagattccaaaagaaacgaaagcagaagatgaggatattgttcttacacctgatggcaccagggaatttctgacatttgaagtcccacttaatgattcaggatctgcaggccttggtgtcagtgtcaaaggtaaccggtcaaaagagaaccacgcagatttgggaatctttgtcaagtccattattaatggaggagcagcatctaaagatggaaggcttcgggtgaatgatcaactgatagcagtaaatggagaatccctgttgggcaagacaaaccaagatgccatggaaaccctaagaaggtctatgtctactgaaggcaataaacgaggaatgatccagcttattgttgcaaggagaataagcaagtgcaatgagctgaagtcacctgggagcccccctggacctgagctgcccattgaaacagcgttggatgatagagaacgaagaatttcccattccctctacagtgggattgaggggcttgatgaatcgcccagcagaaatgctgccctcagtaggataatgggtaaataccagctgtcccctacagtgaatatgccccaagatgacactgtcattatagaagatgacaggttgccagtgcttcctccacatctctctgaccagtcctcttccagctcccatgatgatgtggggtttgtgacggcagatgctggtacttgggccaaggctgcaatcagtgattcagccgactgctctttgagtccagatgttgatccagttcttgcttttcaacgagaaggatttggacgtcagatagctgacgagactaaactcaatacagtggatgaccagaaagcaggttctcccagcagagatgtgggtccttccctgggtctgaagaagtcaagctcgttggagagtctgcagaccgcagttgccgaggtgactttgaatggggatattcctttccatcgtccacggccgcggataatcagaggcaggggatgcaatgagagcttcagagctgccatcgacaaatcttatgataaacccgcggtagatgatgatgatgaaggcatggagaccttggaagaagacacagaagaaagttcaagatcagggagagagtctgtatccacagccagtgatcagccttcccactctctggagagacaaatgaatggaaaccaagagaaaggtgataagactgatagaaaaaaggataaaactggaaaagaaaagaagaaagatagagataaggagaaggataaaatgaaagccaagaagggaatgctgaagggcttgggagacatgttcagccttgccaaactgaagcccgagaagagatgaacaacaaagcgattcaaaacatgtcttgaacagcacatattgcacagttgttgttttttttaaacaaacaataaatttacttttaatg

SEQ ID NO: 14715 - DNA, 799 bp, Homo sapiens
  source 1..799: mol_type = unassigned DNA
gcagagccaagccagatgcagattccaaaagaaacgaaagcagaagatgaggatattgttcttacacctgatggcaccagggaatttctgacatttgaagtcccacttaatgattcaggatctgcaggccttggtgtcagtgtcaaaggtaaccggtcaaaagagaaccacgcagatttgggaatctttgtcaagtccattattaatggaggagcagcatctaaagatggaaggcttcgggtgaatgatcaactgatagcagtaaatggagaatccctgttgggcaagacaaaccaagatgccatggaaaccctaagaaggtctatgtctactgaaggcaataaacgaggaatgatccagcttattgttgcaaggagaataagcaagtgcaatgagctgaagtcacctgggagcccccctggacctgagctgcccattgaaacagcgttggatgatagagaacgaagaatttcccattccctctacagtgggattgaggggcttgatgaatcgcccagcagaaatgctgccctcagtaggataatgggaacataggacttgccatactgaatcagaccattggtccaccagttcctgtaacctgcgtcctgcctccaatccctgatgcttcagaggaaggcgaaaaactaaaactaaaactcaaaccaaaaaaatccctaaattcagctagtgaccttttgaaatgctgtatatatgagttgaagagtcattcattttcttcctagtctgttgccccgattttgttagctacagcttcattagtcctcttcggtttgca

SEQ ID NO: 14716 - DNA, 3518 bp, Homo sapiens
  source 1..3518: mol_type = unassigned DNA
cccagcggccccgagcgagcgccagcgccacacagccccgggcagccgccggcgagcgcgccgcgacgccgaacaggtggccggaggctgcgggcgccgcggcggggagaggcgaggcaagccccgggcgaagcgaggcgaggcgagggcggccgggccgggcatgcgagctgagcggccccccggcgtcgccgccgcctgcccgcgcccctagccgcccgcgcgcccgagtccccagcggctcctccgcgcccagcgtcctcggtcccggcctcggctgctccggctgcgctcggcgaggggcgcgggcccgcccgcggcggcggcggcatgaaagtgaccgtgtgcttcggacggacccgggtggtcgtgccgtgcggggacggccacatgaaagttttcagcctcatccagcaggcggtgacccgctaccggaaggccatcgccaaggatccaaactactggatacaggtgcatcgcttggaacatggagatggaggaatactagaccttgatgacattctttgtgatgtagcagacgataaagacagactggtagcagtgtttgatgagcaggatccacatcacggaggtgatggcaccagtgccagttccacgggtacccagagcccagagatatttggtagtgagcttggcaccaacaatgtctcagcctttcagccttaccaagcaacaagtgaaattgaggtcacaccttcagtccttcgagcaaatatgcctcttcatgttcgacgcagtagtgacccagctctaattggcctctccacttctgtcagtgatagtaatttttcctctgaagagccttcaaggaaaaatcccacacgctggtcaacaacagctggcttcctcaagcagaacactgctgggagtcctaaaacctgcgacaggaagaaagatgaaaactacagaagcctcccgcgggatactagtaactggtctaaccaatttcagagagacaatgctcgctcgtctctgagtgccagtcacccaatggtgggcaagtggctggagaaacaagaacaggatgaggatgggacagaagaggataacagtcgtgttgaacctgttggacatgctgacacgggtttggagcatatacccaacttttctctggatgatatggtaaagctcgtagaagtccccaacgatggagggcctctgggaatccacgtagtgcctttcagtgctcgaggcggcagaaccctggggttattagtaaaacgattggagaaaggtggtaaagctgaacatgaaaatctttttcgtgagaatgattgcattgtcaggattaatgatggcgaccttcgaaatagaagatttgaacaagcacaacatatgtttcgccaagccatgcgtacacccatcatttggttccatgtggttcctgcagcaaataaagagcagtatgaacaactatcccaaagtgagaagaacaattactattcaagccgttttagccctgacagccagtatattgacaacaggagtgtgaacagtgcagggcttcacacggtgcagagagcaccccgactgaaccacccgcctgagcagatagactctcactcaagactacctcatagcgcacacccctcgggaaaaccaccatccgctccagcctcggcacctcagaatgtatttagtacgactgtaagcagtggttataacaccaaaaaaataggcaagaggcttaatatccagcttaagaaaggtacagaaggtttgggattcagcatcacttccagagatgtaacaataggtggctcagctccaatctatgtgaaaaacattctcccccggggggcggccattcaggatggccgacttaaggcaggagacagacttatagaggtaaatggagtagatttagtgggcaaatcccaagaggaagttgtttcgctgttgagaagcaccaagatggaaggaactgtgagccttctggtctttcgccaggaagacgccttccacccaagggaactgaatgcagagccaagccagatgcagattccaaaagaaacgaaagcagaagatgaggatattgttcttacacctgatggcaccagggaatttctgacatttgaagtcccacttaatgattcaggatctgcaggccttggtgtcagtgtcaaaggtaaccggtcaaaagagaaccacgcagatttgggaatctttgtcaagtccattattaatggaggagcagcatctaaagatggaaggcttcgggtgaatgatcaactgatagcagtaaatggagaatccctgttgggcaagacaaaccaagatgccatggaaaccctaagaaggtctatgtctactgaaggcaataaacgaggaatgatccagcttattgttgcaaggagaataagcaagtgcaatgagctgaagtcacctgggagcccccctggacctgagctgcccattgaaacagcgttggatgatagagaacgaagaatttcccattccctctacagtgggattgaggggcttgatgaatcgcccagcagaaatgctgccctcagtaggataatgggtaaataccagctgtcccctacagtgaatatgccccaagatgacactgtcattatagaagatgacaggttgccagtgcttcctccacatctctctgaccagtcctcttccagctcccatgatgatgtggggtttgtgacggcagatgctggtacttgggccaaggctgcaatcagtgattcagccgactgctctttgagtccagatgttgatccagttcttgcttttcaacgagaaggatttggacgtcagagtatgtcagaaaaacgcacaaagcaattttcagatgccagtcaattggatttcgttaaaacacgaaaatcaaaaagcatggatttaggtatagctgacgagactaaactcaatacagtggatgaccagaaagcaggttctcccagcagagatgtgggtccttccctgggtctgaagaagtcaagctcgttggagagtctgcagaccgcagttgccgaggtgactttgaatggggatattcctttccatcgtccacggccgcggataatcagaggcaggggatgcaatgagagcttcagagctgccatcgacaaatcttatgataaacccgcggtagatgatgatgatgaaggcatggagaccttggaagaagacacagaagaaagttcaagatcagggagagagtctgtatccacagccagtgatcagccttcccactctctggagagacaaatgaatggaaaccaagagaaaggtgataagactgatagaaaaaaggataaaactggaaaagaaaagaagaaagatagagataaggagaaggataaaatgaaagccaagaagggaatgctgaagggcttgggagacatgttcagccttgccaaactgaagcccgagaagagatgaacaacaaagcgattcaaaacatgtcttgaacagcacatattgcacagttgttgttttttttaaacaaacaataaatttacttttaatgaatt

SEQ ID NO: 14717 - DNA, 5740 bp, Homo sapiens
  source 1..5740: mol_type = unassigned DNA
cccagcggccccgagcgagcgccagcgccacacagccccgggcagccgccggcgagcgcgccgcgacgccgaacaggtggccggaggctgcgggcgccgcggcggggagaggcgaggcaagccccgggcgaagcgaggcgaggcgagggcggccgggccgggcatgcgagctgagcggccccccggcgtcgccgccgcctgcccgcgcccctagccgcccgcgcgcccgagtccccagcggctcctccgcgcccagcgtcctcggtcccggcctcggctgctccggctgcgctcggcgaggggcgcgggcccgcccgcggcggcggcggcatgaaagtgaccgtgtgcttcggacggacccgggtggtcgtgccgtgcggggacggccacatgaaagttttcagcctcatccagcaggcggtgacccgctaccggaaggccatcgccaaggatccaaactactggatacaggtgcatcgcttggaacatggagatggaggaatactagaccttgatgacattctttgtgatgtagcagacgataaagacagactggtagcagtgtttgatgagcaggatccacatcacggaggtgatggcaccagtgccagttccacgggtacccagagcccagagatatttggtagtgagcttggcaccaacaatgtctcagcctttcagccttaccaagcaacaagtgaaattgaggtcacaccttcagtccttcgagcaaatatgcctcttcatgttcgacgcagtagtgacccagctctaattggcctctccacttctgtcagtgatagtaatttttcctctgaagagccttcaaggaaaaatcccacacgctggtcaacaacagctggcttcctcaagcagaacactgctgggagtcctaaaacctgcgacaggaaggatgaggatgggacagaagaggataacagtcgtgttgaacctgttggacatgctgacacgggtttggagcatatacccaacttttctctggatgatatggtaaagctcgtagaagtccccaacgatggagggcctctgggaatccacgtagtgcctttcagtgctcgaggcggcagaaccctggggttattagtaaaacgattggagaaaggtggtaaagctgaacatgaaaatctttttcgtgagaatgattgcattgtcaggattaatgatggcgaccttcgaaatagaagatttgaacaagcacaacatatgtttcgccaagccatgcgtacacccatcatttggttccatgtggttcctgcagcaaataaagagcagtatgaacaactatcccaaagtgagaagaacaattactattcaagccgttttagccctgacagccagtatattgacaacaggagtgtgaacagtgcagggcttcacacggtgcagagagcaccccgactgaaccacccgcctgagcagatagactctcactcaagactacctcatagcgcacacccctcgggaaaaccaccatccgctccagcctcggcacctcagaatgtatttagtacgactgtaagcagtggttataacaccaaaaaaataggcaagaggcttaatatccagcttaagaaaggtacagaaggtttgggattcagcatcacttccagagatgtaacaataggtggctcagctccaatctatgtgaaaaacattctcccccggggggcggccattcaggatggccgacttaaggcaggagacagacttatagaggtaaatggagtagatttagtgggcaaatcccaagaggaagttgtttcgctgttgagaagcaccaagatggaaggaactgtgagccttctggtctttcgccaggaagacgccttccacccaagggaactgaaagcagaagatgaggatattgttcttacacctgatggcaccagggaatttctgacatttgaagtcccacttaatgattcaggatctgcaggccttggtgtcagtgtcaaaggtaaccggtcaaaagagaaccacgcagatttgggaatctttgtcaagtccattattaatggaggagcagcatctaaagatggaaggcttcgggtgaatgatcaactgatagcagtaaatggagaatccctgttgggcaagacaaaccaagatgccatggaaaccctaagaaggtctatgtctactgaaggcaataaacgaggaatgatccagcttattgttgcaaggagaataagcaagtgcaatgagctgaagtcacctgggagcccccctggacctgagctgcccattgaaacagcgttggatgatagagaacgaagaatttcccattccctctacagtgggattgaggggcttgatgaatcgcccagcagaaatgctgccctcagtaggataatgggtaaataccagctgtcccctacagtgaatatgccccaagatgacactgtcattatagaagatgacaggttgccagtgcttcctccacatctctctgaccagtcctcttccagctcccatgatgatgtggggtttgtgacggcagatgctggtacttgggccaaggctgcaatcagtgattcagccgactgctctttgagtccagatgttgatccagttcttgcttttcaacgagaaggatttggacgtcagatagctgacgagactaaactcaatacagtggatgaccagaaagcaggttctcccagcagagatgtgggtccttccctgggtctgaagaagtcaagctcgttggagagtctgcagaccgcagttgccgaggtgactttgaatggggatattcctttccatcgtccacggccgcggataatcagaggcaggggatgcaatgagagcttcagagctgccatcgacaaatcttatgataaacccgcggtagatgatgatgatgaaggcatggagaccttggaagaagacacagaagaaagttcaagatcagggagagagtctgtatccacagccagtgatcagccttcccactctctggagagacaaatgaatggaaaccaagagaaaggtgataagactgatagaaaaaaggataaaactggaaaagaaaagaagaaagatagagataaggagaaggataaaatgaaagccaagaagggaatgctgaagggcttgggagacatgttcaggtttggcaaacatcgaaaagatgacaagattgagaaaacgggtaaaataaaaatacaggaatcctttacatcagaagaggagaggatacgaatgaagcaggagcaggagaggattcaagccaaaactcgagaatttagggaacgacaagctcgagagcgtgactatgctgaaattcaagattttcatcggacatttggctgtgatgatgagttaatgtatgggggagtttcttcttatgaaggttccatggctctcaacgctagacctcagagcccacgagaagggcatatgatggatgctttgtatgcccaagtcaagaagccgcggaattccaaaccctcacctgtagacagtaacagatcaactcctagcaatcatgatcggatacagcgtctgaggcaagaatttcagcaagcaaagcaagatgaagatgtagaagatcgtcggcggacctatagttttgagcaaccctggccgaacgcacggccggcgacgcagagcgggcgacactcggtgtccgtggaggtgcagatgcagcggcagcggcaggaggagcgcgagagctcccagcaggcccagcgccagtacagctctctgcctcggcaaagcaggaaaaatgccagctcggtctcccaggactcttgggagcagaactactcccctggggaaggcttccagagtgccaaagagaaccccaggtactccagctaccaaggctccaggaacggctacctgggaggacatggcttcaacgccagggtcatgctggaaactcaggagctccttcgccaggaacagaggcggaaggagcagcagatgaagaagcagcctccttccgaggggcccagcaactatgactcgtataagaaagtccaggaccccagttacgcccctcccaaggggcccttccggcaagatgtgcccccctccccttctcaggttgcgaggctgaacagacttcagactcctgagaaagggaggcccttctattcctgagcacgcaaataacggatgcttcatgtcgcgcaataaaagacattttcctatgaagacttgtattttgggagtttttttaaaacctcgatggtactatggagtatttctgttgttggtatcagtgcctttaagcggtgtaggcaaagaaatggaaggccttaatgtctttgccactatgtctcaagtgtctgtttcatggaaggatttcccaccctgtgacaatcatctgtttgaggtgttcatatgctctgcgcctctccacagtaccaggaatctcggccctactcatgagttgtccgcggcttggttgtaacatccctgcaccacttgcagtgacaaattcacctgaagtggaggatgacgtgcggccctgtttctccctctaagttctcttagctatgggatgacatcttagtctctggtggaggaaaagtgggcgacatacaccaaaaattggggctttctggtacttcacagcacagccatttgtcgtactttgtcatcactgtggttttctctttcctttctcagctctttgtgacgggagagtcggtcatcctattacagaagctaagccatagtccaacattgtttggtcaccatgggggtccttttgtaactgccttatgactcaacattaccaataaagtgatgatcctggtctgcgtttatacatacgcttgttcggtcctgttcctgacacgtgggttgagtcaccacagctctgtgtggggaacgtgggagacaggagtggctcctgccgggggaagctgggcctgccattggccctgtgtctatcatgaggggagagctaagaaagaaattctcctaggaagagctcatggcccagtacatcctagtaattattttaattagtttttgttctgacagcttgtcaggaagggcacagaatgggacagagataaaccagacagtcattttgatctgctctctacggtttttcaagtcagaggcaattgatgcttgtctaatgcatccacacactgcatgtctgactggcgatgccgcgctcctaagtagttctgccatgaaacataaaagacaaaggaaaagccgttacacatcacacagagaacattttcgggtcccacagcggtggtggcaggaagctcactctcgcgtcagtattagagtgtgtgtgtgggtctcggggatctcggtggctcccatcttccttcattgttctgaacatcctgtattgtaaaccatggctggggtgctaaagtgcctgtgaatcccgatgtggaaaaagctggaggtgaaagctcagcataccatgtatttactttaaaaacagaaaaaaagacatgtatggatatgtctattttttttttattggcacattgtatttttgtgttgacttgtttttagaaatgatgtgtccacacacgtacccgtgtctcttctgcatttctgtgtcatggttctgtttcttaatcacgtgcggcggtgtctaagtggtgttaccagtgtacgcgcagtgaccttggatgacagtggctctttctcacagcctcccctgagctgtgagaaacagctttctctgtacatatgcaactcctaataaaaggcatatttcttcctgttc

SEQ ID NO: 14718 - DNA, 5962 bp, Homo sapiens
  source 1..5962: mol_type = unassigned DNA
cccagcggccccgagcgagcgccagcgccacacagccccgggcagccgccggcgagcgcgccgcgacgccgaacaggtggccggaggctgcgggcgccgcggcggggagaggcgaggcaagccccgggcgaagcgaggcgaggcgagggcggccgggccgggcatgcgagctgagcggccccccggcgtcgccgccgcctgcccgcgcccctagccgcccgcgcgcccgagtccccagcggctcctccgcgcccagcgtcctcggtcccggcctcggctgctccggctgcgctcggcgaggggcgcgggcccgcccgcggcggcggcggcatgaaagtgaccgtgtgcttcggacggacccgggtggtcgtgccgtgcggggacggccacatgaaagttttcagcctcatccagcaggcggtgacccgctaccggaaggccatcgccaaggatccaaactactggatacaggtgcatcgcttggaacatggagatggaggaatactagaccttgatgacattctttgtgatgtagcagacgataaagacagactggtagcagtgtttgatgagcaggatccacatcacggaggtgatggcaccagtgccagttccacgggtacccagagcccagagatatttggtagtgagcttggcaccaacaatgtctcagcctttcagccttaccaagcaacaagtgaaattgaggtcacaccttcagtccttcgagcaaatatgcctcttcatgttcgacgcagtagtgacccagctctaattggcctctccacttctgtcagtgatagtaatttttcctctgaagagccttcaaggaaaaatcccacacgctggtcaacaacagctggcttcctcaagcagaacactgctgggagtcctaaaacctgcgacaggaagaaagatgaaaactacagaagcctcccgcgggatactagtaactggtctaaccaatttcagagagacaatgctcgctcgtctctgagtgccagtcacccaatggtgggcaagtggctggagaaacaagaacaggatgaggatgggacagaagaggataacagtcgtgttgaacctgttggacatgctgacacgggtttggagcatatacccaacttttctctggatgatatggtaaagctcgtagaagtccccaacgatggagggcctctgggaatccacgtagtgcctttcagtgctcgaggcggcagaaccctggggttattagtaaaacgattggagaaaggtggtaaagctgaacatgaaaatctttttcgtgagaatgattgcattgtcaggattaatgatggcgaccttcgaaatagaagatttgaacaagcacaacatatgtttcgccaagccatgcgtacacccatcatttggttccatgtggttcctgcagcaaataaagagcagtatgaacaactatcccaaagtgagaagaacaattactattcaagccgttttagccctgacagccagtatattgacaacaggagtgtgaacagtgcagggcttcacacggtgcagagagcaccccgactgaaccacccgcctgagcagatagactctcactcaagactacctcatagcgcacacccctcgggaaaaccaccatccgctccagcctcggcacctcagaatgtatttagtacgactgtaagcagtggttataacaccaaaaaaataggcaagaggcttaatatccagcttaagaaaggtacagaaggtttgggattcagcatcacttccagagatgtaacaataggtggctcagctccaatctatgtgaaaaacattctcccccggggggcggccattcaggatggccgacttaaggcaggagacagacttatagaggtaaatggagtagatttagtgggcaaatcccaagaggaagttgtttcgctgttgagaagcaccaagatggaaggaactgtgagccttctggtctttcgccaggaagacgccttccacccaagggaactgaaagcagaagatgaggatattgttcttacacctgatggcaccagggaatttctgacatttgaagtcccacttaatgattcaggatctgcaggccttggtgtcagtgtcaaaggtaaccggtcaaaagagaaccacgcagatttgggaatctttgtcaagtccattattaatggaggagcagcatctaaagatggaaggcttcgggtgaatgatcaactgatagcagtaaatggagaatccctgttgggcaagacaaaccaagatgccatggaaaccctaagaaggtctatgtctactgaaggcaataaacgaggaatgatccagcttattgttgcaaggagaataagcaagtgcaatgagctgaagtcacctgggagcccccctggacctgagctgcccattgaaacagcgttggatgatagagaacgaagaatttcccattccctctacagtgggattgaggggcttgatgaatcgcccagcagaaatgctgccctcagtaggataatgggtaaataccagctgtcccctacagtgaatatgccccaagatgacactgtcattatagaagatgacaggttgccagtgcttcctccacatctctctgaccagtcctcttccagctcccatgatgatgtggggtttgtgacggcagatgctggtacttgggccaaggctgcaatcagtgattcagccgactgctctttgagtccagatgttgatccagttcttgcttttcaacgagaaggatttggacgtcagagtatgtcagaaaaacgcacaaagcaattttcagatgccagtcaattggatttcgttaaaacacgaaaatcaaaaagcatggatttaggtatagctgacgagactaaactcaatacagtggatgaccagaaagcaggttctcccagcagagatgtgggtccttccctgggtctgaagaagtcaagctcgttggagagtctgcagaccgcagttgccgaggtgactttgaatggggatattcctttccatcgtccacggccgcggataatcagaggcaggggatgcaatgagagcttcagagctgccatcgacaaatcttatgataaacccgcggtagatgatgatgatgaaggcatggagaccttggaagaagacacagaagaaagttcaagatcagggagagagtctgtatccacagccagtgatcagccttcccactctctggagagacaaatgaatggaaaccaagagaaaggtgataagactgatagaaaaaaggataaaactggaaaagaaaagaagaaagatagagataaggagaaggataaaatgaaagccaagaagggaatgctgaagggcttgggagacatgttcaggtttggcaaacatcgaaaagatgacaagattgagaaaacgggtaaaataaaaatacaggaatcctttacatcagaagaggagaggatacgaatgaagcaggagcaggagaggattcaagccaaaactcgagaatttagggaacgacaagctcgagagcgtgactatgctgaaattcaagattttcatcggacatttggctgtgatgatgagttaatgtatgggggagtttcttcttatgaaggttccatggctctcaacgctagacctcagagcccacgagaagggcatatgatggatgctttgtatgcccaagtcaagaagccgcggaattccaaaccctcacctgtagacagtaacagatcaactcctagcaatcatgatcggatacagcgtctgaggcaagaatttcagcaagcaaagcaagatgaagatgtagaagatcgtcggcggacctatagttttgagcaaccctggccgaacgcacggccggcgacgcagagcgggcgacactcggtgtccgtggaggtgcagatgcagcggcagcggcaggaggagcgcgagagctcccagcaggcccagcgccagtacagctctctgcctcggcaaagcaggaaaaatgccagctcggtctcccaggactcttgggagcagaactactcccctggggaaggcttccagagtgccaaagagaaccccaggtactccagctaccaaggctccaggaacggctacctgggaggacatggcttcaacgccagggtcatgctggaaactcaggagctccttcgccaggaacagaggcggaaggagcagcagatgaagaagcagcctccttccgaggggcccagcaactatgactcgtataagaaagtccaggaccccagttacgcccctcccaaggggcccttccggcaagatgtgcccccctccccttctcaggttgcgaggctgaacagacttcagactcctgagaaagggaggcccttctattcctgagcacgcaaataacggatgcttcatgtcgcgcaataaaagacattttcctatgaagacttgtattttgggagtttttttaaaacctcgatggtactatggagtatttctgttgttggtatcagtgcctttaagcggtgtaggcaaagaaatggaaggccttaatgtctttgccactatgtctcaagtgtctgtttcatggaaggatttcccaccctgtgacaatcatctgtttgaggtgttcatatgctctgcgcctctccacagtaccaggaatctcggccctactcatgagttgtccgcggcttggttgtaacatccctgcaccacttgcagtgacaaattcacctgaagtggaggatgacgtgcggccctgtttctccctctaagttctcttagctatgggatgacatcttagtctctggtggaggaaaagtgggcgacatacaccaaaaattggggctttctggtacttcacagcacagccatttgtcgtactttgtcatcactgtggttttctctttcctttctcagctctttgtgacgggagagtcggtcatcctattacagaagctaagccatagtccaacattgtttggtcaccatgggggtccttttgtaactgccttatgactcaacattaccaataaagtgatgatcctggtctgcgtttatacatacgcttgttcggtcctgttcctgacacgtgggttgagtcaccacagctctgtgtggggaacgtgggagacaggagtggctcctgccgggggaagctgggcctgccattggccctgtgtctatcatgaggggagagctaagaaagaaattctcctaggaagagctcatggcccagtacatcctagtaattattttaattagtttttgttctgacagcttgtcaggaagggcacagaatgggacagagataaaccagacagtcattttgatctgctctctacggtttttcaagtcagaggcaattgatgcttgtctaatgcatccacacactgcatgtctgactggcgatgccgcgctcctaagtagttctgccatgaaacataaaagacaaaggaaaagccgttacacatcacacagagaacattttcgggtcccacagcggtggtggcaggaagctcactctcgcgtcagtattagagtgtgtgtgtgggtctcggggatctcggtggctcccatcttccttcattgttctgaacatcctgtattgtaaaccatggctggggtgctaaagtgcctgtgaatcccgatgtggaaaaagctggaggtgaaagctcagcataccatgtatttactttaaaaacagaaaaaaagacatgtatggatatgtctattttttttttattggcacattgtatttttgtgttgacttgtttttagaaatgatgtgtccacacacgtacccgtgtctcttctgcatttctgtgtcatggttctgtttcttaatcacgtgcggcggtgtctaagtggtgttaccagtgtacgcgcagtgaccttggatgacagtggctctttctcacagcctcccctgagctgtgagaaacagctttctctgtacatatgcaactcctaataaaaggcatatttcttcctgttc

SEQ ID NO: 14719 - DNA, 2475 bp, Homo sapiens
  source 1..2475: mol_type = unassigned DNA
cttttaactgtaacttattgaaggtctcctacatttttaacactgaggatgaggatgggacagaagaggataacagtcgtgttgaacctgttggacatgctgacacgggtttggagcatatacccaacttttctctggatgatatggtaaagctcgtagaagtccccaacgatggagggcctctgggaatccacgtagtgcctttcagtgctcgaggcggcagaaccctggggttattagtaaaacgattggagaaaggtggtaaagctgaacatgaaaatctttttcgtgagaatgattgcattgtcaggattaatgatggcgaccttcgaaatagaagatttgaacaagcacaacatatgtttcgccaagccatgcgtacacccatcatttggttccatgtggttcctgcagcaaataaagagcagtatgaacaactatcccaaagtgagaagaacaattactattcaagccgttttagccctgacagccagtatattgacaacaggagtgtgaacagtgcagggcttcacacggtgcagagagcaccccgactgaaccacccgcctgagcagatagactctcactcaagactacctcatagcgcacacccctcgggaaaaccaccatccgctccagcctcggcacctcagaatgtatttagtacgactgtaagcagtggttataacaccaaaaaaataggcaagaggcttaatatccagcttaagaaaggtacagaaggtttgggattcagcatcacttccagagatgtaacaataggtggctcagctccaatctatgtgaaaaacattctcccccggggggcggccattcaggatggccgacttaaggcaggagacagacttatagaggtaaatggagtagatttagtgggcaaatcccaagaggaagttgtttcgctgttgagaagcaccaagatggaaggaactgtgagccttctggtctttcgccaggaagacgccttccacccaagggaactgaaagcagaagatgaggatattgttcttacacctgatggcaccagggaatttctgacatttgaagtcccacttaatgattcaggatctgcaggccttggtgtcagtgtcaaaggtaaccggtcaaaagagaaccacgcagatttgggaatctttgtcaagtccattattaatggaggagcagcatctaaagatggaaggcttcgggtgaatgatcaactgatagcagtaaatggagaatccctgttgggcaagacaaaccaagatgccatggaaaccctaagaaggtctatgtctactgaaggcaataaacgaggaatgatccagcttattgttgcaaggagaataagcaagtgcaatgagctgaagtcacctgggagcccccctggacctgagctgcccattgaaacagcgttggatgatagagaacgaagaatttcccattccctctacagtgggattgaggggcttgatgaatcgcccagcagaaatgctgccctcagtaggataatgggtaaataccagctgtcccctacagtgaatatgccccaagatgacactgtcattatagaagatgacaggttgccagtgcttcctccacatctctctgaccagtcctcttccagctcccatgatgatgtggggtttgtgacggcagatgctggtacttgggccaaggctgcaatcagtgattcagccgactgctctttgagtccagatgttgatccagttcttgcttttcaacgagaaggatttggacgtcagagtatgtcagaaaaacgcacaaagcaattttcagatgccagtcaattggatttcgttaaaacacgaaaatcaaaaagcatggatttagtagctgacgagactaaactcaatacagtggatgaccagaaagcaggttctcccagcagagatgtgggtccttccctgggtctgaagaagtcaagctcgttggagagtctgcagaccgcagttgccgaggtgactttgaatggggatattcctttccatcgtccacggccgcggataatcagaggcaggggatgcaatgagagcttcagagctgccatcgacaaatcttatgataaacccgcggtagatgatgatgatgaaggcatggagaccttggaagaagacacagaagaaagttcaagatcagggagagagtctgtatccacagccagtgatcagccttcccactctctggagagacaaatgaatggaaaccaagagaaaggtgataagactgatagaaaaaaggataaaactggaaaagaaaagaagaaagatagagataaggagaaggataaaatgaaagccaagaagggaatgctgaagggcttgggagacatgttcagccttgccaaactgaagcccgagaagagatgaacaacaaagcgattcaaaacatgtcttgaacagcacatattgcacagttgttgttttttttaaacaaacaataaatttacttttaatg

SEQ ID NO: 14720 - DNA, 1668 bp, Homo sapiens
  source 1..1668: mol_type = unassigned DNA
gcggccgcccctccccgattcccgccacctgccgcctggccaggtggaaggggcgctgccgcgagcctccgggcctcagggtgttccggggagcggcgccccgggtctctgggcccacccgccccgggcgtcctccgagagtgggggctgcgcccgcggggtcagacacctgttcggcccggcccggcgtggtcgccgggggccaggatgaaagtgaccgtgtgcttcggcaggacgggcatcgtggtgccctgcaaggagggccagctgcgcgtcggcgagctcacccagcaggcgctgcagcggtacctgaagacccgggagaaggtgagcgcggcgcggaggagtggggcgcggctgcagccaaggcacctgccagggtcctggttactgggtgaagattcatcacttagaatatacagatggaggaatcctggatccagatgatgtcttggcagatgttgttgaagataaagacaagctgattgctgtgtttgaagaacaagaaccactccacaagattgagagccccagtggaaaccctgcagatcggcagagcccagatgcttttgagacagaagtggccgcccaactggccgcatttaagccaattggtggggagattgaagtaaccccttctgctctaaaactaggcactccactgctggtgaggagaagcagtgacccagtgccaggcccacctgctgatacccagccaagcgcttcacaccctggtggccagagtctgaaactggttgttccagtaggtatcctgctgcttgtagttctaatgaaagatcaaagtgctgtacccataggttaagtgggactttgcagttttaaacacattgataactagatagagatcttttgatagtatatatagtattagttatactaatagctagtatgggctattacttgtatatagttatagcgatagctattacgtatatggcactgattatgtgccaagtactattttacctgttttatattaagtcatctaaacttccacatcaaggtaagcacatgtttttatctccatttaactgataatgaaattgaggcagaggaaggtttagtaatttgtttaaggtcacatagctaataagtggcaaagcaaggaatttcacccaggtgttctggctccaaaatccttgcttctggccagtacactatactgttacatttccttcatcttccagtttcgtaatgtccaaggatatcattatatttttgttgtgttaacccaatgctttgcaaaaccataccatgtgagtggtgtacattttcaagctcccaatatcacgaaaatgtggtgccaggattggatgtgtagaactcagcattcagattgaagaaaaacaaaatcattgaccaaaagtgcttataaccagatatacttataactaataggttaagtggagaataatttcctgaagagatgatattctccttccatataggactgtgggatcttcctgctaaatcctcagttgctttgaagagctgtaattgtgaataatcctctcagatagcctgagaattcaattttggctaatgactatataccattgcaataggtaatcttcgataacatagccatattaaaaattccctaaaagcaagactctttctcactttaagtctcactgtctataacgc

SEQ ID NO: 14721 - DNA, 8174 bp, Homo sapiens
  source 1..8174: mol_type = unassigned DNA
gcggccgcccctccccgattcccgccacctgccgcctggccaggtggaaggggcgctgccgcgagcctccgggcctcagggtgttccggggagcggcgccccgggtctctgggcccacccgccccgggcgtcctccgagagtgggggctgcgcccgcggggtcagacacctgttcggcccggcccggcgtggtcgccgggggccaggatgaaagtgaccgtgtgcttcggcaggacgggcatcgtggtgccctgcaaggagggccagctgcgcgtcggcgagctcacccagcaggcgctgcagcggtacctgaagacccgggagaagggtcctggttactgggtgaagattcatcacttagaatatacagatggaggaatcctggatccagatgatgtcttggcagatgttgttgaagataaagacaagctgattgctgtgtttgaagaacaagaaccactccacaagattgagagccccagtggaaaccctgcagatcggcagagcccagatgcttttgagacagaagtggccgcccaactggccgcatttaagccaattggtggggagattgaagtaaccccttctgctctaaaactaggcactccactgctggtgaggagaagcagtgacccagtgccaggcccacctgctgatacccagccaagcgcttcacaccctggtggccagagtctgaaactggttgttccagattccacgcagaacttggaagacagagaagttttgaatggtgtacagacagaactactaacttcgccaagaactaaggacacattgagtgatatgacaagaacagtggagatttctggggaaggaggcccattgggaatacatgtagtgcccttcttttcatctctgagtggaaggattctaggactcttcatccgaggcattgaagacaacagcaggtccaagcgggagggactatttcacgaaaatgaatgtattgtaaaaatcaacaatgtggatctcgtagacaaaacctttgctcaggctcaagatgtcttccgccaggcaatgaaatctccaagtgtgctcctccacgtgcttcctccacaaaaccgtgaacagtatgaaaagtcagtcattggctctcttaacatttttggtaataatgatggcgttttgaaaaccaaagtgccgcctcctgtccatggaaaatcgggactaaagacagcaaatctcacaggaaccgatagtcctgaaacagatgcatcagcttccctgcaacaaaacaagagtccccgagtaccaaggctgggaggaaaaccatcctctccctcactctcgcctctcatgggatttggcagcaataaaaatgcaaagaaaattaagattgacctaaagaaaggccctgaaggacttggtttcactgtggttaccagagactcttccatacatggtcccggtcccatttttgtaaaaaacattttaccaaagggagcagcaataaaagatggccgcctacaatcaggggacagaattttggaggtaaatgggagagatgtcaccggacgaacccaggaagagcttgtggccatgctcaggagcaccaagcagggggagacagcatcgctggtcattgcccgccaagaaggacattttctgccccgagagttgaaaggagaacctgactgctgtgcactctctctggagacaagcgagcagctcacctttgagatccccctgaatgattcaggttctgctggcctcggggtgagcttaaaagggaacaaatccagagaaactggaacagacttggggatttttatcaaatccatcattcatggaggcgctgcttttaaggatggtcgtctgcgaatgaatgaccagctgattgcagttaatggggaatctcttttgggaaagtccaaccacgaagctatggaaacacttaggcggtcaatgtccatggagggaaacatccgagggatgatccagttggtgattctgaggaggccagagagaccaatggaggatcctgcagagtgtggggcattttccaagccatgctttgagaactgtcaaaatgctgtaaccacctctaggcgaaatgataatagtatcctgcatccacttggcacttgcagtccacaagacaaacagaaaggtctattgctgcccaatgacggatgggccgagagtgaagttccaccttctccaacaccacattctgctctgggattgggcctcgaagattacagccacagctctggggtggattcagcagtatattttccagatcagcacatcaacttcagatctgtgacaccggccaggcagcctgaatcaattaatttgaaagcctcgaagagcatggaccttgtgccagatgaaagcaaggttcactcattggctggacaaaaatcggaatctccaagcaaagattttggtccaactctgggtttgaaaaagtccagctccttggagagtctgcagactgcagtggccgaggtcaggaagaatgaccttccctttcacaggccccggccgcacatggttcgaggccgaggctgcaatgagagctttagagcagccattgacaaatcctacgatggacctgaagaaatagaagctgacggtctgtctgataagagctctcactctggccaaggagctctgaattgtgagtctgcccctcaggggaattcggagctagaggacatggaaaataaagccaggaaagtcaaaaaaacgaaagagaaggagaagaaaaaggaaaagggcaaattgaaagtcaaggagaaaaagcgcaaagaggagaatgaagatccagaaaggaaaataaagaagaagggcttcggcgccatgctgagatttggaaagaagaaagaggataagggtggaaaggctgagcagaaaggtactctgaaacatggtggcctgagagaagaagagctggagaaaatgaaagaagagcgtgaaaggattggagcaaaacatcaggagctaagggaaaagcaggcaagaggtcttcttgattatgctactggtgcaattggatcagtgtatgatatggatgatgatgaaatggaccccaattatgccagagtgaaccactttcgggaaccatgcacatcagcaaatgtctttagatctccatctccccctcgagctggaccatttggttaccctcgggatggccatccactgtctccagaaagagaccacttagagggtctctatgccaaggtcaacaagccataccatccactggttccagctgacagtggccgtcctacgggtggaagcactgaccgtatccagaagttgcggaaagagtattatcaggctcggagggaaggtttccctttatatgaagacgacgaaggaagagcaaggccatctgagtatgacctactctgggtgcctggaaggggtccagatgggaatgcacacaacctccgctttgaagggatggagaggcagtacgcatccttacccaggggaggacccgcagatcctgtagactatctgccagcagcacctcgggggctctacaaggaaagggagcttccctattatccaggggctcatcctatgcaccctcccaaagggagctatccccgccccacagagctcagggtggcagatctccggtatcctcagcactacccacccccgccagctccccagcacaaaggaccctttcgacaagacgttccgccttcccctccccagcaccaaagaatgccagcctatcaggaaacaggcagaccagggccccgtgggggcagcccagaccagtacccttaccgaacccaggattcccggcagaagaaccccatgactgcagccgtatagctgagtgccaccgaggccagcccggtccagaaaggaaggtgtctactctacctttgccctttctaaacctgaagacctccttggtgttaggaattctccatgttactgataagctttttctcactgacattgtaacgcatgactgctaatcagagagaaaaagaaggggaagggaattggggaggaaaaaaaatcagaaggaagacgaaagatggggctataaaaacaaaactacctgatagttgaaacgctttcagagttgttcaaatcagtgagagtggcaacggaacacacaaacaactaattatggaactctactctggggatcctctctggctagataacctgtgctgatgtgcagacacgtggacatccccctctgagactggcggtccagaggcagtctctgccaggcagcattacccgctccgaggtggagcctcagcccccttcttagagctgttaagtctaaggtgtggcagagcagacagagatagaggcatctgaagtgagtataggttttttgactaagaaaaaaaacaacagcaaacatgactagtgatcttgaaatattttgtaccgagagaaagactgcatttatttgtagaatttatcaggtttctgataccactcattggatgtaaacatttcatgtttcctcacttttgatatgaaagtcggtaaaatgcagtattagtcccgggaggatgtgcacagctggtcagagcttccagaaggaatatcttccgaggactaaggtgatcaggttaagagggttcaacatcccacggccctcaccttcctccctcccacattccaggcatggagatatctggtttcagagtcagccccaaatctcctgcctataattactttaactggggtctctaaggttcccacttgagggctaaaatgtagttgggaaagagggcctactggggaggtctcacaggaggcagtgccctgggaaatgccaagtccagactcagtgccaagcagtaaccatctgcactcggggacagcgaggagctgaccatggcctctgatgaccagcaggtattagatggaagtgaatgagagagagagagagagagagtatgtgtgtgtgtgtgtatgtgtgtgttcgaacacatatgattgccagtatggagaatgaaagattaataatgctttctggagagtttgatgcaaaagtgggggaaacggagaaaaggcgctaaggctaaatccatctgcatttgctatatttcattagctaaagtcaggtcagggcagggccaaggcctccaattggcaaaggacagtgttatggctttaaaaagctgaaaccccaacctctaagtagatcacaatgttttctgagctttgcagtaattttctatggaaactaaaacctctaaaacatacaagctggcccaaatgagaacacaagcaaaagatgtggaagacagcaaaacctgagcactggtttgaaccaggcactgacatttgaaatgctttaagccttttcacattccttctttattccctccaaaaaaaaaagtcttgagtttaatttaggtctattttggctgagattagcatacctctgactcacaggatttaataaattatagtattattgaatacataggacatccctctaccccagcttactcttatctttttaatttaaaatagtattctgctaccaagaaggatgcaactgctagttttagatgtaaatagtgttatttactggactttgtgatattattttcttaactacactttactatggccctgttgaaaacagactatcaagttttttgtctctgttctgtcatctctcttaagccaggcacctttagagtgtttgcaatttgttcgaagtggttgaggatctcaggccctgctcacgtgaggtggagtgcaggggagctaccggtttccctgctgacctgctgaatgctaccttcccctcgagttgaatacaccttaaggaaaatgataacacgagggacgtgtaacttgttttgaagcattaaaaaccagcagctcttcactatgttccatattttaaccaaactactgtagactactaaacatagccaagccagaacattccttctggattaagcctaggccacttgaggggcagccaggggtgatggtgtcaggtgagaatcctgtgtcttgaaggagtggcctttacaggaagagtgcccatgttttcacctgcagcgttgccaccagagtgtgcaatacctcctgcacacaggctcagggtaaactgctccaaagctgggttttgtgttgcatacaaagtcaataaaatagttgctaatcctgaatggcagccagtgatgtgaaggtactattaaagtgaacaaaaactagattgcaacagttttctttccttgcttgaagtataacacacgctccatttgatcctgcctgaaagaagctaacattatatttgtgacagacagaggctccatcaagccaagcaacaattaacagctcaagtgtaagatttataaatgcccgtgtactcacccttcaattgttaccacccagaggttacaggactctttcccagcatttaggggaacaggcttttagagtatttagaagaccaggctataatcagtaatgtgcctgggagcaggaaatagctcccaatttatttatggccttgggaaaactcaatccggtgtctccttgtagctcagaacactaatagcccccctggaagagagtggcacattgagctccaaacccaatcaacatacatccacttggctgcagatctgactgctgggtcatgaaggccgtgaaatgatgtttgccctcaagtcactagatattttaagaagccctatttttctccctttttgcaggagtagagagatgaaagaggacagaccattgaaaacttttagatgcaggagaattgagacttccacaagggagagaaacacagcctccccagaatccattatgccatcgggttgtggcactctcacccttgccataataccgtttcctaacaatatcaaatcagtggatgaaatacaagctcagaaacaggaacattttcctaaatcataacctaatagcaaacaaaaattgaaaaaacaattattctgaagctcattattcttagatctgtagatatatatgtgttgactcccacaggatggcaccaagtaaagatcttaagagcatagtaggggttctgagaccgactgtcacccgtggatcctgatggggaagaacagaggcttcactgtagctatagttttccaccaagtcaatcaaattaaaacatgactcattgtcccctccaaagattcataaaattcttgagctaaagtgatcttctgaagaaaagccacctaacaatgttaggaggctcataaagctcatttctcttttccctggtatgcacaaatatcaagcctataaaaaagtaattatttccccaaacctgtaaccactgcattcgttttctttggaggaacattgtagcatttcaggagggtcgagagatctaaagagtttggtctgaatgtgtgtctgtacaattccctttggcattaaactctgaaacctacaatcaatggccttcaaattggtgttaaattgggagaacaccctactgctttctgagtctacgagcaacagaaagactggtcttagtgcaattaggcaggagggatttggactcagaaacagccacagaagtatttctcagcactcccagttcctgccaacttagctggaaacgatgccacagcgagaccagaaagaggagtcgccttaaggtatccctacaaagtcacctttctgataaaaaggagggaaaaaaaagttagatatctaaaataagcctagaatctcacacacagctgtgacttctaagtgaaactcttttctccctcatgtccttaaatagtcacagaatcacacacagcctgacttttaaagacaagcttggctacaggaaatgaaccaaccccaaagactcttctaacctgtctcctgactgggctccttcagaaagtgttctcctgttccatctgtagggctgcttactactggaacctaaaacaaaacctgttgtttgtaccatcactttttctggtgtttcctgtgcttttgtgattccaagtctgttcataagttctgaagataaattatgtgaaatcatattttggcatatgggggtggaggatgaattctttacagactttttaagatgatccatttgtaccacagaaaacattttggaagttgttatatatgagtatataaatttttcttttcatattttacattaaaataaagctttattcagtcattaa

SEQ ID NO: 14722 - DNA, 2968 bp, Homo sapiens
  source 1..2968: mol_type = unassigned DNA
aaggggcgctgccgcgagcctccgggcctcagggtgttccggggagcggcgccccgggtctctgggcccacccgccccgggcgtcctccgagagtgggggctgcgcccgcggggtcagacacctgttcggcccggcccggcgtggtcgccgggggccaggatgaaagtgaccgtgtgcttcggcaggacgggcatcgtggtgccctgcaaggagggccagctgcgcgtcggcgagctcacccagcaggcgctgcagcggtacctgaagacccgggagaagggtcctggttactgggtgaagattcatcacttagaatatacagatggaggaatcctggatccagatgatgtcttggcagatgttgttgaagataaagacaagctgattgctgtgtttgaagaacaagaaccactccacaagattgagagccccagtggaaaccctgcagatcggcagagcccagatgcttttgagacagaagtggccgcccaactggccgcatttaagccaattggtggggagattgaagtaaccccttctgctctaaaactaggcactccactgctggtgaggagaagcagtgacccagtgccaggcccacctgctgatacccagccaagcgcttcacaccctggtggccagagtctgaaactggttgttccagattccacgcagaacttggaagacagagaagttttgaatggtgtacagacagaactactaacttcgccaagaactaaggacacattgagtgatatgacaagaacagtggagatttctggggaaggaggcccattgggaatacatgtagtgcccttcttttcatctctgagtggaaggattctaggactcttcatccgaggcattgaagacaacagcaggtccaagcgggagggactatttcacgaaaatgaatgtattgtaaaaatcaacaatgtggatctcgtagacaaaacctttgctcaggctcaagatgtcttccgccaggcaatgaaatctccaagtgtgctcctccacgtgcttcctccacaaaaccgtgaacagtatgaaaagtcagtcattggctctcttaacatttttggtaataatgatggcgttttgaaaaccaaagtgccgcctcctgtccatggaaaatcgggactaaagacagcaaatctcacaggaaccgatagtcctgaaacagatgcatcagcttccctgcaacaaaacaagagtccccgagtaccaaggctgggaggaaaaccatcctctccctcactctcgcctctcatgggatttggcagcaataaaaatgcaaagaaaattaagattgacctaaagaaaggccctgaaggacttggtttcactgtggttaccagagactcttccatacatggtcccggtcccatttttgtaaaaaacattttaccaaagggagcagcaataaaagatggccgcctacaatcaggggacagaattttggaggtaaatgggagagatgtcaccggacgaacccaggaagagcttgtggccatgctcaggagcaccaagcagggggagacagcatcgctggtcattgcccgccaagaaggacattttctgccccgagagttgaaaggagaacctgactgctgtgcactctctctggagacaagcgagcagctcacctttgagatccccctgaatgattcaggttctgctggcctcggggtgagcttaaaagggaacaaatccagagaaactggaacagacttggggatttttatcaaatccatcattcatggaggcgctgcttttaaggatggtcgtctgcgaatgaatgaccagctgattgcagttaatggggaatctcttttgggaaagtccaaccacgaagctatggaaacacttaggcggtcaatgtccatggagggaaacatccgagggatgatccagttggtgattctgaggaggccagagagaccaatggaggatcctgcagagtgtggggcattttccaagccatgctttgagaactgtcaaaatgctgtaaccacctctaggcgaaatgataatagtatcctgcatccacttggcacttgcagtccacaagacaaacagaaaggtctattgctgcccaatgacggatgggccgagagtgaagttccaccttctccaacaccacattctgctctgggattgggcctcgaagattacagccacagctctggggtggattcagcagtatattttccagatcagcacatcaacttcagatctgtgacaccggccaggcagcctgaatcaattaatttgaaagcctcgaagagcatggaccttgtgccagatgaaagcaaggttcactcattggctggacaaaaatcggaatctccaagcaaagattttggtccaactctgggtttgaaaaagtccagctccttggagagtctgcagactgcagtggccgaggtcaggaagaatgaccttccctttcacaggccccggccgcacatggttcgaggccgaggctgcaatgagagctttagagcagccattgacaaatcctacgatggacctgaagaaatagaagctgacggtctgtctgataagagctctcactctggccaaggagctctgaattgtgagtctgcccctcaggggaattcggagctagaggacatggaaaataaagccaggaaagtcaaaaaaacgaaagagaaggagaagaaaaaggaaaagggcaaattgaaagtcaaggagaaaaagcgcaaagaggagaatgaagatccagaaaggaaaataaagaagaagggcttcggcgccatgctgaggtatgggcctgctttgaaggcaaagttggttctcattttgtctctcctgaaaaaagcgcacgcttttcctcgtcttcagccaaatgcatacggctctcaattctgtgctcgttctctttctgcagaggcagaggagctttttggggaaagttacagtgatgacaggacactgtcttaa

SEQ ID NO: 14723 - DNA, 441 bp, Homo sapiens
  source 1..441: mol_type = unassigned DNA
ggggcgctgccgcgagcctccgggcctcagggtgttccggggagcggcgccccgggtctctgggcccacccgccccgggcgtcctccgagagtgggggctgcgcccgcggggtcagacacctgttcggcccggcccggcgtggtcgccgggggccaggatgaaagtgaccgtgtgcttcggcaggacgggcatcgtggtgccctgcaaggagggccagctgcgcgtcggcgagctcacccagcaggcgctgcagcggtacctgaagacccgggagaaggcatgatatctctgtcttaggagctactaaattgagcctgcctcctgttgctgaactctcgttttttggattgcaatgtggtggaattgcaggatatcaagacaggccggttaaaaaggttttctctcagtttagtctctatcagatgcagtgccaagtatct

SEQ ID NO: 14724 - DNA, 3432 bp, Homo sapiens
  source 1..3432: mol_type = unassigned DNA
atgaaagtgaccgtgtgcttcggcaggacgggcatcgtggtgccctgcaaggagggccagctgcgcgtcggcgagctcacccagcaggcgctgcagcggtacctgaagacccgggagaagggtcctggttactgggtgaagattcatcacttagaatatacagatggaggaatcctggatccagatgatgtcttggcagatgttgttgaagataaagacaagctgattgctgtgtttgaagaacaagaaccactccacaagattgagagccccagtggaaaccctgcagatcggcagagcccagatgcttttgagacagaagtggccgcccaactggccgcatttaagccaattggtggggagattgaagtaaccccttctgctctaaaactaggcactccactgctggtgaggagaagcagtgacccagtgccaggcccacctgctgatacccagccaagcgcttcacaccctggtggccagagtctgaaactggttgttccagattccacgcagaacttggaagacagagaagttttgaatggtgtacagacagaactactaacttcgccaagaactaaggacacattgagtgatatgacaagaacagtggagatttctggggaaggaggcccattgggaatacatgtagtgcccttcttttcatctctgagtggaaggattctaggactcttcatccgaggcattgaagacaacagcaggtccaagcgggagggactatttcacgaaaatgaatgtattgtaaaaatcaacaatgtggatctcgtagacaaaacctttgctcaggctcaagatgtcttccgccaggcaatgaaatctccaagtgtgctcctccacgtgcttcctccacaaaaccgtgaacagtatgaaaagtcagtcattggctctcttaacatttttggtaataatgatggcgttttgaaaaccaaagtgccgcctcctgtccatggaaaatcgggactaaagacagcaaatctcacaggaaccgatagtcctgaaacagatgcatcagcttccctgcaacaaaacaagagtccccgagtaccaaggctgggaggaaaaccatcctctccctcactctcgcctctcatgggatttggcagcaataaaaatgcaaagaaaattaagattgacctaaagaaaggccctgaaggacttggtttcactgtggttaccagagactcttccatacatggtcccggtcccatttttgtaaaaaacattttaccaaagggagcagcaataaaagatggccgcctacaatcaggggacagaattttggaggtaaatgggagagatgtcaccggacgaacccaggaagagcttgtggccatgctcaggagcaccaagcagggggagacagcatcgctggtcattgcccgccaagaaggacattttctgccccgagagttggatggtcgtctgcgaatgaatgaccagctgattgcagttaatggggaatctcttttgggaaagtccaaccacgaagctatggaaacacttaggcggtcaatgtccatggagggaaacatccgagggatgatccagttggtgattctgaggaggccagagagaccaatggaggatcctgcagagtgtggggcattttccaagccatgctttgagaactgtcaaaatgctgtaaccacctctaggcgaaatgataatagtatcctgcatccacttggcacttgcagtccacaagacaaacagaaaggtctattgctgcccaatgacggatgggccgagagtgaagttccaccttctccaacaccacattctgctctgggattgggcctcgaagattacagccacagctctggggtggattcagcagtatattttccagatcagcacatcaacttcagatctgtgacaccggccaggcagcctgaatcaattaatttgaaagcctcgaagagcatggaccttgtgccagatgaaagcaaggttcactcattggctggacaaaaatcggaatctccaagcaaagattttggtccaactctgggtttgaaaaagtccagctccttggagagtctgcagactgcagtggccgaggtcaggaagaatgaccttccctttcacaggccccggccgcacatggttcgaggccgaggctgcaatgagagctttagagcagccattgacaaatcctacgatggacctgaagaaatagaagctgacggtctgtctgataagagctctcactctggccaaggagctctgaattgtgagtctgcccctcaggggaattcggagctagaggacatggaaaataaagccaggaaagtcaaaaaaacgaaagagaaggagaagaaaaaggaaaagggcaaattgaaagtcaaggagaaaaagcgcaaagaggagaatgaagatccagaaaggaaaataaagaagaagggcttcggcgccatgctgagatttggaaagaagaaagaggataagggtggaaaggctgagcagaaaggtactctgaaacatggtggcctgagagaagaagagctggagaaaatgaaagaagagcgtgaaaggattggagcaaaacatcaggagctaagggaaaagcaggcaagaggtcttcttgattatgctactggtgcaattggatcagtgtatgatatggatgatgatgaaatggaccccaattatgccagagtgaaccactttcgggaaccatgcacatcagcaaatgtctttagatctccatctccccctcgagctggaccatttggttaccctcgggatggccatccactgtctccagaaagagaccacttagagggtctctatgccaaggtcaacaagccataccatccactggttccagctgacagtggccgtcctacgggtggaagcactgaccgtatccagaagttgcggaaagagtattatcaggctcggagggaaggtttccctttatatgaagacgacgaaggaagagcaaggccatctgagtatgacctactctgggtgcctggaaggggtccagatgggaatgcacacaacctccgctttgaagggatggagaggcagtacgcatccttacccaggggaggacccgcagatcctgtagactatctgccagcagcacctcgggggctctacaaggaaagggagcttccctattatccaggggctcatcctatgcaccctcccaaagggagctatccccgccccacagagctcagggtggcagatctccggtatcctcagcactacccacccccgccagctccccagcacaaaggaccctttcgacaagacgttccgccttcccctccccagcaccaaagaatgccagcctatcaggaaacaggcagaccagggccccgtgggggcagcccagaccagtacccttaccgaacccaggattcccggcagaagaaccccatgactgcagccgtatag

SEQ ID NO: 14725 - DNA, 3411 bp, Homo sapiens
  source 1..3411: mol_type = unassigned DNA
atgaaagtgaccgtgtgcttcggcaggacgggcatcgtggtgccctgcaaggagggccagctgcgcgtcggcgagctcacccagcaggcgctgcagcggtacctgaagacccgggagaagggtcctggttactgggtgaagattcatcacttagaatatacagatggaggaatcctggatccagatgatgtcttggcagatgttgttgaagataaagacaagctgattgctgtgtttgaagaacaagaaccactccacaagattgagagccccagtggaaaccctgcagatcggcagagcccagatgcttttgagacagaagtggccgcccaactggccgcatttaagccaattggtggggagattgaagtaaccccttctgctctaaaactaggcactccactgctggtgaggagaagcagtgacccagtgccaggcccacctgctgatacccagccaagcgcttcacaccctggtggccagagtctgaaactggttgttccagattccacgcagaacttggaagacagagaagttttgaatggtgtacagacagaactactaacttcgccaagaactaaggacacattgagtgatatgacaagaacagtggagatttctggggaaggaggcccattgggaatacatgtagtgcccttcttttcatctctgagtggaaggattctaggactcttcatccgaggcattgaagacaacagcaggtccaagcgggagggactatttcacgaaaatgaatgtattgtaaaaatcaacaatgtggatctcgtagacaaaacctttgctcaggctcaagatgtcttccgccaggcaatgaaatctccaagtgtgctcctccacgtgcttcctccacaaaaccgtgaacagtatgaaaagtcagtcattggctctcttaacatttttggtaataatgatggcgttttgaaaaccaaagtgccgcctcctgtccatggaaaatcgggactaaagacagcaaatctcacaggaaccgatagtcctgaaacagatgcatcagcttccctgcaacaaaacaagagtccccgagtaccaaggctgggaggaaaaccatcctctccctcactctcgcctctcatgggatttggcagcaataaaaatgcaaagaaaattaagattgacctaaagaaaggccctgaaggacttggtttcactgtggttaccagagactcttccatacatggtcccggtcccatttttgtaaaaaacattttaccaaagggagcagcaataaaagatggccgcctacaatcaggggacagaattttggaggtaaatgggagagatgtcaccggacgaacccaggaagagcttgtggccatgctcaggagcaccaagcagggggagacagcatcgctggtcattgcccgccaagaaggacattttctgccccgagagttgaaaggagaacctgactgctgtgcactctctctggagacaagcgagcagctcacctttgagatccccctgaatgattcaggttctgctggcctcggggtgagcttaaaagggaacaaatccagagaaactggaacagacttggggatttttatcaaatccatcattcatggaggcgctgcttttaaggatggtcgtctgcgaatgaatgaccagctgattgcagttaatggggaatctcttttgggaaagtccaaccacgaagctatggaaacacttaggcggtcaatgtccatggagggaaacatccgagggatgatccagttggtgattctgaggaggccagagagaccaatggaggatcctgcagagtgtggggcattttccaagccatgctttgagaactgtcaaaatgctgtaaccacctctaggcgaaatgataatagtatcctgcatccacttggcacttgcagtccacaagacaaacagaaaggtctattgctgcccaatgacggatgggccgagagtgaagttccaccttctccaacaccacattctgctctgggattgggcctcgaagattacagccacagctctggggtggattcagcagtatattttccagatcagcacatcaacttcagatctgtgacaccggccaggcagcctgaatcaattaatttgaaagcctcgaagagcatggaccttgtgccagatgaaagcaaggttcactcattggctggacaaaaatcggacggtctgtctgataagagctctcactctggccaaggagctctgaattgtgagtctgcccctcaggggaattcggagctagaggacatggaaaataaagccaggaaagtcaaaaaaacgaaagagaaggagaagaaaaaggaaaagggcaaattgaaagtcaaggagaaaaagcgcaaagaggagaatgaagatccagaaaggaaaataaagaagaagggcttcggcgccatgctgagatttggaaagaagaaagaggataagggtggaaaggctgagcagaaaggtactctgaaacatggtggcctgagagaagaagagctggagaaaatgaaagaagagcgtgaaaggattggagcaaaacatcaggagctaagggaaaagcaggcaagaggtcttcttgattatgctactggtgcaattggatcagtgtatgatatggatgatgatgaaatggaccccaattatgccagagtgaaccactttcgggaaccatgcacatcagcaaatgtctttagatctccatctccccctcgagctggaccatttggttaccctcgggatggccatccactgtctccagaaagagaccacttagagggtctctatgccaaggtcaacaagccataccatccactggttccagctgacagtggccgtcctacgggtggaagcactgaccgtatccagaagttgcggaaagagtattatcaggctcggagggaaggtttccctttatatgaagacgacgaaggaagagcaaggccatctgagtatgacctactctgggtgcctggaaggggtccagatgggaatgcacacaacctccgctttgaagggatggagaggcagtacgcatccttacccaggggaggacccgcagatcctgtagactatctgccagcagcacctcgggggctctacaaggaaagggagcttccctattatccaggggctcatcctatgcaccctcccaaagggagctatccccgccccacagagctcagggtggcagatctccggtatcctcagcactacccacccccgccagctccccagcacaaaggaccctttcgacaagacgttccgccttcccctccccagcaccaaagaatgccagcctatcaggaaacaggcagaccagggccccgtgggggcagcccagaccagtacccttaccgaacccaggattcccggcagaagaaccccatgactgcagccgtatag

SEQ ID NO: 14726 - DNA, 3315 bp, Homo sapiens
  source 1..3315: mol_type = unassigned DNA
atgaaagtgaccgtgtgcttcggcaggacgggcatcgtggtgccctgcaaggagggccagctgcgcgtcggcgagctcacccagcaggcgctgcagcggtacctgaagacccgggagaagggtcctggttactgggtgaagattcatcacttagaatatacagatggaggaatcctggatccagatgatgtcttggcagatgttgttgaagataaagacaagctgattgctgtgtttgaagaacaagaaccactccacaagattgagagccccagtggaaaccctgcagatcggcagagcccagatgcttttgagacagaagtggccgcccaactggccgcatttaagccaattggtggggagattgaagtaaccccttctgctctaaaactaggcactccactgctggtgaggagaagcagtgacccagtgccaggcccacctgctgatacccagccaagcgcttcacaccctggtggccagagtctgaaactggttgttccagattccacgcagaacttggaagacagagaagttttgaatggtgtacagacagaactactaacttcgccaagaactaaggacacattgagtgatatgacaagaacagtggagatttctggggaaggaggcccattgggaatacatgtagtgcccttcttttcatctctgagtggaaggattctaggactcttcatccgaggcattgaagacaacagcaggtccaagcgggagggactatttcacgaaaatgaatgtattgtaaaaatcaacaatgtggatctcgtagacaaaacctttgctcaggctcaagatgtcttccgccaggcaatgaaatctccaagtgtgctcctccacgtgcttcctccacaaaaccgtgaacagtatgaaaagtcagtcattggctctcttaacatttttggtaataatgatggcgttttgaaaaccaaagtgccgcctcctgtccatggaaaatcgggactaaagacagcaaatctcacaggaaccgatagtcctgaaacagatgcatcagcttccctgcaacaaaacaagagtccccgagtaccaaggctgggaggaaaaccatcctctccctcactctcgcctctcatgggatttggcagcaataaaaatgcaaagaaaattaagattgacctaaagaaaggccctgaaggacttggtttcactgtggttaccagagactcttccatacatggtcccggtcccatttttgtaaaaaacattttaccaaagggagcagcaataaaagatggccgcctacaatcaggggacagaattttggaggtaaatgggagagatgtcaccggacgaacccaggaagagcttgtggccatgctcaggagcaccaagcagggggagacagcatcgctggtcattgcccgccaagaaggacattttctgccccgagagttgaaaggagaacctgactgctgtgcactctctctggagacaagcgagcagctcacctttgagatccccctgaatgattcaggttctgctggcctcggggtgagcttaaaagggaacaaatccagagaaactggaacagacttggggatttttatcaaatccatcattcatggaggcgctgcttttaaggatggtcgtctgcgaatgaatgaccagctgattgcagttaatggggaatctcttttgggaaagtccaaccacgaagctatggaaacacttaggcggtcaatgtccatggagggaaacatccgagggatgatccagttggtgattctgaggaggccagagagaccaatggaggatcctgcagagtgtggggcattttccaagccatgctttgagaactgtcaaaatgctgtaaccacctctaggcgaaatgataatagtatcctgcatccacttggcacttgcagtccacaagacaaacagaaaggtctattgctgcccaatgacggatgggccgagagtgaagttccaccttctccaacaccacattctgctctgggattgggcctcgaagattacagccacagctctggggtggattcagcagtatattttccagatcagcacatcaacttcagatctgtgacaccggccaggcagcctgaatcaattaatttgaaagcctcgaagagcatggaccttgtgccagatgaaagcaaggttcactcattggctggacaaaaatcggaatctccaagcaaagattttggtccaactctgggtttgaaaaagtccagctccttggagagtctgcagactgcagtggccgaggtcaggaagaatgaccttccctttcacaggccccggccgcacatggttcgaggccgaggctgcaatgagagctttagagcagccattgacaaatcctacgatggacctgaagaaatagaagctgacggtctgtctgataagagctctcactctggccaaggagctctgaattgtgagtctgcccctcaggggaattcggagctagaggacatggaaaataaagccaggaaagtcaaaaaaacgaaagagaaggagaagaaaaaggaaaagggcaaattgaaagtcaaggagaaaaagcgcaaagaggagaatgaagatccagaaaggaaaataaagaagaagggcttcggcgccatgctgagatttggaaagaagaaagaggataagggtggaaaggctgagcagaaaggtactctgaaacatggtggcctgagagaagaagagctggagaaaatgaaagaagagcgtgaaagtggccgtcctacgggtggaagcactgaccgtatccagaagttgcggaaagagtattatcaggctcggagggaaggtttccctttatatgaagacgacgaaggaagagcaaggccatctgagtatgacctactctgggtgcctggaaggggtccagatgggaatgcacacaacctccgctttgaagggatggagaggcagtacgcatccttacccaggggaggacccgcagatcctgtagactatctgccagcagcacctcgggggctctacaaggaaagggagcttccctattatccaggggctcatcctatgcaccctcccaaagggagctatccccgccccacagagctcagggtggcagatctccggtatcctcagcactacccacccccgccagctccccagcacaaaggaccctttcgacaagacgttccgccttcccctccccagcaccaaagaatgccagcctatcaggaaacaggcagaccagggccccgtgggggcagcccagaccagtacccttaccgaacccaggattcccggcagaagaaccccatgactgcagccgtatag

SEQ ID NO: 14727 - DNA, 478 bp, Homo sapiens
  source 1..478: mol_type = unassigned DNA
gagccctaatgtcttctgtaaggaagcagcagcatcaggcgtgctttctagaatccatcctctcctctgcttctctgggattccacgcagaacttggaagacagagaagttttgaatggtgtacagacagaactactaacttcgccaagaactaaggacacattgagtgatatgacaagaacagtggagatttctggggaaggaggcccattgggaatacatgtagtgcccttcttttcatctctgagtggaaggattctaggactcttcatccgaggcattgaagacaacagcaggtccaagcgggagggactatttcacgaaaatgaatgtattgtaaaaatcaacaatgtggatctcgtagacaaaacctttgctcaggctcaagatgtcttccgccaggcaatgaaatctccaagtgtgctcctccacgtgcttcctccacaaaaccgtgaacagtatgaaaagtcagtcattg

SEQ ID NO: 14728 - DNA, 575 bp, Homo sapiens
  source 1..575: mol_type = unassigned DNA
cttggcagtaggtaaaattaagactatttaaagcacacatgaggtggaaatggcagaaaacattaatattacaaagataagttaagcaaaaggaacaactagtatgcaaagaaaggcaaaatacagagatgaatgaataattatgggtagggcagtaattattaaatcattgaaagtatgtaaaagaacctaagggttgtattaacaaagaagaggaagctgtatgtgggctttgaggaagtgaagcaattgtggactgtttctccatgtaaaactttgttcagtctcacagcactgaagaaaaggggcatcccagtgttaatctccaagcaaagattttggtccaactctgggtttgaaaaagtccagctccttggagagtctgcagactgcagtggccgaggtcaggaagaatgaccttccctttcacaggccccggccgcacatggttcgaggccgaggctgcaatgagagctttagagcagccattgacaaatcctacgatggacctgaagaaatagaagctgacggtctgtctgataagagctctcactctggccaaggagctctgaatt

SEQ ID NO: 14729 - DNA, 576 bp, Homo sapiens
  source 1..576: mol_type = unassigned DNA
atttgtaaacaaaggaagcttttcagaagtgggtaacagtagccagagtttgctggttggatcttccaggaagcaggagctgagaaataggagtgcaaaagttttgttgaggggcatacctggggaagataaaaaagggaggaagcaggattaggcagagagccctcaatcacagggcaaatctgctgagtcttggccagctcaacaggagctcccgaccaaagatcccctgttctaggagctcaacactgggcagaaaacagccaggtcctattgcacccactgtgctcaatcatgaccgagagctgcctcagaagagtgtggactcaagtcagaagctgaggaggatcctaaaggcagtaaatttggaaagaagaaagaggataagggtggaaaggctgagcagaaaggtactctgaaacatggtggcctgagagaagaagagctggagaaaatgaaagaagagcgtgaaaggattggagcaaaacatcaggagctaagggaaaagcaggcaagaggtcttcttgattatgctactggtgcaattggatcagtgtatgatatggatgatgatga

SEQ ID NO: 14730 - DNA, 972 bp, Homo sapiens
  source 1..972: mol_type = unassigned DNA
atctttggggcctccccaggcgggggtggggggcattgtatatccacacctgtgctgacaagggcagtgggggcctgatttgcatagcagcaggataaaaaccagcctctggcaccactggattcttccctggtagaaactctcccaggtggccgtcctacgggtggaagcactgaccgtatccagaagttgcggaaagagtattatcaggctcggagggaaggtttccctttatatgaagacgacgaaggaagagcaaggccatctgagtatgacctactctgggtgcctggaaggggtccagatgggaatgcacacaacctccgctttgaagggatggagaggcagtacgcatccttacccaggggaggacccgcagatcctgtagactatctgccagcagcacctcgggggctctacaaggaaagggagcttccctattatccaggggctcatcctatgcaccctcccaaagggagctatccccgccccacagagctcagggtggcagatctccggtatcctcagcactacccacccccgccagctccccagcacaaaggaccctttcgacaagacgttccgccttcccctccccagcaccaaagaatgccagcctatcaggaaacaggcagaccagggccccgtgggggcagcccagaccagtacccttaccgaacccaggattcccggcagaagaaccccatgactgcagccgtatagctgagtgccaccgaggccagcccggtccagaaaggaaggtgtctactctacctttgccctttctaaacctgaagacctccttggtgttaggaattctccatgttactgataagctttttctcactgacattgtaacgcatgactgctaatcagagagaaaaagaaggggaagggaattggggaggaaaaaaaatcagaaggaagacgaaagatggggctataaaaacaaaactacctgatagttgaaac

SEQ ID NO: 14731 - DNA, 7559 bp, Homo sapiens
  source 1..7559: mol_type = unassigned DNA
ctgattgctgtgtttgaagaacaagaaccactccacaagattgagagccccagtggaaaccctgcagatcggcagagcccagatgcttttgagacagaagtggccgcccaactggccgcatttaagccaattggtggggagattgaagtaaccccttctgctctaaaactaggcactccactgctggtgaggagaagcagtgacccagtgccaggcccacctgctgatacccagccaagcgcttcacaccctggtggccagagtctgaaactggttgttccagattccacgcagaacttggaagacagagaagttttgaatggtgtacagacagaactactaacttcgccaagaactaaggacacattgagtgatatgacaagaacagtggagatttctggggaaggaggcccattgggaatacatgtagtgcccttcttttcatctctgagtggaaggattctaggactcttcatccgaggcattgaagacaacagcaggtccaagcgggagggactatttcacgaaaatgaatgtattgtaaaaatcaacaatgtggatctcgtagacaaaacctttgctcaggctcaagatgtcttccgccaggcaatgaaatctccaagtgtgctcctccacgtgcttcctccacaaaaccgtgaacagtatgaaaagtcagtcattggctctcttaacatttttggtaataatgatggcgttttgaaaaccaaagtgccgcctcctgtccatggaaaatcgggactaaagacagcaaatctcacaggaaccgatagtcctgaaacagatgcatcagcttccctgcaacaaaacaagagtccccgagtaccaaggctgggaggaaaaccatcctctccctcactctcgcctctcatgggatttggcagcaataaaaatgcaaagaaaattaagattgacctaaagaaaggccctgaaggacttggtttcactgtggttaccagagactcttccatacatggtcccggtcccatttttgtaaaaaacattttaccaaagggagcagcaataaaagatggccgcctacaatcaggggacagaattttggaggtaaatgggagagatgtcaccggacgaacccaggaagagcttgtggccatgctcaggagcaccaagcagggggagacagcatcgctggtcattgcccgccaagaaggacattttctgccccgagagttggatggtcgtctgcgaatgaatgaccagctgattgcagttaatggggaatctcttttgggaaagtccaaccacgaagctatggaaacacttaggcggtcaatgtccatggagggaaacatccgagggatgatccagttggtgattctgaggaggccagagagaccaatggaggatcctgcagagtgtggggcattttccaagccatgctttgagaactgtcaaaatgctgtaaccacctctaggcgaaatgataatagtatcctgcatccacttggcacttgcagtccacaagacaaacagaaaggtctattgctgcccaatgacggatgggccgagagtgaagttccaccttctccaacaccacattctgctctgggattgggcctcgaagattacagccacagctctggggtggattcagcagtatattttccagatcagcacatcaacttcagatctgtgacaccggccaggcagcctgaatcaattaatttgaaagcctcgaagagcatggaccttgtgccagatgaaagcaaggttcactcattggctggacaaaaatcggaatctccaagcaaagattttggtccaactctgggtttgaaaaagtccagctccttggagagtctgcagactgcagtggccgaggtcaggaagaatgaccttccctttcacaggccccggccgcacatggttcgaggccgaggctgcaatgagagctttagagcagccattgacaaatcctacgatggacctgaagaaatagaagctgacggtctgtctgataagagctctcactctggccaaggagctctgaattgtgagtctgcccctcaggggaattcggagctagaggacatggaaaataaagccaggaaagtcaaaaaaacgaaagagaaggagaagaaaaaggaaaagggcaaattgaaagtcaaggagaaaaagcgcaaagaggagaatgaagatccagaaaggaaaataaagaagaagggcttcggcgccatgctgagatttggaaagaagaaagaggataagggtggaaaggctgagcagaaaggtactctgaaacatggtggcctgagagaagaagagctggagaaaatgaaagaagagcgtgaaaggattggagcaaaacatcaggagctaagggaaaagcaggcaagaggtcttcttgattatgctactggtgcaattggatcagtgtatgatatggatgatgatgaaatggaccccaattatgccagagtgaaccactttcgggaaccatgcacatcagcaaatgtctttagatctccatctccccctcgagctggaccatttggttaccctcgggatggccatccactgtctccagaaagagaccacttagagggtctctatgccaaggtcaacaagccataccatccactggttccagctgacagtggccgtcctacgggtggaagcactgaccgtatccagaagttgcggaaagagtattatcaggctcggagggaaggtttccctttatatgaagacgacgaaggaagagcaaggccatctgagtatgacctactctgggtgcctggaaggggtccagatgggaatgcacacaacctccgctttgaagggatggagaggcagtacgcatccttacccaggggaggacccgcagatcctgtagactatctgccagcagcacctcgggggctctacaaggaaagggagcttccctattatccaggggctcatcctatgcaccctcccaaagggagctatccccgccccacagagctcagggtggcagatctccggtatcctcagcactacccacccccgccagctccccagcacaaaggaccctttcgacaagacgttccgccttcccctccccagcaccaaagaatgccagcctatcaggaaacaggcagaccagggccccgtgggggcagcccagaccagtacccttaccgaacccaggattcccggcagaagaaccccatgactgcagccgtatagctgagtgccaccgaggccagcccggtccagaaaggaaggtgtctactctacctttgccctttctaaacctgaagacctccttggtgttaggaattctccatgttactgataagctttttctcactgacattgtaacgcatgactgctaatcagagagaaaaagaaggggaagggaattggggaggaaaaaaaatcagaaggaagacgaaagatggggctataaaaacaaaactacctgatagttgaaacgctttcagagttgttcaaatcagtgagagtggcaacggaacacacaaacaactaattatggaactctactctggggatcctctctggctagataacctgtgctgatgtgcagacacgtggacatccccctctgagactggcggtccagaggcagtctctgccaggcagcattacccgctccgaggtggagcctcagcccccttcttagagctgttaagtctaaggtgtggcagagcagacagagatagaggcatctgaagtgagtataggttttttgactaagaaaaaaaacaacagcaaacatgactagtgatcttgaaatattttgtaccgagagaaagactgcatttatttgtagaatttatcaggtttctgataccactcattggatgtaaacatttcatgtttcctcacttttgatatgaaagtcggtaaaatgcagtattagtcccgggaggatgtgcacagctggtcagagcttccagaaggaatatcttccgaggactaaggtgatcaggttaagagggttcaacatcccacggccctcaccttcctccctcccacattccaggcatggagatatctggtttcagagtcagccccaaatctcctgcctataattactttaactggggtctctaaggttcccacttgagggctaaaatgtagttgggaaagagggcctactggggaggtctcacaggaggcagtgccctgggaaatgccaagtccagactcagtgccaagcagtaaccatctgcactcggggacagcgaggagctgaccatggcctctgatgaccagcaggtattagatggaagtgaatgagagagagagagagagagagtatgtgtgtgtgtgtgtatgtgtgtgttcgaacacatatgattgccagtatggagaatgaaagattaataatgctttctggagagtttgatgcaaaagtgggggaaacggagaaaaggcgctaaggctaaatccatctgcatttgctatatttcattagctaaagtcaggtcagggcagggccaaggcctccaattggcaaaggacagtgttatggctttaaaaagctgaaaccccaacctctaagtagatcacaatgttttctgagctttgcagtaattttctatggaaactaaaacctctaaaacatacaagctggcccaaatgagaacacaagcaaaagatgtggaagacagcaaaacctgagcactggtttgaaccaggcactgacatttgaaatgctttaagccttttcacattccttctttattccctccaaaaaaaaaagtcttgagtttaatttaggtctattttggctgagattagcatacctctgactcacaggatttaataaattatagtattattgaatacataggacatccctctaccccagcttactcttatctttttaatttaaaatagtattctgctaccaagaaggatgcaactgctagttttagatgtaaatagtgttatttactggactttgtgatattattttcttaactacactttactatggccctgttgaaaacagactatcaagttttttgtctctgttctgtcatctctcttaagccaggcacctttagagtgtttgcaatttgttcgaagtggttgaggatctcaggccctgctcacgtgaggtggagtgcaggggagctaccggtttccctgctgacctgctgaatgctaccttcccctcgagttgaatacaccttaaggaaaatgataacacgagggacgtgtaacttgttttgaagcattaaaaaccagcagctcttcactatgttccatattttaaccaaactactgtagactactaaacatagccaagccagaacattccttctggattaagcctaggccacttgaggggcagccaggggtgatggtgtcaggtgagaatcctgtgtcttgaaggagtggcctttacaggaagagtgcccatgttttcacctgcagcgttgccaccagagtgtgcaatacctcctgcacacaggctcagggtaaactgctccaaagctgggttttgtgttgcatacaaagtcaataaaatagttgctaatcctgaatggcagccagtgatgtgaaggtactattaaagtgaacaaaaactagattgcaacagttttctttccttgcttgaagtataacacacgctccatttgatcctgcctgaaagaagctaacattatatttgtgacagacagaggctccatcaagccaagcaacaattaacagctcaagtgtaagatttataaatgcccgtgtactcacccttcaattgttaccacccagaggttacaggactctttcccagcatttaggggaacaggcttttagagtatttagaagaccaggctataatcagtaatgtgcctgggagcaggaaatagctcccaatttatttatggccttgggaaaactcaatccggtgtctccttgtagctcagaacactaatagcccccctggaagagagtggcacattgagctccaaacccaatcaacatacatccacttggctgcagatctgactgctgggtcatgaaggccgtgaaatgatgtttgccctcaagtcactagatattttaagaagccctatttttctccctttttgcaggagtagagagatgaaagaggacagaccattgaaaacttttagatgcaggagaattgagacttccacaagggagagaaacacagcctccccagaatccattatgccatcgggttgtggcactctcacccttgccataataccgtttcctaacaatatcaaatcagtggatgaaatacaagctcagaaacaggaacattttcctaaatcataacctaatagcaaacaaaaattgaaaaaacaattattctgaagctcattattcttagatctgtagatatatatgtgttgactcccacaggatggcaccaagtaaagatcttaagagcatagtaggggttctgagaccgactgtcacccgtggatcctgatggggaagaacagaggcttcactgtagctatagttttccaccaagtcaatcaaattaaaacatgactcattgtcccctccaaagattcataaaattcttgagctaaagtgatcttctgaagaaaagccacctaacaatgttaggaggctcataaagctcatttctcttttccctggtatgcacaaatatcaagcctataaaaaagtaattatttccccaaacctgtaaccactgcattcgttttctttggaggaacattgtagcatttcaggagggtcgagagatctaaagagtttggtctgaatgtgtgtctgtacaattccctttggcattaaactctgaaacctacaatcaatggccttcaaattggtgttaaattgggagaacaccctactgctttctgagtctacgagcaacagaaagactggtcttagtgcaattaggcaggagggatttggactcagaaacagccacagaagtatttctcagcactcccagttcctgccaacttagctggaaacgatgccacagcgagaccagaaagaggagtcgccttaaggtatccctacaaagtcacctttctgataaaaaggagggaaaaaaaagttagatatctaaaataagcctagaatctcacacacagctgtgacttctaagtgaaactcttttctccctcatgtccttaaatagtcacagaatcacacacagcctgacttttaaagacaagcttggctacaggaaatgaaccaaccccaaagactcttctaacctgtctcctgactgggctccttcagaaagtgttctcctgttccatctgtagggctgcttactactggaacctaaaacaaaacctgttgtttgtaccatcactttttctggtgtttcctgtgcttttgtgattccaagtctgttcataagttctgaagataaattatgtgaaatcatattttggcatatgggggtggaggatgaattctttacagactttttaagatgatccatttgtaccacagaaaacattttggaagttgttatatatgagtatataaatttttcttttcatattttacattaaaataaagctttattcagtcattaa

SEQ ID NO: 14732 - DNA, 7538 bp, Homo sapiens
  source 1..7538: mol_type = unassigned DNA
ctgattgctgtgtttgaagaacaagaaccactccacaagattgagagccccagtggaaaccctgcagatcggcagagcccagatgcttttgagacagaagtggccgcccaactggccgcatttaagccaattggtggggagattgaagtaaccccttctgctctaaaactaggcactccactgctggtgaggagaagcagtgacccagtgccaggcccacctgctgatacccagccaagcgcttcacaccctggtggccagagtctgaaactggttgttccagattccacgcagaacttggaagacagagaagttttgaatggtgtacagacagaactactaacttcgccaagaactaaggacacattgagtgatatgacaagaacagtggagatttctggggaaggaggcccattgggaatacatgtagtgcccttcttttcatctctgagtggaaggattctaggactcttcatccgaggcattgaagacaacagcaggtccaagcgggagggactatttcacgaaaatgaatgtattgtaaaaatcaacaatgtggatctcgtagacaaaacctttgctcaggctcaagatgtcttccgccaggcaatgaaatctccaagtgtgctcctccacgtgcttcctccacaaaaccgtgaacagtatgaaaagtcagtcattggctctcttaacatttttggtaataatgatggcgttttgaaaaccaaagtgccgcctcctgtccatggaaaatcgggactaaagacagcaaatctcacaggaaccgatagtcctgaaacagatgcatcagcttccctgcaacaaaacaagagtccccgagtaccaaggctgggaggaaaaccatcctctccctcactctcgcctctcatgggatttggcagcaataaaaatgcaaagaaaattaagattgacctaaagaaaggccctgaaggacttggtttcactgtggttaccagagactcttccatacatggtcccggtcccatttttgtaaaaaacattttaccaaagggagcagcaataaaagatggccgcctacaatcaggggacagaattttggaggtaaatgggagagatgtcaccggacgaacccaggaagagcttgtggccatgctcaggagcaccaagcagggggagacagcatcgctggtcattgcccgccaagaaggacattttctgccccgagagttgaaaggagaacctgactgctgtgcactctctctggagacaagcgagcagctcacctttgagatccccctgaatgattcaggttctgctggcctcggggtgagcttaaaagggaacaaatccagagaaactggaacagacttggggatttttatcaaatccatcattcatggaggcgctgcttttaaggatggtcgtctgcgaatgaatgaccagctgattgcagttaatggggaatctcttttgggaaagtccaaccacgaagctatggaaacacttaggcggtcaatgtccatggagggaaacatccgagggatgatccagttggtgattctgaggaggccagagagaccaatggaggatcctgcagagtgtggggcattttccaagccatgctttgagaactgtcaaaatgctgtaaccacctctaggcgaaatgataatagtatcctgcatccacttggcacttgcagtccacaagacaaacagaaaggtctattgctgcccaatgacggatgggccgagagtgaagttccaccttctccaacaccacattctgctctgggattgggcctcgaagattacagccacagctctggggtggattcagcagtatattttccagatcagcacatcaacttcagatctgtgacaccggccaggcagcctgaatcaattaatttgaaagcctcgaagagcatggaccttgtgccagatgaaagcaaggttcactcattggctggacaaaaatcggacggtctgtctgataagagctctcactctggccaaggagctctgaattgtgagtctgcccctcaggggaattcggagctagaggacatggaaaataaagccaggaaagtcaaaaaaacgaaagagaaggagaagaaaaaggaaaagggcaaattgaaagtcaaggagaaaaagcgcaaagaggagaatgaagatccagaaaggaaaataaagaagaagggcttcggcgccatgctgagatttggaaagaagaaagaggataagggtggaaaggctgagcagaaaggtactctgaaacatggtggcctgagagaagaagagctggagaaaatgaaagaagagcgtgaaaggattggagcaaaacatcaggagctaagggaaaagcaggcaagaggtcttcttgattatgctactggtgcaattggatcagtgtatgatatggatgatgatgaaatggaccccaattatgccagagtgaaccactttcgggaaccatgcacatcagcaaatgtctttagatctccatctccccctcgagctggaccatttggttaccctcgggatggccatccactgtctccagaaagagaccacttagagggtctctatgccaaggtcaacaagccataccatccactggttccagctgacagtggccgtcctacgggtggaagcactgaccgtatccagaagttgcggaaagagtattatcaggctcggagggaaggtttccctttatatgaagacgacgaaggaagagcaaggccatctgagtatgacctactctgggtgcctggaaggggtccagatgggaatgcacacaacctccgctttgaagggatggagaggcagtacgcatccttacccaggggaggacccgcagatcctgtagactatctgccagcagcacctcgggggctctacaaggaaagggagcttccctattatccaggggctcatcctatgcaccctcccaaagggagctatccccgccccacagagctcagggtggcagatctccggtatcctcagcactacccacccccgccagctccccagcacaaaggaccctttcgacaagacgttccgccttcccctccccagcaccaaagaatgccagcctatcaggaaacaggcagaccagggccccgtgggggcagcccagaccagtacccttaccgaacccaggattcccggcagaagaaccccatgactgcagccgtatagctgagtgccaccgaggccagcccggtccagaaaggaaggtgtctactctacctttgccctttctaaacctgaagacctccttggtgttaggaattctccatgttactgataagctttttctcactgacattgtaacgcatgactgctaatcagagagaaaaagaaggggaagggaattggggaggaaaaaaaatcagaaggaagacgaaagatggggctataaaaacaaaactacctgatagttgaaacgctttcagagttgttcaaatcagtgagagtggcaacggaacacacaaacaactaattatggaactctactctggggatcctctctggctagataacctgtgctgatgtgcagacacgtggacatccccctctgagactggcggtccagaggcagtctctgccaggcagcattacccgctccgaggtggagcctcagcccccttcttagagctgttaagtctaaggtgtggcagagcagacagagatagaggcatctgaagtgagtataggttttttgactaagaaaaaaaacaacagcaaacatgactagtgatcttgaaatattttgtaccgagagaaagactgcatttatttgtagaatttatcaggtttctgataccactcattggatgtaaacatttcatgtttcctcacttttgatatgaaagtcggtaaaatgcagtattagtcccgggaggatgtgcacagctggtcagagcttccagaaggaatatcttccgaggactaaggtgatcaggttaagagggttcaacatcccacggccctcaccttcctccctcccacattccaggcatggagatatctggtttcagagtcagccccaaatctcctgcctataattactttaactggggtctctaaggttcccacttgagggctaaaatgtagttgggaaagagggcctactggggaggtctcacaggaggcagtgccctgggaaatgccaagtccagactcagtgccaagcagtaaccatctgcactcggggacagcgaggagctgaccatggcctctgatgaccagcaggtattagatggaagtgaatgagagagagagagagagagagtatgtgtgtgtgtgtgtatgtgtgtgttcgaacacatatgattgccagtatggagaatgaaagattaataatgctttctggagagtttgatgcaaaagtgggggaaacggagaaaaggcgctaaggctaaatccatctgcatttgctatatttcattagctaaagtcaggtcagggcagggccaaggcctccaattggcaaaggacagtgttatggctttaaaaagctgaaaccccaacctctaagtagatcacaatgttttctgagctttgcagtaattttctatggaaactaaaacctctaaaacatacaagctggcccaaatgagaacacaagcaaaagatgtggaagacagcaaaacctgagcactggtttgaaccaggcactgacatttgaaatgctttaagccttttcacattccttctttattccctccaaaaaaaaaagtcttgagtttaatttaggtctattttggctgagattagcatacctctgactcacaggatttaataaattatagtattattgaatacataggacatccctctaccccagcttactcttatctttttaatttaaaatagtattctgctaccaagaaggatgcaactgctagttttagatgtaaatagtgttatttactggactttgtgatattattttcttaactacactttactatggccctgttgaaaacagactatcaagttttttgtctctgttctgtcatctctcttaagccaggcacctttagagtgtttgcaatttgttcgaagtggttgaggatctcaggccctgctcacgtgaggtggagtgcaggggagctaccggtttccctgctgacctgctgaatgctaccttcccctcgagttgaatacaccttaaggaaaatgataacacgagggacgtgtaacttgttttgaagcattaaaaaccagcagctcttcactatgttccatattttaaccaaactactgtagactactaaacatagccaagccagaacattccttctggattaagcctaggccacttgaggggcagccaggggtgatggtgtcaggtgagaatcctgtgtcttgaaggagtggcctttacaggaagagtgcccatgttttcacctgcagcgttgccaccagagtgtgcaatacctcctgcacacaggctcagggtaaactgctccaaagctgggttttgtgttgcatacaaagtcaataaaatagttgctaatcctgaatggcagccagtgatgtgaaggtactattaaagtgaacaaaaactagattgcaacagttttctttccttgcttgaagtataacacacgctccatttgatcctgcctgaaagaagctaacattatatttgtgacagacagaggctccatcaagccaagcaacaattaacagctcaagtgtaagatttataaatgcccgtgtactcacccttcaattgttaccacccagaggttacaggactctttcccagcatttaggggaacaggcttttagagtatttagaagaccaggctataatcagtaatgtgcctgggagcaggaaatagctcccaatttatttatggccttgggaaaactcaatccggtgtctccttgtagctcagaacactaatagcccccctggaagagagtggcacattgagctccaaacccaatcaacatacatccacttggctgcagatctgactgctgggtcatgaaggccgtgaaatgatgtttgccctcaagtcactagatattttaagaagccctatttttctccctttttgcaggagtagagagatgaaagaggacagaccattgaaaacttttagatgcaggagaattgagacttccacaagggagagaaacacagcctccccagaatccattatgccatcgggttgtggcactctcacccttgccataataccgtttcctaacaatatcaaatcagtggatgaaatacaagctcagaaacaggaacattttcctaaatcataacctaatagcaaacaaaaattgaaaaaacaattattctgaagctcattattcttagatctgtagatatatatgtgttgactcccacaggatggcaccaagtaaagatcttaagagcatagtaggggttctgagaccgactgtcacccgtggatcctgatggggaagaacagaggcttcactgtagctatagttttccaccaagtcaatcaaattaaaacatgactcattgtcccctccaaagattcataaaattcttgagctaaagtgatcttctgaagaaaagccacctaacaatgttaggaggctcataaagctcatttctcttttccctggtatgcacaaatatcaagcctataaaaaagtaattatttccccaaacctgtaaccactgcattcgttttctttggaggaacattgtagcatttcaggagggtcgagagatctaaagagtttggtctgaatgtgtgtctgtacaattccctttggcattaaactctgaaacctacaatcaatggccttcaaattggtgttaaattgggagaacaccctactgctttctgagtctacgagcaacagaaagactggtcttagtgcaattaggcaggagggatttggactcagaaacagccacagaagtatttctcagcactcccagttcctgccaacttagctggaaacgatgccacagcgagaccagaaagaggagtcgccttaaggtatccctacaaagtcacctttctgataaaaaggagggaaaaaaaagttagatatctaaaataagcctagaatctcacacacagctgtgacttctaagtgaaactcttttctccctcatgtccttaaatagtcacagaatcacacacagcctgacttttaaagacaagcttggctacaggaaatgaaccaaccccaaagactcttctaacctgtctcctgactgggctccttcagaaagtgttctcctgttccatctgtagggctgcttactactggaacctaaaacaaaacctgttgtttgtaccatcactttttctggtgtttcctgtgcttttgtgattccaagtctgttcataagttctgaagataaattatgtgaaatcatattttggcatatgggggtggaggatgaattctttacagactttttaagatgatccatttgtaccacagaaaacattttggaagttgttatatatgagtatataaatttttcttttcatattttacattaaaataaagctttattcagtcattaa

SEQ ID NO: 14733 - DNA, 7442 bp, Homo sapiens
  source 1..7442: mol_type = unassigned DNA
ctgattgctgtgtttgaagaacaagaaccactccacaagattgagagccccagtggaaaccctgcagatcggcagagcccagatgcttttgagacagaagtggccgcccaactggccgcatttaagccaattggtggggagattgaagtaaccccttctgctctaaaactaggcactccactgctggtgaggagaagcagtgacccagtgccaggcccacctgctgatacccagccaagcgcttcacaccctggtggccagagtctgaaactggttgttccagattccacgcagaacttggaagacagagaagttttgaatggtgtacagacagaactactaacttcgccaagaactaaggacacattgagtgatatgacaagaacagtggagatttctggggaaggaggcccattgggaatacatgtagtgcccttcttttcatctctgagtggaaggattctaggactcttcatccgaggcattgaagacaacagcaggtccaagcgggagggactatttcacgaaaatgaatgtattgtaaaaatcaacaatgtggatctcgtagacaaaacctttgctcaggctcaagatgtcttccgccaggcaatgaaatctccaagtgtgctcctccacgtgcttcctccacaaaaccgtgaacagtatgaaaagtcagtcattggctctcttaacatttttggtaataatgatggcgttttgaaaaccaaagtgccgcctcctgtccatggaaaatcgggactaaagacagcaaatctcacaggaaccgatagtcctgaaacagatgcatcagcttccctgcaacaaaacaagagtccccgagtaccaaggctgggaggaaaaccatcctctccctcactctcgcctctcatgggatttggcagcaataaaaatgcaaagaaaattaagattgacctaaagaaaggccctgaaggacttggtttcactgtggttaccagagactcttccatacatggtcccggtcccatttttgtaaaaaacattttaccaaagggagcagcaataaaagatggccgcctacaatcaggggacagaattttggaggtaaatgggagagatgtcaccggacgaacccaggaagagcttgtggccatgctcaggagcaccaagcagggggagacagcatcgctggtcattgcccgccaagaaggacattttctgccccgagagttgaaaggagaacctgactgctgtgcactctctctggagacaagcgagcagctcacctttgagatccccctgaatgattcaggttctgctggcctcggggtgagcttaaaagggaacaaatccagagaaactggaacagacttggggatttttatcaaatccatcattcatggaggcgctgcttttaaggatggtcgtctgcgaatgaatgaccagctgattgcagttaatggggaatctcttttgggaaagtccaaccacgaagctatggaaacacttaggcggtcaatgtccatggagggaaacatccgagggatgatccagttggtgattctgaggaggccagagagaccaatggaggatcctgcagagtgtggggcattttccaagccatgctttgagaactgtcaaaatgctgtaaccacctctaggcgaaatgataatagtatcctgcatccacttggcacttgcagtccacaagacaaacagaaaggtctattgctgcccaatgacggatgggccgagagtgaagttccaccttctccaacaccacattctgctctgggattgggcctcgaagattacagccacagctctggggtggattcagcagtatattttccagatcagcacatcaacttcagatctgtgacaccggccaggcagcctgaatcaattaatttgaaagcctcgaagagcatggaccttgtgccagatgaaagcaaggttcactcattggctggacaaaaatcggaatctccaagcaaagattttggtccaactctgggtttgaaaaagtccagctccttggagagtctgcagactgcagtggccgaggtcaggaagaatgaccttccctttcacaggccccggccgcacatggttcgaggccgaggctgcaatgagagctttagagcagccattgacaaatcctacgatggacctgaagaaatagaagctgacggtctgtctgataagagctctcactctggccaaggagctctgaattgtgagtctgcccctcaggggaattcggagctagaggacatggaaaataaagccaggaaagtcaaaaaaacgaaagagaaggagaagaaaaaggaaaagggcaaattgaaagtcaaggagaaaaagcgcaaagaggagaatgaagatccagaaaggaaaataaagaagaagggcttcggcgccatgctgagatttggaaagaagaaagaggataagggtggaaaggctgagcagaaaggtactctgaaacatggtggcctgagagaagaagagctggagaaaatgaaagaagagcgtgaaagtggccgtcctacgggtggaagcactgaccgtatccagaagttgcggaaagagtattatcaggctcggagggaaggtttccctttatatgaagacgacgaaggaagagcaaggccatctgagtatgacctactctgggtgcctggaaggggtccagatgggaatgcacacaacctccgctttgaagggatggagaggcagtacgcatccttacccaggggaggacccgcagatcctgtagactatctgccagcagcacctcgggggctctacaaggaaagggagcttccctattatccaggggctcatcctatgcaccctcccaaagggagctatccccgccccacagagctcagggtggcagatctccggtatcctcagcactacccacccccgccagctccccagcacaaaggaccctttcgacaagacgttccgccttcccctccccagcaccaaagaatgccagcctatcaggaaacaggcagaccagggccccgtgggggcagcccagaccagtacccttaccgaacccaggattcccggcagaagaaccccatgactgcagccgtatagctgagtgccaccgaggccagcccggtccagaaaggaaggtgtctactctacctttgccctttctaaacctgaagacctccttggtgttaggaattctccatgttactgataagctttttctcactgacattgtaacgcatgactgctaatcagagagaaaaagaaggggaagggaattggggaggaaaaaaaatcagaaggaagacgaaagatggggctataaaaacaaaactacctgatagttgaaacgctttcagagttgttcaaatcagtgagagtggcaacggaacacacaaacaactaattatggaactctactctggggatcctctctggctagataacctgtgctgatgtgcagacacgtggacatccccctctgagactggcggtccagaggcagtctctgccaggcagcattacccgctccgaggtggagcctcagcccccttcttagagctgttaagtctaaggtgtggcagagcagacagagatagaggcatctgaagtgagtataggttttttgactaagaaaaaaaacaacagcaaacatgactagtgatcttgaaatattttgtaccgagagaaagactgcatttatttgtagaatttatcaggtttctgataccactcattggatgtaaacatttcatgtttcctcacttttgatatgaaagtcggtaaaatgcagtattagtcccgggaggatgtgcacagctggtcagagcttccagaaggaatatcttccgaggactaaggtgatcaggttaagagggttcaacatcccacggccctcaccttcctccctcccacattccaggcatggagatatctggtttcagagtcagccccaaatctcctgcctataattactttaactggggtctctaaggttcccacttgagggctaaaatgtagttgggaaagagggcctactggggaggtctcacaggaggcagtgccctgggaaatgccaagtccagactcagtgccaagcagtaaccatctgcactcggggacagcgaggagctgaccatggcctctgatgaccagcaggtattagatggaagtgaatgagagagagagagagagagagtatgtgtgtgtgtgtgtatgtgtgtgttcgaacacatatgattgccagtatggagaatgaaagattaataatgctttctggagagtttgatgcaaaagtgggggaaacggagaaaaggcgctaaggctaaatccatctgcatttgctatatttcattagctaaagtcaggtcagggcagggccaaggcctccaattggcaaaggacagtgttatggctttaaaaagctgaaaccccaacctctaagtagatcacaatgttttctgagctttgcagtaattttctatggaaactaaaacctctaaaacatacaagctggcccaaatgagaacacaagcaaaagatgtggaagacagcaaaacctgagcactggtttgaaccaggcactgacatttgaaatgctttaagccttttcacattccttctttattccctccaaaaaaaaaagtcttgagtttaatttaggtctattttggctgagattagcatacctctgactcacaggatttaataaattatagtattattgaatacataggacatccctctaccccagcttactcttatctttttaatttaaaatagtattctgctaccaagaaggatgcaactgctagttttagatgtaaatagtgttatttactggactttgtgatattattttcttaactacactttactatggccctgttgaaaacagactatcaagttttttgtctctgttctgtcatctctcttaagccaggcacctttagagtgtttgcaatttgttcgaagtggttgaggatctcaggccctgctcacgtgaggtggagtgcaggggagctaccggtttccctgctgacctgctgaatgctaccttcccctcgagttgaatacaccttaaggaaaatgataacacgagggacgtgtaacttgttttgaagcattaaaaaccagcagctcttcactatgttccatattttaaccaaactactgtagactactaaacatagccaagccagaacattccttctggattaagcctaggccacttgaggggcagccaggggtgatggtgtcaggtgagaatcctgtgtcttgaaggagtggcctttacaggaagagtgcccatgttttcacctgcagcgttgccaccagagtgtgcaatacctcctgcacacaggctcagggtaaactgctccaaagctgggttttgtgttgcatacaaagtcaataaaatagttgctaatcctgaatggcagccagtgatgtgaaggtactattaaagtgaacaaaaactagattgcaacagttttctttccttgcttgaagtataacacacgctccatttgatcctgcctgaaagaagctaacattatatttgtgacagacagaggctccatcaagccaagcaacaattaacagctcaagtgtaagatttataaatgcccgtgtactcacccttcaattgttaccacccagaggttacaggactctttcccagcatttaggggaacaggcttttagagtatttagaagaccaggctataatcagtaatgtgcctgggagcaggaaatagctcccaatttatttatggccttgggaaaactcaatccggtgtctccttgtagctcagaacactaatagcccccctggaagagagtggcacattgagctccaaacccaatcaacatacatccacttggctgcagatctgactgctgggtcatgaaggccgtgaaatgatgtttgccctcaagtcactagatattttaagaagccctatttttctccctttttgcaggagtagagagatgaaagaggacagaccattgaaaacttttagatgcaggagaattgagacttccacaagggagagaaacacagcctccccagaatccattatgccatcgggttgtggcactctcacccttgccataataccgtttcctaacaatatcaaatcagtggatgaaatacaagctcagaaacaggaacattttcctaaatcataacctaatagcaaacaaaaattgaaaaaacaattattctgaagctcattattcttagatctgtagatatatatgtgttgactcccacaggatggcaccaagtaaagatcttaagagcatagtaggggttctgagaccgactgtcacccgtggatcctgatggggaagaacagaggcttcactgtagctatagttttccaccaagtcaatcaaattaaaacatgactcattgtcccctccaaagattcataaaattcttgagctaaagtgatcttctgaagaaaagccacctaacaatgttaggaggctcataaagctcatttctcttttccctggtatgcacaaatatcaagcctataaaaaagtaattatttccccaaacctgtaaccactgcattcgttttctttggaggaacattgtagcatttcaggagggtcgagagatctaaagagtttggtctgaatgtgtgtctgtacaattccctttggcattaaactctgaaacctacaatcaatggccttcaaattggtgttaaattgggagaacaccctactgctttctgagtctacgagcaacagaaagactggtcttagtgcaattaggcaggagggatttggactcagaaacagccacagaagtatttctcagcactcccagttcctgccaacttagctggaaacgatgccacagcgagaccagaaagaggagtcgccttaaggtatccctacaaagtcacctttctgataaaaaggagggaaaaaaaagttagatatctaaaataagcctagaatctcacacacagctgtgacttctaagtgaaactcttttctccctcatgtccttaaatagtcacagaatcacacacagcctgacttttaaagacaagcttggctacaggaaatgaaccaaccccaaagactcttctaacctgtctcctgactgggctccttcagaaagtgttctcctgttccatctgtagggctgcttactactggaacctaaaacaaaacctgttgtttgtaccatcactttttctggtgtttcctgtgcttttgtgattccaagtctgttcataagttctgaagataaattatgtgaaatcatattttggcatatgggggtggaggatgaattctttacagactttttaagatgatccatttgtaccacagaaaacattttggaagttgttatatatgagtatataaatttttcttttcatattttacattaaaataaagctttattcagtcattaa

SEQ ID NO: 14734 - DNA, 3868 bp, Homo sapiens
  source 1..3868: mol_type = unassigned DNA
cgctcctcccgcgcgcggcccctggagtccctgaggcgcgcggccagcccagctcgggcccgcagcaccgggagcagcccgccggccaagcgagcgcgggccggggccggggccggggcctgggggcgccgcccccgggagtctttctgcggcccctgaggagcgagggcgacggcgaggctgaccggggccgaaaccatgaaccgaagttttcacaagtctcagaccttgcgattctacgattgcagcgcagtggaagtcaagagcaagtttggggcggaattccgaaggttctctctggaccgtcataagcctgggaagtttgaagatttctacaagctggttgtgcacacccaccatatctccaacagtgatgtaactattggctatgcagatgtgcacggagacctgctgcccatcaacaatgatgacaacttctgcaaggcggtttctagtgcaaatcccctgctcagggtcttcatccagaaacgagaggaggccgagcgtggcagcctcggcgcgggctcgctgtgcaggcggaggcgggcgctgggcgcgctgcgtgatgaaggaccccggcggcgtgcacacctggacatcggcctcccgcgcgacttccgccccgtatcatccatcatcgatgtggacctggtccccgagacgcaccggcgagtgcggctgcaccggcacggctgcgagaagccgctgggcttctacatccgcgatggcgccagcgtgcgcgtgaccccgcacgggctggagaaggtgcccggcatcttcatctcgcgcatggtacccgggggcctggcggagagcaccgggctgctggctgtgaatgacgaggtcctggaggtgaacggcattgaggtggccgggaagacgctggaccaggtcacggacatgatgatcgccaacagccacaacctcatcgtcaccgtcaagcccgccaaccagcgcaacaacgtggtgcgcggcggccgcgcgttgggcagctcgggaccgccctcggacggcaccgcgggcttcgtgggtccccccgccccgcgcgtcctgcagaacttccaccccgacgaggcggagagcgatgaggacaacgacgtcgtcatcgagggcacactggagcctgcacgtcccccccagaccccgggcgcgcccgcaggcagcctctcccgggtcaatggcgcgggcctggcgcagcggctgcagcgggacctggccctggacggcggcctccagcggctgctcagctccctgcgggccgacccccgtcacagcctggcgctgccgccaggcggcgtggaggagcacgggcccgcggtcacgctctagactcccgagaggcccccaaatcctagctccagttccccggtaaggacagggacaggacctgcagactgcatccgctcattttttgttgtttttgtgaccacaaaaacaacgctgctctttgtttcaacttccggatataaaaacacaagtattgcctatttttatagaatttcgccacagaacttaaaatgaacgcctgtagagacactctataccaggcctgagtgcaggtcttggcgcctttgcaaagtgatagaaaagatctgaccaagtgcaaaaaaatgctttttaaaatttttacaaatactttgtttttaaagtgaagctttaaaattacttttttaaaatagtcaaattcatgtttttaagtaagttggcccatgcaacatatctcagcattcttgctgtgctctctgctgacttgcaggcgaggccgactgtgctgatgtacgtgacaagaggctggtttttaataacgaatgcagccaggtgcagtggctcacgtctgtaatcccagcactttgggaggcctacgtgggctgatcacgaggtcaggaggtcgagaccagcatggccaacatggtgaaaccctgtctctactaaaaatataaaaattagccaggtgtggtggcaggcgcctgtaatcccagctaccttgggaggctgaggcaggagaatcgcttgaacccgggaggcagaggttgcagtgagctgagatcgcaccactgcactccagcctgggtgacagagcaagactctgtctcgggaaaaaaaaaaaatacacccaaacctgtccatgtacaaccatggagatgaattccagattttcacactgttcatagtcataattcggttgggacaggagagctcccaccagcacacttatggcacccgcagctgtggaattgttccggggcttttttttgtttgttttgagacatagtgtcttgttctgtcatccaagctggagggatctcagctcactgcaacctccgcctcctgggttcaagcaattctcctgcctcagcctcccaaggagctgggacaggcacatgccaccatacccagctaatttttgtatttttagtagagatgggatttcaccacgttggtcaggctggtcttgaactcctgacctcaggtgatacggtcccccctcagcctccaaaaatgctaggattatagacgtgagccacagcaccagaccaggggctatttttgtgacccacataggtggcccattcagcctcaaggggaaatccagggtaggaagcagcagctctgctggactgggctcagcagtcccatttgggatgtaagcctctattgcctctaagatgacccttttcctgtgggttgactgactctgagggcgatttcggaaatgttttcagcagaaatgaaggataagcatcgcacatgtccagcaatgtctttgagaatgcagtcatttgcacgtgagttctcatctttgttttctgaaacagacgtttcttttagtaagtcacaatacatgctaattttcatttctagaatggtcactggcagttctcacttttaactataagaagtcacgtggaacttagtgatttttaacaaatactaaattcatcctcactttatgttgatcttccagcaacgtttatatatttagtaattttaaaaattcctatttgatacaattaaattttatataatgtgttttgcttgaataaaatgttacatttatactttgagaactctgaccaaatctttcatacagatacaggtaaagaaatatttttctaggttgtcggagctgcgtacctcccgctgcttctccttgtggtccagcaccacctgctggtcagtggcagaactgtcctgacttcgtgaacatggaactgctaagagggaaaactgcatctcagcattttcattttttctgaatattaagtgaaaagcaagttctatttttaagaaatagcttttgctgaggagttgtgaattcctgcacctgtgtttgatgttatttgtatgcaatggattgctggccctttgttcctaagcaagagaagaccaaagatgcttccccatgacctctccggtgaggatccgcaccccccggacttgctctctgatgaagggcatgtcgttcagtgccccagcagtcagaagcagtttttgtggaactaaaactaataatgttaccctcacaaaggaaatgttcttttactaagttattgctgattcttgaatgtctgttatataactgggtcggctatcaagaaggaaggttatatttcttatcacattttaagttgttaagcaaatgtgagtttttttttaagaaatgaggctttcactgagatttgtgtgctattcataattttaggaattactgcttagaacagctgcttgggtgtatttttctacacaggtctgtacttctgccactttctccttttaaaaaaacaaaactatgcatattatgtattaaagttttcttggttttatatatcagagaataaaaacttttttgacttttgagtaaacaaaa

SEQ ID NO: 14735 - DNA, 596 bp, Homo sapiens
  source 1..596: mol_type = unassigned DNA
atgaaccgaagttttcacaagtctcagaccttgcgattctacgattgcagcgcagtggaagtcaagagcaagtttggggcggaattccgaaggttctctctggaccgtcataagcctgggaagtttgaagatttctacaagctggttgtgcacacccaccatatctccaacagtgatgtaactattggctatgcagatgtgcacggagacctgctgcccatcaacaatgatgacaacttctgcaaggcggtttctagtgcaaatcccctgctcagggtcttcatccagaaacgagatgacggagccctgcgaccaggaacctgactcttcagctcaaatcttggtttgaaagggggacttctctgtgcccctgttgtcggcatgccatggtagagaatggatggcccacgcagctggcccctcatgagaccccagccatctcattccactgggagccacgtcaggacgaaggaggactgggaggggcgtctggctgcgtggtgtggggcctgcagtgttgtggcacacgcagcttcagccaaacatctagccctgtacctagaactaagaaataaaactataacatcagatttaaa

SEQ ID NO: 14736 - DNA, 522 bp, Homo sapiens
  source 1..522: mol_type = unassigned DNA
tttgaagatttctacaagctggttgtgcacacccaccatatctccaacagtgatgtaactattggctatgcagatgtgcacggagacctgctgcccatcaacaatgatgacaacttctgcaaggcggtttctagtgcaaatcccctgctcagggtcttcatccagaaacgaggtggtgaacactgaccacctcaaggaaccaagcagccagtggtgacagttgcaagatgacggagccctgcgaccaggaacctgactcttcagctcaaatcttggtttgaaagggggacttctctgtgcccctgttgtcggcatgccatggtagagaatggatggcccacgcagctggcccctcatgagaccccagccatctcattccactgggagccacgtcaggacgaaggaggactgggaggggcgtctggctgcgtggtgtggggcctgcagtgttgtggcacacgcagcttcagccaaacatctagccctgtacctagaactaagaaataaaactataacatcaga

SEQ ID NO: 14737 - DNA, 584 bp, Homo sapiens
  source 1..584: mol_type = unassigned DNA
ctttccatggcaacaccctgatggccgaaagttactacccttattccagaaatctctgcataatctgtcggtttgcatataattaacagtggctataaatgtgagtgcagccctgtcctgtcctcagctgctgccctgggcgcactgccttgcgggtcactgtggctgctcctgtgcttcagcgggactagaagctgccgcccacgggcagcggggaagaaatctgggcaaagccatgagccctccgaggctgagctccagtttaggggctcacctgccttgcatcgttccgagtcctgtactggactgcatcaggccgcgtctcctcaggaaatgggatcttggttcctggccagcacccggcctctctgcacctcatagacactgcaaatccttactcagtgacttcagggatacaggtttccagggtccttctctcggatggagcctgtccaactgcactctggggaagggagagaaacaggaaggcgtcgccttcacgctccggtcactcaggaaggtggctgtgcatgcctgagagcttgcaccggggtggaggtagccacggtcccgagacacgccct

SEQ ID NO: 14738 - DNA, 3333 bp, Homo sapiens
  source 1..3333: mol_type = unassigned DNA
tttccatggcaacaccctgatggccgaaagttactacccttattccagaaatctctgcataatctgtcggtttgcatataattaacagtggctataaatgtgagtgcagccctgtcctgtcctcagctgctgccctgggcgcactgccttgcgggtcactgtggctgctcctgtgcttcagcgggactagaagctgccgcccacgggcagcggggaagaaatctgggcaaagccatgagccctccgaggctgagctccagtttaggggctcacctgccttgcatcgttccgagtcctgtactggactgcatcaggccgcgtctcctcaggaaatgggatcttggttcctggccagcacccggcctctctgcacctcatagacactgcaaatccttactcagtgacttcagggatacagtatccgtaacaagaggggaaattgaagtctggtcctatgaagctctcacggttacaagttttcaaactaaagattttctaagaaatattttcttacaaataaccccttctgttacataagggcttgacctgatttattaaaactatcctgactctctggcgaggaagggtgggaactgctgaaggtgcctcttccaaaggtttccagggtccttctctcggatggagcctgtccaactgcactctggggaagggagagaaacaggaaggcgtcgccttcacgctccggtcactcaggaaggtggctgtgcatgcctgagagcttgcaccggggtggaggtagccacggtcccgagacacgccctctgcccacacctccctaccagcctggccagacgcctggggtgcccagtcgtcttcatggtggcagctgcagaagtaatgacaactcatgggcatttggagaacgcaccaggcccacgctcaacattgcatttgattcctgcgagcgctcaacaagggaagcaccagacagatgctgaaatttaggcatggcagcactgctttgcctcccttggcagcacagggctgcagaaggactcagaattgcggggaaccctctgcctcaaggcgctccaccaggacacagacaccccctcagcggcccctctgctttttcttcagaatctgatacatctggcctggacgggagatggtgccctcgggcgccagagtgtggggtcctcttcacagccactcccaccccaattcctgatcttccgagtttcctggctcacagtgttccttgttctcaaaccgctcgcttcactgcttccgattcaacttcattacctaaagtgagagatacagcttctttctttccctctcaggatcaatgactcggttttaggtcaccatggagaggggattcagagctcacgcatccgccacacttgatttcaggagatgagtggctgcgagtcaccctgctgtgagccgccatggtcccctggtgaattgcccaggccaaacgccatggcctcacctgctcacgggcaaagcagctgccagcttaaatggtaagaaattagtaaaggaaggaaggaaggagggaagaagccggaagggagagcacgtctccgtccctcgatgacggcatcaggacacaccacgtcggagacttcagctgccagatgagcacggcctattagggcctcgtccggtccccgcttatccaagggtggttaagaccaaattccttccccataattaaacagcatgtagacacatacaaaaataccgcagaagaactacaccactgggtcaaaacacatgccagaacaatatttcattttaaaagacaacataaatgtcaacatttaaaaagcctgccacataaggtgaaaaacaaaacctgttgtgtactgactagtctcagaactccttggcagttttatcttttccagaaaactctgtcttcaaaccccaagacctgtctccttgtggcatcctccacaggcttggtctacagcatgcatcctcaggggattcttccaggcttacctggccacgatccccagcacagaacagctcaagatcaccgtctacccccatctgccagagcaaatctattttccaccaagagcaggactgtcggctgtcagtcaccaaggacacccaggttgatagttggaggcgaccagcacattctgatgaagtaggtgatggtgcctgccccaggacctgtgtgcactgcaacaggcagcctgcagggcgtgtgccagaggccagggcctgagcaacagacacagcgctgcccagtgggccctgcacccttgcagtgaggggcagcctcaaccaacgaaaacaccacacactaagtcctagtttccatctaagaagtgttttctggaactttaagcaacattttatttccacagatgtggggaaaagggaaccctatggtgcataattattaacttactttagggtcctgtttctggactcagtggactcaagtgtagccaggtccaatctgtgcacttgcctctggaatgttctgccaacaccctttccccagttttgctggggaaggctgcaggcaaggagaggaggctattcctggccctgacccaggaggagagacgggaaaggaatgagcagacttgagcttaaattttcattggaagtatttaagaaacacctcatgttggtcctggttctctattatttctctctattaaaaataccaccccaagtaatctgtactcactatagaaaaactggaagtaaaagtaataattaaaaaaatccctgaagccataactcactcttctattactatagtcagcatttgctgtgcctcgtccaacaagctggggtcgcctcaggaaagaagactctaccgtgcccactgccctccctccaagtcctcctcctgtggcgtccctcgtcgggtagtgctgccttttgggaagtcactctgggtgggggtctccaccctcctgggaagtctccggaacagaaagcaggagacaccggcgcatccaggccccatccctccccgaattcacgggcagccagcagggggcgccacagcagcgcagcaacaggcacccggttgccggcatcaccggcccacgctcgttccctgtgcattttgtttaaaatttttgagagaaaatttacataacataaaattaaccattttaaagtgtacaactcagtagctttagcgtgttcacaatagagtggaaccattaccgctaattacagcacatttccatcaccctaaaagaaaaagtccgtttctcccaatgccttcctctcctcagccccacacccattaatctactttctgtctctgtggattttcctgccctggacacttcatataaatggaatcttacaacacgt

SEQ ID NO: 14739 - DNA, 647 bp, Homo sapiens
  source 1..647: mol_type = unassigned DNA
agtggctataaatgtgagtgcagccctgtcctgtcctcagctgctgccctgggcgcactgccttgcgggtcactgtggctgctcctgtgcttcagcgggactagaagctgccgcccacgggcagcggggaagaaatctgggcaaagccatgagccctccgaggctgagctccagtttaggggctcacctgccttgcatcgttccgagtcctgtactggactgcatcaggccgcgtctcctcagggtggtacctctaaatccaaaaactccaaatgtccaccagctccagtcacattggagatacagctgtggtttgctcctaagacccacccagcacacgtgagatggggagacctggattgcatccccatgtctgtcccagtggagatatcattggaaaagctgcagtgatctctataaaaatctcaaccacccgctcccagtaggttcagtgctgcactctaagaggagaacaggtctgactcctcaaggagatgcctctggtccaggctttgtaaacttgggccttccagccagattcctccgagctcagtgtccgctgctgctgggctgaggggaaccccactccttcaccaccgactcctgctcctggctgcacctgcccttccaacagtgtctcctctcaa

SEQ ID NO: 14740 - DNA, 1058 bp, Homo sapiens
  source 1..1058: mol_type = unassigned DNA
agctgctgccctgggcgcactgccttgcgggtcactgtggctgctcctgtgcttcagcgggactagaagctgccgcccacgggcagcggggaagaaatctgggcaaagccatgagccctccgaggctgagctccagtttaggggctcacctgccttgcatcgttccgagtcctgtactggactgcatcaggccgcgtctcctcaggaaaggaaaggggatgcccctgaggagactcggtgctccccacagaactccccagcgatcccagatgggagaagctgagctgcgcgggcgctgccctcactccgggggtgaaacgtggctgtgatttccacaggtgacagaaaccaggcagtgattcaactcgtatttgactttcacattctccagcaatgttcttcaatctgggaagggtagaaaattaaagaaaggtaaggagagttaaaaaatgagatcatttcaaagtagatgcagtcttgaagcccaaatgaattacgagatccagtttgaaagctgctgcagaagtgatttcagaatcgcgcggtggctccggaatggggaactgctgctgaaagaggtcggaaagggtggggactgaatttcgggtaagaggacgccagtggttctggagcacgcggccttcagccatgcctgcgttcacaagtacattatttcagactcactccaagtttacatctctaagcccatccaagccatggcagcgcgaacctctccctcccccagctcaaggcctctgggcccccaggacagaggacagaagagccagcccctcctggctcagggttgccgggaccccgtgatggctgctgtgcctctcctgaggtgccaggtgagagctgagacttctgctcccgctgcaccagctccgtttgtctccaggcgcagtgtcagtctcgttctttaagcgcttctgaggtcccatcagcacaggtctcgtcttacctggaaaggcttgttgccttgtgcctgggactttttattctgtgcttttcttctggatattaaatttcatatccacgcttgcttgtcactcaga

SEQ ID NO: 14741 - DNA, 525 bp, Homo sapiens
  source 1..525: mol_type = unassigned DNA
agctgctgccctgggcgcactgccttgcgggtcactgtggctgctcctgtgcttcagcgggactagaagctgccgcccacgggcagcggggaagaaatctgggcaaagccatgagccctccgaggctgagctccagtttaggggctcacctgccttgcatcgttccgagtcctgtactggactgcatcaggccgcgtctcctcaggtatccgtaacaagaggggaaattgaagtctggtcctatgaagctctcacggttacaagttttcaaactaaagattttctaagaaatattttcttacaaataaccccttctgttacataagggcttgacctgatttattaaaactatcctgactctctggcgaggaagggtgggaactgctgaaggtgcctcttccaaaggtttccagggtccttctctcggatggagcctgtccaactgcactctggggaagggagagaaacaggaaggcgtcgccttcacgctccggtcactcaggaaggtggctgtgcatgcctgag

SEQ ID NO: 14742 - DNA, 4308 bp, Homo sapiens
  source 1..4308: mol_type = unassigned DNA
ctcgggcggctgggatggagcagaagagcgcggagcaccggagggcacgcagctgacggagctgcgctgcgttcgcctcgtttgcctcgcgccctccactggagctgttcgcgcctcccggctcccaccgcagcccacccggcagaggagtcgctaccagcgcccagtgcgctctgtcagtccgcaaactccttgccgcccgccccgggctgggcaccaaataccaggctaccatggtctacaagactctcttcgctctttgcatcttaactgcaggcagcatcgccgccattaccgtgacagtcattgccgtggtgctgctggtgtttggagttgcagcctacctaaaaatcaggcattcctcctatggaagacttttggacgaccatgactacgggtcctggggaaactacaacaaccctctgtacgatgactcctaacaatggaatatggcctgggatgaggattaactgttctttatttataagtgcttatccagtagaattaataagtacctgatgcgcattgaacgacaatcttaagccctgttttgttggtatggttgtttttgttttcctccctctcctctggctgctacaacttcccctttctggtacaagaagaaccattctttaaaggtgagtggaggctgatttgcagctgaagtgggccagccttgcaccagccaggccagaccaccatggtgaaggcttctttccccactgcaggacccactttgagaaggaccgaggaggaggatttgggttgttttgttaggggttactttcaggggaacatttcatttgtgttatttcttaaacttctatttaggaaattacattaagtattaatgaggggaaaggaaatgagctctacgaggatttcaccctgcatgggagagagcagggttttctcagattcctttttaatctctatttatctggttgtttctgacaggatgctgcctgcttggctctacaagctggaaagcagcttcttagctgcctaattaatgaaagatgaaaataggaagtgccctggagggggccagcaggtcacggggcagaatctctcaggttgctgtgggatctcagtgtgcccctacctgttctcccctccaggccacctgtctctgtaaaggatgtctgctctgttcaaaaggcagctgggatcccagcccacaagtgatcagcagagttgcatttccaaagaaaaaggctatgagatgagctgagttatagagagaaagggagaggcatgtacggtgtggggaagtggaagagaagctggcgggggagaaggaggctaacctgcactgagtacttcattaggacaagtgagaatcagctattgataatggccagagatatccacagcttggaggagcccagagaccgtttgctttatacccacacagcaactggtccactgctttactgtctgttggataatggctgtaaaatgtttaaaaacaaaacaaaacaaaaaagaggcactagtctatctgcaattactcaacgaggcattttcataggaaacagactatgattaatccatttattcttcccacacacttaccttactaagtctttgctttaataaatgagcaaccctgggtatagtcttaaaattctgcacaataaattttgagaaagaattgttcctctttgtaggtatctgtgtattgcaatcattctcaaccaggaggtgattttgccccctgactccaccccagggacattcaaaaatgtctggtgacagttttcattgtcatgacttgggggtgctactagaagccaggaatgctgccaaacattctaccatgcacagcacaacctacaacagcaaagaatcatccaccccaaaatatcagtagtgccgagattgagaaaccctgatttatcacaatgcccactgtgacagaacaagacactcacagattagtgatacgttttatttttaacaaaatgaaatgatgtgttaagtttttatttccaaagtgtttagtttattggctgatgggttgttcttggtatgcatggtgacctttttatttctgtgtgcttcctagagagctttatttcatggcgacaactctgtcttcttgtaacagctgatattagcaagcagcatcttatgtcctgatttcatatagtagaaaacaaacattgggtccgacttcaaaatgtgttgtattgtcctacagtgtcataaagaacctgaaaatgaacttttgtttctaaagttggaccttgctgccatgactgtttagtttacagaaacttgaccccggctcatcctgtctctggctgtggcccggcaaagcactgaaaacccctctggtctcagagacagtaggggcagtgccactttctacaacctgccaacccacacactggagtaattctgaaaaaaattattcctaaactctctaagtgtggacggagaatgagcaagccccagaagtattttacaaccagagtgggtaatgaggagggggcttactggaatcgtcatatctctgaatattgaaaacaacaactaaaaaagtggaccttctcagaaaaaaagggcagcaaatgaccaagggcgccccttctggccgtgcttggcttgagtaactgtctctctttccccacccccatcacagggctttcagtttggcaaaggaaaagcagataaaaacagaacattccatatgtttctttctccatcggccaaaaacattttgacacaatgtttgtgaaacacctttggagaggtgcacttctgaatgctgcctctgccgtaaatcctggggcaagggatcagcctcttcccaggaaccatcgccttctataaaccgtgaactcaagcaggcattttttttttcttaccgaaaggctgctattgtgcaagggcacataatgggtctgttgctcttattggcttccaaatgtgcatggcaaagagagagatgtgggcctagagcagatatattcagcaaggtgacagcttcccataacaattctaacacttcttatcttatgtgagaataaaatatttaagggttgaaccttattttgccaaatgtatcttttctgcttttgaattgggcagaagattttagcaactatattctacaaatgttacttataacacacacacacacatctgaaatatatgccgaaaattgacgtctttgacctcagggagagcacctgtccaggtctgcctaaaggaaatggctccagtgggtctaaacaaccacatcctatccatggataggtctagtcataacactttagagagaatgtcagagcaggagggaggcaagccgcctcttctcggccatcgactgcagatgatgaaagagcgggattcaactttgttttcttttcctgtggccccagtgaaacctcctgccctccctgcacgtctgtgtcttcatttctaaaatgggggtgatgctttcatattgacctcaccccatactacctcacagatgtgttgtgaggattaataaaattatgtctatggtattttcagtttctggagaaaaatacttatagacagtttaactattacatagatatataagtgatctcagtttcttgtttgctgtgatactaatgtgttgttttaacttattccataaaatgacagttgtgtcctagccacatcagacagctatctaagctctggactacccctttgtgcagctgaatcactgcagggttgaccatgcctggtgccacagccatggtttccatttctagatgaaaggatggcctaggacataggtctcaaagactcttggatcagaatcaggagattagggaaaacaggatggatacctgagcactaacagcagtagacgtagacctctgtcctttaccatctgaggtcttctggattctttgtggggttaattttgatttgatgtcatctgtttgcccttcatcttgcttgcaagtgtgcatggttcaatccctcacatccaggaaatgaattttgcaattgggccagatgctaatttgcacgttgattcaccttctttgcctttaagccttttttttcttttttttttttttggcaaatgaatgtaccatttcaactttgattttaatagtgctagttgatattggtaataatgctaaccaagagatcaatgccagatttttctcttggggtaagttagctgaagtcatttaaagatggaaaggtgggaaaattctttgatatttgatgtcattgtatccacatttgttgtaagacatattgcataccaattataattatatcaattaaagttgataaaagcttcca

SEQ ID NO: 14743 - DNA, 5011 bp, Homo sapiens
  source 1..5011: mol_type = unassigned DNA
agaagagcgcggagcaccggagggcacgcagctgacggagctgcgctgcgttcgcctcgtttgcctcgcgccctccactggagctgttcgcgcctcccggctcccaccgcagcccacccggcagaggagtcgctaccagcgcccagtgcgctctgtcagtccgcaaactccttgccgcccgccccgggctgggcaccaaataccaggctaccatggtctacaagactctcttcgctctttgcatcttaactgcaggatggagggtacagagtctgcctacatcagctcctttgtctgtttctcttccgacaaacattgtaccaccgaccaccatctggactagctctccacaaaacactgatgcagacactgcctccccatccaacggcactcacaacaactcggtgctcccagttacagcatcagccccaacatctctgcttcctaagaacatttccatagagtccagagaagaggagatcaccagcccaggttcgaattgggaaggcacaaacacagacccctcaccttctgggttctcgtcaacaagcggtggagtccacttaacaaccacgttggaggaacacagctcgggcactcctgaagcaggcgtggcagctacactgtcgcagtccgctgctgagcctcccacactcatctcccctcaagctccagcctcatcaccctcatccctatcaacctcaccacctgaggtcttttctgcctccgttactaccaaccatagctccactgtgaccagcacccaacccactggagctccaactgcaccagagtccccgacagaggagtccagctctgaccacacacccacttcacatgccacagctgagccagtaccccaggagaaaacacccccaacaactgtgtcaggcaaagtgatgtgtgagctcatagacatggagaccaccaccacctttcccagggtgatcatgcaggaagtagaacatgcattaagttcaggcagcatcgccgccattaccgtgacagtcattgccgtggtgctgctggtgtttggagttgcagcctacctaaaaatcaggcattcctcctatggaagacttttggacgaccatgactacgggtcctggggaaactacaacaaccctctgtacgatgactcctaacaatggaatatggcctgggatgaggattaactgttctttatttataagtgcttatccagtagaattaataagtacctgatgcgcattgaacgacaatcttaagccctgttttgttggtatggttgtttttgttttcctccctctcctctggctgctacaacttcccctttctggtacaagaagaaccattctttaaaggtgagtggaggctgatttgcagctgaagtgggccagccttgcaccagccaggccagaccaccatggtgaaggcttctttccccactgcaggacccactttgagaaggaccgaggaggaggatttgggttgttttgttaggggttactttcaggggaacatttcatttgtgttatttcttaaacttctatttaggaaattacattaagtattaatgaggggaaaggaaatgagctctacgaggatttcaccctgcatgggagagagcagggttttctcagattcctttttaatctctatttatctggttgtttctgacaggatgctgcctgcttggctctacaagctggaaagcagcttcttagctgcctaattaatgaaagatgaaaataggaagtgccctggagggggccagcaggtcacggggcagaatctctcaggttgctgtgggatctcagtgtgcccctacctgttctcccctccaggccacctgtctctgtaaaggatgtctgctctgttcaaaaggcagctgggatcccagcccacaagtgatcagcagagttgcatttccaaagaaaaaggctatgagatgagctgagttatagagagaaagggagaggcatgtacggtgtggggaagtggaagagaagctggcgggggagaaggaggctaacctgcactgagtacttcattaggacaagtgagaatcagctattgataatggccagagatatccacagcttggaggagcccagagaccgtttgctttatacccacacagcaactggtccactgctttactgtctgttggataatggctgtaaaatgtttaaaaacaaaacaaaacaaaaaagaggcactagtctatctgcaattactcaacgaggcattttcataggaaacagactatgattaatccatttattcttcccacacacttaccttactaagtctttgctttaataaatgagcaaccctgggtatagtcttaaaattctgcacaataaattttgagaaagaattgttcctctttgtaggtatctgtgtattgcaatcattctcaaccaggaggtgattttgccccctgactccaccccagggacattcaaaaatgtctggtgacagttttcattgtcatgacttgggggtgctactagaagccaggaatgctgccaaacattctaccatgcacagcacaacctacaacagcaaagaatcatccaccccaaaatatcagtagtgccgagattgagaaaccctgatttatcacaatgcccactgtgacagaacaagacactcacagattagtgatacgttttatttttaacaaaatgaaatgatgtgttaagtttttatttccaaagtgtttagtttattggctgatgggttgttcttggtatgcatggtgacctttttatttctgtgtgcttcctagagagctttatttcatggcgacaactctgtcttcttgtaacagctgatattagcaagcagcatcttatgtcctgatttcatatagtagaaaacaaacattgggtccgacttcaaaatgtgttgtattgtcctacagtgtcataaagaacctgaaaatgaacttttgtttctaaagttggaccttgctgccatgactgtttagtttacagaaacttgaccccggctcatcctgtctctggctgtggcccggcaaagcactgaaaacccctctggtctcagagacagtaggggcagtgccactttctacaacctgccaacccacacactggagtaattctgaaaaaaattattcctaaactctctaagtgtggacggagaatgagcaagccccagaagtattttacaaccagagtgggtaatgaggagggggcttactggaatcgtcatatctctgaatattgaaaacaacaactaaaaaagtggaccttctcagaaaaaaagggcagcaaatgaccaagggcgccccttctggccgtgcttggcttgagtaactgtctctctttccccacccccatcacagggctttcagtttggcaaaggaaaagcagataaaaacagaacattccatatgtttctttctccatcggccaaaaacattttgacacaatgtttgtgaaacacctttggagaggtgcacttctgaatgctgcctctgccgtaaatcctggggcaagggatcagcctcttcccaggaaccatcgccttctataaaccgtgaactcaagcaggcattttttttttcttaccgaaaggctgctattgtgcaagggcacataatgggtctgttgctcttattggcttccaaatgtgcatggcaaagagagagatgtgggcctagagcagatatattcagcaaggtgacagcttcccataacaattctaacacttcttatcttatgtgagaataaaatatttaagggttgaaccttattttgccaaatgtatcttttctgcttttgaattgggcagaagattttagcaactatattctacaaatgttacttataacacacacacacacatctgaaatatatgccgaaaattgacgtctttgacctcagggagagcacctgtccaggtctgcctaaaggaaatggctccagtgggtctaaacaaccacatcctatccatggataggtctagtcataacactttagagagaatgtcagagcaggagggaggcaagccgcctcttctcggccatcgactgcagatgatgaaagagcgggattcaactttgttttcttttcctgtggccccagtgaaacctcctgccctccctgcacgtctgtgtcttcatttctaaaatgggggtgatgctttcatattgacctcaccccatactacctcacagatgtgttgtgaggattaataaaattatgtctatggtattttcagtttctggagaaaaatacttatagacagtttaactattacatagatatataagtgatctcagtttcttgtttgctgtgatactaatgtgttgttttaacttattccataaaatgacagttgtgtcctagccacatcagacagctatctaagctctggactacccctttgtgcagctgaatcactgcagggttgaccatgcctggtgccacagccatggtttccatttctagatgaaaggatggcctaggacataggtctcaaagactcttggatcagaatcaggagattagggaaaacaggatggatacctgagcactaacagcagtagacgtagacctctgtcctttaccatctgaggtcttctggattctttgtggggttaattttgatttgatgtcatctgtttgcccttcatcttgcttgcaagtgtgcatggttcaatccctcacatccaggaaatgaattttgcaattgggccagatgctaatttgcacgttgattcaccttctttgcctttaagccttttttttcttttttttttttttggcaaatgaatgtaccatttcaactttgattttaatagtgctagttgatattggtaataatgctaaccaagagatcaatgccagatttttctcttggggtaagttagctgaagtcatttaaagatggaaaggtgggaaaattctttgatatttgatgtcattgtatccacatttgttgtaagacatattgcataccaattataattatatcaattaaagttgataaaagcttc

SEQ ID NO: 14744 - DNA, 4863 bp, Homo sapiens
  source 1..4863: mol_type = unassigned DNA
ctcacttccgcccaggtgaggcagggccgacaccgagcccgcccgacccgggctcccacctgctcctccagcgcaccaggtgtctttaagagtgattgaagagaataattcaaaatgcctgaaaatcctgctacagataaactgcaggtgctgcaggtacttgatcgcctgaaaatgaaattgcaggagaagggtgacacgtcgcagaatgagaagttatctatgttttatgagacactaaagagtcctctcttcaaccagatactcacacttcagcagtccatcaagcaactgaagggtcaactcaaccatataccctcagattgttcagccaactttgatttttctaggaaaggtttgttagtgttcacagatggttccatcactaatggaaatgtccacaggccctctaataactcgactgtatctgggttatttccgtggaccccgaagttgggaaatgaagactttaactcagtcattcaacagatggctcagggccggcaaattgaatatatagatatagaacggccttcaactggaggccttggattcagtgtggtggccctcagaagtcaaaatctcggaaaagttgatatcttcgtgaaggatgtccagccagggagtgtagcagacagggatcaaagattaaaggaaaatgatcaaatattggccattaatcacacgccattggatcagaacatttcccatcagcaagcaattgcattattacaacaaaccactggatctttgagactgattgtggccagggaaccagtccacacaaaaagcagtacttctagcagcctaaatgatacaactctgcctgaaacagtttgttggggccatgttgaagaggttgagctcattaatgatggctctggactaggttttggaatagttggaggaaaaacaagtggcgtggttgtgaggactatagttcctggaggattagcagatcgagatggaagactccagacaggggaccacatcttgaagattggtggcacaaacgtgcagggaatgaccagtgagcaagttgcacaagttctaaggaactgtgggaattcagtcaggatgctcgttgctagagatccagctggtgacatttcagtcaccccccctgcccctgcagccttacctgttgccctgcctactgtagccagcaagggccctggttctgacagttctctttttgaaacttataatgttgagcttgtgagaaaagatgggcagagtcttggaattagaattgttggctatgttggaacatctcatacaggggaagcttcagggatttatgtgaaaagtataatacctggcagtgctgcgtaccacaatggccacattcaagtgaatgacaaaatagttgctgtcgatggcgtgaacattcagggttttgccaaccatgatgttgttgaagtattacgaaatgcagggcaggtggtacacctaaccctagttcgaaggaagacatcctcatctacttctccacttgaaccaccttcagacagaggaactgttgtagaaccactgaaaccaccagctctctttctaactggagcagtggaaactgaaactaatgtggatggtgaagatgaggaaattaaagaaagaattgatactttaaaaaatgacaacatacaagccttagaaaaattggaaaaagtcccagactctccagaaaatgagctgaaatccagatgggaaaacctgttgggtcctgattatgaagtaatggttgctactttggacacacagattgcagatgatgctgagttacagaaatattcaaagctgctgcctattcacactctgaggcttggtgtggaagtggattcctttgatgggcaccattatatttcttcaattgtttctggtggtcctgttgatacattgggtctcctacagccagaagatgagctgcttgaggtcaatggcatgcagctttatggaaaatctcgccgagaagcagtctcctttcttaaagaagtgccacccccttttactttggtttgctgtcggaggttgtttgatgatgaagcttctgtagatgaaccaaggcgcactgaaacctctcttcctgagacagaggttgaccacaatatggatgtcaatactgaagaagatgatgatggggaattagcactgtggtcccctgaagtcaagattgttgaactagtaaaagattgtaaaggtttgggattcagcattttggattaccaggaccctttagatcctacaagatcagtgattgtgatccgctccctggtagcagatggtgtagcagaaagaagtgggggactattacctggagaccgcctggtctcagtcaatgaatactgtttggacaacacctcacttgctgaagctgtggaaatattgaaagctgtgccaccaggcctagtacaccttggcatctgtaagcctttggtggaagataatgaagaagaaagttgttatattttacattcaagcagtaatgaagacaagactgaattttcaggaacaattcatgatataaattcatctttaatactcgaagcacccaagggatttagagatgaaccatattttaaagaagaacttgtggatgaaccatttctagatctgggaaagtctttccattcccaacaaaaagagatagagcaaagcaaggaggcctgggagatgcatgaatttctgactcctagattgcaggaaatggatgaagaaagagaaattcttgttgatgaagaatatgagttatatcaagatccctcaccatccatggagttgtatcccttgtcgcacattcaagaggccactcctgtgccctctgtgaatgaacttcactttggtacacagtggttgcatgataatgaaccatccgagtctcaagaggcaagaaccgggaggactgtctattcccaggaggcacagccgtatggctattgccctgaaaatgtgatgaaagaaaattttgtcatggagtccctaccatctgtaccatcaactgaaggaaacagtcaacaaggcagatttgacgacctggaaaatcttaattcattagcaaaaactagtctggatttaggcatgatcccgaatgatgtccaaggtcctagcttgctcattgaccttcctgttgtggctcaaaggagggagcaagaagatttgcctttatatcaacaccaagcgacacgagttatttccaaggcctcagcatacacaggaatgttgtcttctagatatgccactgatacatgtgagttacctgagagagaagaaggcgaaggagaagaaactccaaattttagccactggggtccaccgagaattgttgagatttttagagaacccaatgtgtctcttgggatcagtattgttggtggacaaactgttataaaacgtctaaagaatggagaggagcttaaaggtatattcatcaaacaagttttagaagacagtccagcagggaagacgaacgcacttaaaactggagataaaatacttgaggtgtctggagtagatttgcagaatgcctcacacagcgaagcagttgaggccattaagaatgcaggaaaccctgtggtgttcattgttcagagtttgtcatccactccacgagtcattcctaacgtacataacaaggccaacaaaatcaccggtaaccagaaccaggacacccaagaaaagaaagaaaagaggcaaggaactgctccaccgccaatgaaacttcctcctccttataaagctctgactgatgacagtgatgaaaatgaagaagaagatgcctttaccgaccaaaaaatcagacaaagatatgcagatctgcctggagaactgcacattattgaacttgaaaaagataagaatggacttggactcagccttgctggtaataaagaccgatcacgcatgagcatatttgtggtgggaattaacccggaaggacctgctgccgcagatggacgaatgcgtattggagatgaactcttagagataaacaatcagattctgtatggaagaagtcaccaaaatgcatctgccattattaagactgccccatcaaaggtcaagctggttttcatcagaaacgaggatgcagtcaatcagatggccgttactccctttccagtgccatcaagttctccatcttctattgaggatcagagcggcaccgaacctattagtagtgaggaagatggcagcgtcgaagttggtattaaacaattgcctgaaagtgaaagcttcaaactggctgtcagccagatgaaacagcaaaaatatccaacaaaagtctccttcagttcacaagagataccattagcaccagcttcatcataccattcaacagatgcagacttcacaggctatggtggtttccaggctcctctgtcagtggaccccgcaacgtgtcccattgtccctggacaggaaatgattatagaaatatccaagggacgttcagggcttggtctcagcattgtgggaggaaaagacacacccttgttctggaggctgggaagtccaagagcatggagccagcatctggtgagggccttcatgctgcatcatcctgtgacagaagttgaagggcaaaatgctatagttatccatgaagtctatgaagaaggggcagcagccagagatggaagactttgggctggtgaccagatattagaggttaatggggttgacctgaggaactccagccacgaagaagccatcacagccctgaggcagaccccccagaaggtgcggctggtggtgtatagagatgaggcacactaccgggatgaggagaacttggagattttccctgtggatctgcagaagaaagctggccggggcctgggcctgagcatcgttgggaaacggtaa

SEQ ID NO: 14745 - DNA, 5349 bp, Homo sapiens
  source 1..5349: mol_type = unassigned DNA
ctcacttccgcccaggtgaggcagggccgacaccgagcccgcccgacccgggctcccacctgctcctccagcgcaccaggtgtctttaagagtgattgaagagaataattcaaaatgcctgaaaatcctgctacagataaactgcaggtgctgcaggtacttgatcgcctgaaaatgaaattgcaggagaagggtgacacgtcgcagaatgagaagttatctatgttttatgagacactaaagagtcctctcttcaaccagatactcacacttcagcagtccatcaagcaactgaagggtcaactcaaccatataccctcagattgttcagccaactttgatttttctaggaaaggtttgttagtgttcacagatggttccatcactaatggaaatgtccacaggccctctaataactcgactgtatctgggttatttccgtggaccccgaagttgggaaatgaagactttaactcagtcattcaacagatggctcagggccggcaaattgaatatatagatatagaacggccttcaactggaggccttggattcagtgtggtggccctcagaagtcaaaatctcggaaaagttgatatcttcgtgaaggatgtccagccagggagtgtagcagacagggatcaaagattaaaggaaaatgatcaaatattggccattaatcacacgccattggatcagaacatttcccatcagcaagcaattgcattattacaacaaaccactggatctttgagactgattgtggccagggaaccagtccacacaaaaagcagtacttctagcagcctaaatgatacaactctgcctgaaacagtttgttggggccatgttgaagaggttgagctcattaatgatggctctggactaggttttggaatagttggaggaaaaacaagtggcgtggttgtgaggactatagttcctggaggattagcagatcgagatggaagactccagacaggggaccacatcttgaagattggtggcacaaacgtgcagggaatgaccagtgagcaagttgcacaagttctaaggaactgtgggaattcagtcaggatgctcgttgctagagatccagctggtgacatttcagtcaccccccctgcccctgcagccttacctgttgccctgcctactgtagccagcaagggccctggttctgacagttctctttttgaaacttataatgttgagcttgtgagaaaagatgggcagagtcttggaattagaattgttggctatgttggaacatctcatacaggggaagcttcagggatttatgtgaaaagtataatacctggcagtgctgcgtaccacaatggccacattcaagtgaatgacaaaatagttgctgtcgatggcgtgaacattcagggttttgccaaccatgatgttgttgaagtattacgaaatgcagggcaggtggtacacctaaccctagttcgaaggaagacatcctcatctacttctccacttgaaccaccttcagacagaggaactgttgtagaaccactgaaaccaccagctctctttctaactggagcagtggaaactgaaactaatgtggatggtgaagatgaggaaattaaagaaagaattgatactttaaaaaatgacaacatacaagccttagaaaaattggaaaaagtcccagactctccagaaaatgagctgaaatccagatgggaaaacctgttgggtcctgattatgaagtaatggttgctactttggacacacagattgcagatgatgctgagttacagaaatattcaaagctgctgcctattcacactctgaggcttggtgtggaagtggattcctttgatgggcaccattatatttcttcaattgtttctggtggtcctgttgatacattgggtctcctacagccagaagatgagctgcttgaggtcaatggcatgcagctttatggaaaatctcgccgagaagcagtctcctttcttaaagaagtgccacccccttttactttggtttgctgtcggaggttgtttgatgatgaagcttctgtagatgaaccaaggcgcactgaaacctctcttcctgagacagaggttgaccacaatatggatgtcaatactgaagaagatgatgatggggaattagcactgtggtcccctgaagtcaagattgttgaactagtaaaagattgtaaaggtttgggattcagcattttggattaccaggaccctttagatcctacaagatcagtgattgtgatccgctccctggtagcagatggtgtagcagaaagaagtgggggactattacctggagaccgcctggtctcagtcaatgaatactgtttggacaacacctcacttgctgaagctgtggaaatattgaaagctgtgccaccaggcctagtacaccttggcatctgtaagcctttggtggaagataatgaagaagaaagttgttatattttacattcaagcagtaatgaagacaagactgaattttcaggaacaattcatgatataaattcatctttaatactcgaagcacccaagggatttagagatgaaccatattttaaagaagaacttgtggatgaaccatttctagatctgggaaagtctttccattcccaacaaaaagagatagagcaaagcaaggaggcctgggagatgcatgaatttctgactcctagattgcaggaaatggatgaagaaagagaaattcttgttgatgaagaatatgagttatatcaagatccctcaccatccatggagttgtatcccttgtcgcacattcaagaggccactcctgtgccctctgtgaatgaacttcactttggtacacagtggttgcatgataatgaaccatccgagtctcaagaggcaagaaccgggaggactgtctattcccaggaggcacagccgtatggctattgccctgaaaatgtgatgaaagaaaattttgtcatggagtccctaccatctgtaccatcaactgaaggaaacagtcaacaaggcagatttgacgacctggaaaatcttaattcattagcaaaaactagtctggatttaggcatgatcccgaatgatgtccaaggtcctagcttgctcattgaccttcctgttgtggctcaaaggagggagcaagaagatttgcctttatatcaacaccaagcgacacgagttatttccaaggcctcagcatacacaggaatgttgtcttctagatatgccactgatacatgtgagttacctgagagagaagaaggcgaaggagaagaaactccaaattttagccactggggtccaccgagaattgttgagatttttagagaacccaatgtgtctcttgggatcagtattgttggtggacaaactgttataaaacgtctaaagaatggagaggagcttaaaggtatattcatcaaacaagttttagaagacagtccagcagggaagacgaacgcacttaaaactggagataaaatacttgaggtgtctggagtagatttgcagaatgcctcacacagcgaagcagttgaggccattaagaatgcaggaaaccctgtggtgttcattgttcagagtttgtcatccactccacgagtcattcctaacgtacataacaaggccaacaaaatcaccggtaaccagaaccaggacacccaagaaaagaaagaaaagaggcaaggaactgctccaccgccaatgaaacttcctcctccttataaagctctgactgatgacagtgatgaaaatgaagaagaagatgcctttaccgaccaaaaaatcagacaaagatatgcagatctgcctggagaactgcacattattgaacttgaaaaagataagaatggacttggactcagccttgctggtaataaagaccgatcacgcatgagcatatttgtggtgggaattaacccggaaggacctgctgccgcagatggacgaatgcgtattggagatgaactcttagagataaacaatcagattctgtatggaagaagtcaccaaaatgcatctgccattattaagactgccccatcaaaggtcaagctggttttcatcagaaacgaggatgcagtcaatcagatggccgttactccctttccagtgccatcaagttctccatcttctattgaggatcagagcggcaccgaacctattagtagtgaggaagatggcagcgtcgaagttggtattaaacaattgcctgaaagtgaaagcttcaaactggctgtcagccagatgaaacagcaaaaatatccaacaaaagtctccttcagttcacaagagataccattagcaccagcttcatcataccattcaacagatgcagacttcacaggctatggtggtttccaggctcctctgtcagtggaccccgcaacgtgtcccattgtccctggacaggaaatgattatagaaatatccaagggacgttcagggcttggtctcagcattgtgggaggaaaagacacacccttggttaatggggttgacctgaggaactccagccacgaagaagccatcacagccctgaggcagaccccccagaaggtgcggctggtggtgtatagagatgaggcacactaccgggatgaggagaacttggagattttccctgtggatctgcagaagaaagctggccggggcctgggcctgagcatcgttgggaaacggtaaagacgtgctgtgggagttgggatctgcctttttcatccagagctctgatgcctgtgaacactgaaagagaaagcctaatgtaaagtagtgatgggatttctaaaaataagatatttatgaaaatttgacaacatgggtcatatttctgagcaaggtcttaccagaaaaattgtcatatcaagatagaactccaagtccaatcaatccagactgatatatttctgtacagagtaagaacaactagcaaggttctttcacttggaattactaagatcggagttttgcagaggttgattaaagcaaccatacccaagaaatagctagcatcaagaatgagatttatccaatgttgggtcaagaacattgcttcgacatggaaattaacatggaacattgcttttcgtgatactgttaatttcatactatgttgaaactagttgagtagacatagttaagagataaacataattcttcacgatagtagttttctattaagaaaaatgtcctgctgggcacagtggcatgtacctgttgtctcagctatgtgggaagatcacttgaggccaggagttcaaggctatagtgtgctatgatcatgcctgtgaatagccactgcacttgagcctcttgggaaacataacaagaccccatctgtaaatt

SEQ ID NO: 14746 - DNA, 5448 bp, Homo sapiens
  source 1..5448: mol_type = unassigned DNA
ctcacttccgcccaggtgaggcagggccgacaccgagcccgcccgacccgggctcccacctgctcctccagcgcaccaggtgtctttaagagtgattgaagagaataattcaaaatgcctgaaaatcctgctacagataaactgcaggtgctgcaggtacttgatcgcctgaaaatgaaattgcaggagaagggtgacacgtcgcagaatgagaagttatctatgttttatgagacactaaagagtcctctcttcaaccagatactcacacttcagcagtccatcaagcaactgaagggtcaactcaaccatataccctcagattgttcagccaactttgatttttctaggaaaggtttgttagtgttcacagatggttccatcactaatggaaatgtccacaggccctctaataactcgactgtatctgggttatttccgtggaccccgaagttgggaaatgaagactttaactcagtcattcaacagatggctcagggccggcaaattgaatatatagatatagaacggccttcaactggaggccttggattcagtgtggtggccctcagaagtcaaaatctcggaaaagttgatatcttcgtgaaggatgtccagccagggagtgtagcagacagggatcaaagattaaaggaaaatgatcaaatattggccattaatcacacgccattggatcagaacatttcccatcagcaagcaattgcattattacaacaaaccactggatctttgagactgattgtggccagggaaccagtccacacaaaaagcagtacttctagcagcctaaatgatacaactctgcctgaaacagtttgttggggccatgttgaagaggttgagctcattaatgatggctctggactaggttttggaatagttggaggaaaaacaagtggcgtggttgtgaggactatagttcctggaggattagcagatcgagatggaagactccagacaggggaccacatcttgaagattggtggcacaaacgtgcagggaatgaccagtgagcaagttgcacaagttctaaggaactgtgggaattcagtcaggatgctcgttgctagagatccagctggtgacatttcagtcaccccccctgcccctgcagccttacctgttgccctgcctactgtagccagcaagggccctggttctgacagttctctttttgaaacttataatgttgagcttgtgagaaaagatgggcagagtcttggaattagaattgttggctatgttggaacatctcatacaggggaagcttcagggatttatgtgaaaagtataatacctggcagtgctgcgtaccacaatggccacattcaagtgaatgacaaaatagttgctgtcgatggcgtgaacattcagggttttgccaaccatgatgttgttgaagtattacgaaatgcagggcaggtggtacacctaaccctagttcgaaggaagacatcctcatctacttctccacttgaaccaccttcagacagaggaactgttgtagaaccactgaaaccaccagctctctttctaactggagcagtggaaactgaaactaatgtggatggtgaagatgaggaaattaaagaaagaattgatactttaaaaaatgacaacatacaagccttagaaaaattggaaaaagtcccagactctccagaaaatgagctgaaatccagatgggaaaacctgttgggtcctgattatgaagtaatggttgctactttggacacacagattgcagatgatgctgagttacagaaatattcaaagctgctgcctattcacactctgaggcttggtgtggaagtggattcctttgatgggcaccattatatttcttcaattgtttctggtggtcctgttgatacattgggtctcctacagccagaagatgagctgcttgaggtcaatggcatgcagctttatggaaaatctcgccgagaagcagtctcctttcttaaagaagtgccacccccttttactttggtttgctgtcggaggttgtttgatgatgaagcttctgtagatgaaccaaggcgcactgaaacctctcttcctgagacagaggttgaccacaatatggatgtcaatactgaagaagatgatgatggggaattagcactgtggtcccctgaagtcaagattgttgaactagtaaaagattgtaaaggtttgggattcagcattttggattaccaggaccctttagatcctacaagatcagtgattgtgatccgctccctggtagcagatggtgtagcagaaagaagtgggggactattacctggagaccgcctggtctcagtcaatgaatactgtttggacaacacctcacttgctgaagctgtggaaatattgaaagctgtgccaccaggcctagtacaccttggcatctgtaagcctttggtggaagataatgaagaagaaagttgttatattttacattcaagcagtaatgaagacaagactgaattttcaggaacaattcatgatataaattcatctttaatactcgaagcacccaagggatttagagatgaaccatattttaaagaagaacttgtggatgaaccatttctagatctgggaaagtctttccattcccaacaaaaagagatagagcaaagcaaggaggcctgggagatgcatgaatttctgactcctagattgcaggaaatggatgaagaaagagaaattcttgttgatgaagaatatgagttatatcaagatccctcaccatccatggagttgtatcccttgtcgcacattcaagaggccactcctgtgccctctgtgaatgaacttcactttggtacacagtggttgcatgataatgaaccatccgagtctcaagaggcaagaaccgggaggactgtctattcccaggaggcacagccgtatggctattgccctgaaaatgtgatgaaagaaaattttgtcatggagtccctaccatctgtaccatcaactgaaggaaacagtcaacaaggcagatttgacgacctggaaaatcttaattcattagcaaaaactagtctggatttaggcatgatcccgaatgatgtccaaggtcctagcttgctcattgaccttcctgttgtggctcaaaggagggagcaagaagatttgcctttatatcaacaccaagcgacacgagttatttccaaggcctcagcatacacaggaatgttgtcttctagatatgccactgatacatgtgagttacctgagagagaagaaggcgaaggagaagaaactccaaattttagccactggggtccaccgagaattgttgagatttttagagaacccaatgtgtctcttgggatcagtattgttggtggacaaactgttataaaacgtctaaagaatggagaggagcttaaaggtatattcatcaaacaagttttagaagacagtccagcagggaagacgaacgcacttaaaactggagataaaatacttgaggtgtctggagtagatttgcagaatgcctcacacagcgaagcagttgaggccattaagaatgcaggaaaccctgtggtgttcattgttcagagtttgtcatccactccacgagtcattcctaacgtacataacaaggccaacaaaatcaccggtaaccagaaccaggacacccaagaaaagaaagaaaagaggcaaggaactgctccaccgccaatgaaacttcctcctccttataaagctctgactgatgacagtgatgaaaatgaagaagaagatgcctttaccgaccaaaaaatcagacaaagatatgcagatctgcctggagaactgcacattattgaacttgaaaaagataagaatggacttggactcagccttgctggtaataaagaccgatcacgcatgagcatatttgtggtgggaattaacccggaaggacctgctgccgcagatggacgaatgcgtattggagatgaactcttagagataaacaatcagattctgtatggaagaagtcaccaaaatgcatctgccattattaagactgccccatcaaaggtcaagctggttttcatcagaaacgaggatgcagtcaatcagatggccgttactccctttccagtgccatcaagttctccatcttctattgaggatcagagcggcaccgaacctattagtagtgaggaagatggcagcgtcgaagttggtattaaacaattgcctgaaagtgaaagcttcaaactggctgtcagccagatgaaacagcaaaaatatccaacaaaagtctccttcagttcacaagagataccattagcaccagcttcatcataccattcaacagatgcagacttcacaggctatggtggtttccaggctcctctgtcagtggaccccgcaacgtgtcccattgtccctggacaggaaatgattatagaaatatccaagggacgttcagggcttggtctcagcattgtgggaggaaaagacacacccttgaatgctatagttatccatgaagtctatgaagaaggggcagcagccagagatggaagactttgggctggtgaccagatattagaggttaatggggttgacctgaggaactccagccacgaagaagccatcacagccctgaggcagaccccccagaaggtgcggctggtggtgtatagagatgaggcacactaccgggatgaggagaacttggagattttccctgtggatctgcagaagaaagctggccggggcctgggcctgagcatcgttgggaaacggtaaagacgtgctgtgggagttgggatctgcctttttcatccagagctctgatgcctgtgaacactgaaagagaaagcctaatgtaaagtagtgatgggatttctaaaaataagatatttatgaaaatttgacaacatgggtcatatttctgagcaaggtcttaccagaaaaattgtcatatcaagatagaactccaagtccaatcaatccagactgatatatttctgtacagagtaagaacaactagcaaggttctttcacttggaattactaagatcggagttttgcagaggttgattaaagcaaccatacccaagaaatagctagcatcaagaatgagatttatccaatgttgggtcaagaacattgcttcgacatggaaattaacatggaacattgcttttcgtgatactgttaatttcatactatgttgaaactagttgagtagacatagttaagagataaacataattcttcacgatagtagttttctattaagaaaaatgtcctgctgggcacagtggcatgtacctgttgtctcagctatgtgggaagatcacttgaggccaggagttcaaggctatagtgtgctatgatcatgcctgtgaatagccactgcacttgagcctcttgggaaacataacaagaccccatctgtaaattaaaaaaaaaaaaaag

SEQ ID NO: 14747 - DNA, 8505 bp, Homo sapiens
  source 1..8505: mol_type = unassigned DNA
ctcacttccgcccaggtgaggcagggccgacaccgagcccgcccgacccgggctcccacctgctcctccagcgcaccaggtgtctttaagagtgattgaagagaataattcaaaatgcctgaaaatcctgctacagataaactgcaggtgctgcaggtacttgatcgcctgaaaatgaaattgcaggagaagggtgacacgtcgcagaatgagaagttatctatgttttatgagacactaaagagtcctctcttcaaccagatactcacacttcagcagtccatcaagcaactgaagggtcaactcaaccatataccctcagattgttcagccaactttgatttttctaggaaaggtttgttagtgttcacagatggttccatcactaatggaaatgtccacaggccctctaataactcgactgtatctgggttatttccgtggaccccgaagttgggaaatgaagactttaactcagtcattcaacagatggctcagggccggcaaattgaatatatagatatagaacggccttcaactggaggccttggattcagtgtggtggccctcagaagtcaaaatctcggaaaagttgatatcttcgtgaaggatgtccagccagggagtgtagcagacagggatcaaagattaaaggaaaatgatcaaatattggccattaatcacacgccattggatcagaacatttcccatcagcaagcaattgcattattacaacaaaccactggatctttgagactgattgtggccagggaaccagtccacacaaaaagcagtacttctagcagcctaaatgatacaactctgcctgaaacagtttgttggggccatgttgaagaggttgagctcattaatgatggctctggactaggttttggaatagttggaggaaaaacaagtggcgtggttgtgaggactatagttcctggaggattagcagatcgagatggaagactccagacaggggaccacatcttgaagattggtggcacaaacgtgcagggaatgaccagtgagcaagttgcacaagttctaaggaactgtgggaattcagtcaggatgctcgttgctagagatccagctggtgacatttcagtcaccccccctgcccctgcagccttacctgttgccctgcctactgtagccagcaagggccctggttctgacagttctctttttgaaacttataatgttgagcttgtgagaaaagatgggcagagtcttggaattagaattgttggctatgttggaacatctcatacaggggaagcttcagggatttatgtgaaaagtataatacctggcagtgctgcgtaccacaatggccacattcaagtgaatgacaaaatagttgctgtcgatggcgtgaacattcagggttttgccaaccatgatgttgttgaagtattacgaaatgcagggcaggtggtacacctaaccctagttcgaaggaagacatcctcatctacttctccacttgaaccaccttcagacagaggaactgttgtagaaccactgaaaccaccagctctctttctaactggagcagtggaaactgaaactaatgtggatggtgaagatgaggaaattaaagaaagaattgatactttaaaaaatgacaacatacaagccttagaaaaattggaaaaagtcccagactctccagaaaatgagctgaaatccagatgggaaaacctgttgggtcctgattatgaagtaatggttgctactttggacacacagattgcagatgatgctgagttacagaaatattcaaagctgctgcctattcacactctgaggcttggtgtggaagtggattcctttgatgggcaccattatatttcttcaattgtttctggtggtcctgttgatacattgggtctcctacagccagaagatgagctgcttgaggtcaatggcatgcagctttatggaaaatctcgccgagaagcagtctcctttcttaaagaagtgccacccccttttactttggtttgctgtcggaggttgtttgatgatgaagcttctgtagatgaaccaaggcgcactgaaacctctcttcctgagacagaggttgaccacaatatggatgtcaatactgaagaagatgatgatggggaattagcactgtggtcccctgaagtcaagattgttgaactagtaaaagattgtaaaggtttgggattcagcattttggattaccaggaccctttagatcctacaagatcagtgattgtgatccgctccctggtagcagatggtgtagcagaaagaagtgggggactattacctggagaccgcctggtctcagtcaatgaatactgtttggacaacacctcacttgctgaagctgtggaaatattgaaagctgtgccaccaggcctagtacaccttggcatctgtaagcctttggtggaagataatgaagaagaaagttgttatattttacattcaagcagtaatgaagacaagactgaattttcaggaacaattcatgatataaattcatctttaatactcgaagcacccaagggatttagagatgaaccatattttaaagaagaacttgtggatgaaccatttctagatctgggaaagtctttccattcccaacaaaaagagatagagcaaagcaaggaggcctgggagatgcatgaatttctgactcctagattgcaggaaatggatgaagaaagagaaattcttgttgatgaagaatatgagttatatcaagatccctcaccatccatggagttgtatcccttgtcgcacattcaagaggccactcctgtgccctctgtgaatgaacttcactttggtacacagtggttgcatgataatgaaccatccgagtctcaagaggcaagaaccgggaggactgtctattcccaggaggcacagccgtatggctattgccctgaaaatgtgatgaaagaaaattttgtcatggagtccctaccatctgtaccatcaactgaaggaaacagtcaacaaggcagatttgacgacctggaaaatcttaattcattagcaaaaactagtctggatttaggcatgatcccgaatgatgtccaaggtcctagcttgctcattgaccttcctgttgtggctcaaaggagggagcaagaagatttgcctttatatcaacaccaagcgacacgagttatttccaaggcctcagcatacacaggaatgttgtcttctagatatgccactgatacatgtgagttacctgagagagaagaaggcgaaggagaagaaactccaaattttagccactggggtccaccgagaattgttgagatttttagagaacccaatgtgtctcttgggatcagtattgttggtggacaaactgttataaaacgtctaaagaatggagaggagcttaaaggtatattcatcaaacaagttttagaagacagtccagcagggaagacgaacgcacttaaaactggagataaaatacttgaggtgtctggagtagatttgcagaatgcctcacacagcgaagcagttgaggccattaagaatgcaggaaaccctgtggtgttcattgttcagagtttgtcatccactccacgagtcattcctaacgtacataacaaggccaacaaaatcaccggtaaccagaaccaggacacccaagaaaagaaagaaaagaggcaaggaactgctccaccgccaatgaaacttcctcctccttataaagctctgactgatgacagtgatgaaaatgaagaagaagatgcctttaccgaccaaaaaatcagacaaagatatgcagatctgcctggagaactgcacattattgaacttgaaaaagataagaatggacttggactcagccttgctggtaataaagaccgatcacgcatgagcatatttgtggtgggaattaacccggaaggacctgctgccgcagatggacgaatgcgtattggagatgaactcttagagataaacaatcagattctgtatggaagaagtcaccaaaatgcatctgccattattaagactgccccatcaaaggtcaagctggttttcatcagaaacgaggatgcagtcaatcagatggccgttactccctttccagtgccatcaagttctccatcttctattgaggatcagagcggcaccgaacctattagtagtgaggaagatggcagcgtcgaagttggtattaaacaattgcctgaaagtgaaagcttcaaactggctgtcagccagatgaaacagcaaaaatatccaacaaaagtctccttcagttcacaagagataccattagcaccagcttcatcataccattcaacagatgcagacttcacaggctatggtggtttccaggctcctctgtcagtggaccccgcaacgtgtcccattgtccctggacaggaaatgattatagaaatatccaagggacgttcagggcttggtctcagcattgtgggaggaaaagacacacccttgaatgctatagttatccatgaagtctatgaagaaggggcagcagccagagatggaagactttgggctggtgaccagatattagaggttaatggggttgacctgaggaactccagccacgaagaagccatcacagccctgaggcagaccccccagaaggtgcggctggtggtgtatagagatgaggcacactaccgggatgaggagaacttggagattttccctgtggatctgcagaagaaagctggccggggcctgggcctgagcatcgttgggaaacgaaatggaagcggagtgtttatttctgacatcgtgaaaggcggagccgcagacctggatgggagattgattcagggagatcagatcttatctgtgaatggggaggacatgagaaatgcctcacaggagacagtggccaccatcctcaagtgtgcacagggacttgtgcagctagagattggaagactccgagctggttcctggacctccgcaaggacgacatcacagaacagtcagggtagtcagcagagtgcacacagcagctgtcatccctccttcgctcctgtcatcactggcctgcaaaacctggttggcacaaaaagagtttcagatccttcccagaaaaattcaggcacagatatggaaccaaggactgttgagataaacagggagctcagtgatgcccttggaatcagtattgctggaggaagaggaagtcccttaggagatatccccgtatttattgccatgattcaggctagcggagtggccgcacggacacagaagcttaaagttggagatcggattgtcagcattaacgggcaacctttggatgggctgtctcacgcggatgtggttaatctgctgaagaacgcctacgggcgcattatcctgcaggttgtagcagataccaatataagcgccatagcagctcagcttgaaaacatgtctacaggctaccaccttggttcgcccactgctgaacaccatccagaagacacagaggagcagctgcagatgacggccgattaaaacgaggggatcagattttagctgttaatggcgagaccctggaaggtgttactcatgagcaagcagtcgccattctaaaacaccagagagggactgtaaccttaactgtgctgtcatgagcctcgggcctgatcacaagatagatgttgttgtttagaatatccacaggcagatgaagttctgagtgggtatgaaaagcaccctcaactaaaatgcaccttcattcttatttcttgccctctctgctcaggagaaatggctgaggtttcatgtgaatttcccaaatcaacaatcatctcctaatgtttcccagttcctgtcacctgttggcgaggttgatttctaaaacttaaatgagtctacctgttttgcatttaatttcagtgttccgatttctttttttttttttttttttttttttgagacggagtctcactctgtcacccaggctggagtgcaatggcgcaatcttggctcactgcaacctcggcctcccaggttggagcgattctcctgcctcagcctcccgagtagctgggattacaggcatgcatcaccacactgggtttatttttgtttttttagtagagatggagcttccccatgtgggccaggctggtcttgaacttctgacctcaggtgatctgcctgccttggcctcccaaagtgctgggattccaggcgtgagccactgcgcccagcccagtattctgattttaaccaactggttctgattatatttaccaaaactggagttaacttctctttccttatactcttctctccctatcccctactcacaccgaggcttaacagcaacctcagatctcatccaatggacagaaacaaatgttaagcaacttgtcatctcactcatgatttacttatgctaattgtctcttcaagtaagcaagaaaacattagcagtgtaattaatttaccagtgatccccaagatgaaataccagattctcctatgggaaattactgtgctgtcttctgtatgacttatggtcaaataagtctcaaattcatttctctggatagatctttatatgctagtcattggtgattttgatgagtcaatttacagactgtaatcttctaaaaattctgaaagactaattgttttctgtgccatataaatgcataccactgagcaaatgaaccttattctcagcaggaacaactagcatacatgttctgaattctaacagtgctaaattacattcaagtccaggaagatcacctggaattaatggcatttcagttggcaggcatcattcccacccctcggtcttaggaaaaggaggtagaagccccagaaccacacggcagagatcagcaagttttgtctcaagtcagacaaggtctaggtggccttggccttatgcaaagtgggtgacatatttgattatatttccctttacctccatagtagtcaggccagcagcatggactgcaagaacctaagggagcaacatacttagctgcaaagtgagcaaatgaattgagcctaggaatatgtgatgaaaatgcatggctgatgtttcctgatctccaaggagactcccatttgctgaagttttgcatgctaagaaatcaactacagcagaaaatacaagaatacctttaagttgattattggcaatcttattcatatattagcaagaaaaagggagagatgcttactggtggatgctatagagtcctctgtttttaaaagtaccatggccgggtgcagtggctcacgcctgtaatcccagcactttgggaggccagggcaggcgaatcatgaggtcaggagttcgagaccagcctggccaatatggtgaaaccctgtctctactaaaaatacaaaaattagctgggtgcagtggcaggcgcctgtaatcccagctactccggaggttgaagcaggaaaattgcttgaacctgggaggtggaggttgcagtgagccaagttcgtgccactccactccagcctgggtgacagagcaagactctgtctcgaaaaagaaaaaaaaccatgaaggatgagtactagagtcagtaatagaagtagttcagcattatttaactacaacacaatgctgcaaatatttcacagtaattatcaaaatttaatgggctctaatttaaaatgttatttaataagtatagattttaattgagaattatctttgagtagatgtaatcacaaagtgcattaactcttgttggaatattttatggctattccaaagtatagagtgcctaaattttgtgttgaaaatgtctttcatgacggtattaagttttctgaaattacacatggcttttaaaatttctaatgtatccaagatgtgcaatgttgttaggatctcattcttcagtgcatgaaaagctactaccctcagaacattttgtgttaattgtacctgcaagaacacctcaggcaagccaagaagaaatgaaacccaaataaaacttgaaaatgcaccttaaaaatatatatacatataatagttttgaaatgggattctgctttattttgatggaatggccattaaatacacattttgagataatacattgttgtggtgtttctttatacattatccttttaggtcgtgctagtaaaagtatattgatgaaggaattatgatgctttatacttcttactgcactaaattgatagaactagtacttgtcataatcggttctgtctccgctcacatgactaatacgtaattgcctttccaaaaagatatttttgcctcagaacttactgacaagctgagaggctatgaagatggaaatttgtgaaagaagtagtgctcttatatttggcctcatcatttgggccatttcagtatagtaatgatatcactaatcggaattagcatgagagggaagtaagccaggaagaataaaactgctgaatgtttgtatgtgtaagatatttccaaagattctaaataaatgtagttgcctacagagcaaa

SEQ ID NO: 14748 - DNA, 5242 bp, Homo sapiens
  source 1..5242: mol_type = unassigned DNA
cagcgcaccaggtgtctttaagagtgattgaagagaataattcaaaatgcctgaaaatcctgctacagataaactgcaggtgctgcaggtacttgatcgcctgaaaatgaaattgcaggagaagggtgacacgtcgcagaatgagaagttatctatgttttatgagacactaaagagtcctctcttcaaccagatactcacacttcagcagtccatcaagcaactgaagggtcaactcaaccatataccctcagattgttcagccaactttgatttttctaggaaaggtttgttagtgttcacagatggttccatcactaatggaaatgtccacaggccctctaataactcgactgtatctgggttatttccgtggaccccgaagttgggaaatgaagactttaactcagtcattcaacagatggctcagggccggcaaattgaatatatagatatagaacggccttcaactggaggccttggattcagtgtggtggccctcagaagtcaaaatctcggaaaagttgatatcttcgtgaaggatgtccagccagggagtgtagcagacagggatcaaagattaaaggaaaatgatcaaatattggccattaatcacacgccattggatcagaacatttcccatcagcaagcaattgcattattacaacaaaccactggatctttgagactgattgtggccagggaaccagtccacacaaaaagcagtacttctagcagcctaaatgatacaactctgcctgaaacagtttgttggggccatgttgaagaggttgagctcattaatgatggctctggactaggttttggaatagttggaggaaaaacaagtggcgtggttgtgaggactatagttcctggaggattagcagatcgagatggaagactccagacaggggaccacatcttgaagattggtggcacaaacgtgcagggaatgaccagtgagcaagttgcacaagttctaaggaactgtgggaattcagtcaggatgctcgttgctagagatccagctggtgacatttcagtcaccccccctgcccctgcagccttacctgttgccctgcctactgtagccagcaagggccctggttctgacagttctctttttgaaacttataatgttgagcttgtgagaaaagatgggcagagtcttggaattagaattgttggctatgttggaacatctcatacaggggaagcttcagggatttatgtgaaaagtataatacctggcagtgctgcgtaccacaatggccacattcaagtgaatgacaaaatagttgctgtcgatggcgtgaacattcagggttttgccaaccatgatgttgttgaagtattacgaaatgcagggcaggtggtacacctaaccctagttcgaaggaagacatcctcatctacttctccacttgaaccaccttcagacagaggaactgttgtagaaccactgaaaccaccagctctctttctaactggagcagtggaaactgaaactaatgtggatggtgaagatgaggaaattaaagaaagaattgatactttaaaaaatgacaacatacaagccttagaaaaattggaaaaagtcccagactctccagaaaatgagctgaaatccagatgggaaaacctgttgggtcctgattatgaagtaatggttgctactttggacacacagattgcagatgatgctgagttacagaaatattcaaagctgctgcctattcacactctgaggcttggtgtggaagtggattcctttgatgggcaccattatatttcttcaattgtttctggtggtcctgttgatacattgggtctcctacagccagaagatgagctgcttgaggtcaatggcatgcagctttatggaaaatctcgccgagaagcagtctcctttcttaaagaagtgccacccccttttactttggtttgctgtcggaggttgtttgatgatgaagcttctgtagatgaaccaaggcgcactgaaacctctcttcctgagacagagaactcattgaagtataagaggttgaccacaatatggatgtcaatactgaagaagatgatgatggggaattagcactgtggtcccctgaagtcaagattgttgaactagtaaaagattgtaaaggtttgggattcagcattttggattaccaggaccctttagatcctacaagatcagtgattgtgatccgctccctggtagcagatggtgtagcagaaagaagtgggggactattacctggagaccgcctggtctcagtcaatgaatactgtttggacaacacctcacttgctgaagctgtggaaatattgaaagctgtgccaccaggcctagtacaccttggcatctgtaagcctttggtggaagataatgaagaagaaagttgttatattttacattcaagcagtaatgaagacaagactgaattttcaggaacaattcatgatataaattcatctttaatactcgaagcacccaagggatttagagatgaaccatattttaaagaagaacttgtggatgaaccatttctagatctgggaaagtctttccattcccaacaaaaagagatagagcaaagcaaggaggcctgggagatgcatgaatttctgactcctagattgcaggaaatggatgaagaaagagaaattcttgttgatgaagaatatgagttatatcaagatccctcaccatccatggagttgtatcccttgtcgcacattcaagaggccactcctgtgccctctgtgaatgaacttcactttggtacacagtggttgcatgataatgaaccatccgagtctcaagaggcaagaaccgggaggactgtctattcccaggaggcacagccgtatggctattgccctgaaaatgtgatgaaagaaaattttgtcatggagtccctaccatctgtaccatcaactgaaggaaacagtcaacaaggcagatttgacgacctggaaaatcttaattcattagcaaaaactagtctggatttaggcatgatcccgaatgatgtccaaggtcctagcttgctcattgaccttcctgttgtggctcaaaggagggagcaagaagatttgcctttatatcaacaccaagcgacacgagttatttccaaggcctcagcatacacaggaatgttgtcttctagatatgccactgatacatgtgagttacctgagagagaagaaggcgaaggagaagaaactccaaattttagccactggggtccaccgagaattgttgagatttttagagaacccaatgtgtctcttgggatcagtattgttggtggacaaactgttataaaacgtctaaagaatggagaggagcttaaaggtatattcatcaaacaagttttagaagacagtccagcagggaagacgaacgcacttaaaactggagataaaatacttgaggtgtctggagtagatttgcagaatgcctcacacagcgaagcagttgaggccattaagaatgcaggaaaccctgtggtgttcattgttcagagtttgtcatccactccacgagtcattcctaacgtacataacaaggccaacaaaatcaccggtaaccagaaccaggacacccaagaaaagaaagaaaagaggcaaggaactgctccaccgccaatgaaacttcctcctccttataaagctctgactgatgacagtgatgaaaatgaagaagaagatgcctttaccgaccaaaaaatcagacaaagatatgcagatctgcctggagaactgcacattattgaacttgaaaaagataagaatggacttggactcagccttgctggtaataaagaccgatcacgcatgagcatatttgtggtgggaattaacccggaaggacctgctgccgcagatggacgaatgcgtattggagatgaactcttagagataaacaatcagattctgtatggaagaagtcaccaaaatgcatctgccattattaagactgccccatcaaaggtcaagctggttttcatcagaaacgaggatgcagtcaatcagatggccgttactccctttccagtgccatcaagttctccatcttctattgaggatcagagcggcaccgaacctattagtagtgaggaagatggcagcgtcgaagttggtattaaacaattgcctgaaagtgaaagcttcaaactggctgtcagccagatgaaacagcaaaaatatccaacaaaagtctccttcagttcacaagagataccattagcaccagcttcatcataccattcaacagatgcagacttcacaggctatggtggtttccaggctcctctgtcagtggaccccgcaacgtgtcccattgtccctggacaggaaatgattatagaaatatccaagggacgttcagggcttggtctcagcattgtgggaggaaaagacacacccttgaatgctatagttatccatgaagtctatgaagaaggggcagcagccagagatggaagactttgggctggtgaccagatattagaggttaatggggttgacctgaggaactccagccacgaagaagccatcacagccctgaggcagaccccccagaaggtgcggctggtggtgtatagagatgaggcacactaccgggatgaggagaacttggagattttccctgtggatctgcagaagaaagctggccggggcctgggcctgagcatcgttgggaaacggtaaagacgtgctgtgggagttgggatctgcctttttcatccagagctctgatgcctgtgaacactgaaagagaaagcctaatgtaaagtagtgatgggatttctaaaaataagatatttatgaaaatttgacaacatgggtcatatttctgagcaaggtcttaccagaaaaattgtcatatcaagatagaactccaagtccaatcaatccagactgatatatttctgtacagagtaagaacaactagcaaggttctttcacttggaattactaagatcggagttttgcagaggttgattaaagcaaccatacccaagaaatagctagcatcaagaatgagatttatccaatgttgggtcaagaacattgcttcgacatggaaattaacatggaacattgcttttcgtgatactgttaatttcatactatgttgaaactagttgagtagacatagttaagagataaacataattcttcacgatagtagttttctattaagaaaaatgtcctgctgggcaca

SEQ ID NO: 14749 - DNA, 4990 bp, Homo sapiens
  source 1..4990: mol_type = unassigned DNA
gattatgaagtaatggttgctactttggacacacagattgcagatgatgctgagttacagaaatattcaaagctgctgcctattcacactctgaggcttggtgtggaagtggattcctttgatgggcaccattatatttcttcaattgtttctggtggtcctgttgatacattgggtctcctacagccagaagatgagctgcttgaggtcaatggcatgcagctttatggaaaatctcgccgagaagcagtctcctttcttaaagaagtgccacccccttttactttggtttgctgtcggaggttgtttgatgatgaagcttctgtagatgaaccaaggcgcactgaaacctctcttcctgagacagaggttgaccacaatatggatgtcaatactgaagaagatgatgatggggaattagcactgtggtcccctgaagtcaagattgttgaactagtaaaagattgtaaaggtttgggattcagcattttggattaccaggaccctttagatcctacaagatcagtgattgtgatccgctccctggtagcagatggtgtagcagaaagaagtgggggactattacctggagaccgcctggtctcagtcaatgaatactgtttggacaacacctcacttgctgaagctgtggaaatattgaaagctgtgccaccaggcctagtacaccttggcatctgtaagcctttggtggaagataatgaagaagaaagttgttatattttacattcaagcagtaatgaagacaagactgaattttcaggaacaattcatgatataaattcatctttaatactcgaagcacccaagggatttagagatgaaccatattttaaagaagaacttgtggatgaaccatttctagatctgggaaagtctttccattcccaacaaaaagagatagagcaaagcaaggaggcctgggagatgcatgaatttctgactcctagattgcaggaaatggatgaagaaagagaaattcttgttgatgaagaatatgagttatatcaagatccctcaccatccatggagttgtatcccttgtcgcacattcaagaggccactcctgtgccctctgtgaatgaacttcactttggtacacagtggttgcatgataatgaaccatccgagtctcaagaggcaagaaccgggaggactgtctattcccaggaggcacagccgtatggctattgccctgaaaatgtgatgaaagaaaattttgtcatggagtccctaccatctgtaccatcaactgaaggaaacagtcaacaaggcagatttgacgacctggaaaatcttaattcattagcaaaaactagtctggatttaggcatgatcccgaatgatgtccaaggtcctagcttgctcattgaccttcctgttgtggctcaaaggagggagcaagaagatttgcctttatatcaacaccaagcgacacgagttatttccaaggcctcagcatacacaggaatgttgtcttctagatatgccactgatacatgtgagttacctgagagagaagaaggcgaaggagaagaaactccaaattttagccactggggtccaccgagaattgttgagatttttagagaacccaatgtgtctcttgggatcagtattgttggtggacaaactgttataaaacgtctaaagaatggagaggagcttaaaggtatattcatcaaacaagttttagaagacagtccagcagggaagacgaacgcacttaaaactggagataaaatacttgaggtgtctggagtagatttgcagaatgcctcacacagcgaagcagttgaggccattaagaatgcaggaaaccctgtggtgttcattgttcagagtttgtcatccactccacgagtcattcctaacgtacataacaaggccaacaaaatcaccggtaaccagaaccaggacacccaagaaaagaaagaaaagaggcaaggaactgctccaccgccaatgaaacttcctcctccttataaagctctgactgatgacagtgatgaaaatgaagaagaagatgcctttaccgaccaaaaaatcagacaaagatatgcagatctgcctggagaactgcacattattgaacttgaaaaagataagaatggacttggactcagccttgctggtaataaagaccgatcacgcatgagcatatttgtggtgggaattaacccggaaggacctgctgccgcagatggacgaatgcgtattggagatgaactcttagagataaacaatcagattctgtatggaagaagtcaccaaaatgcatctgccattattaagactgccccatcaaaggtcaagctggttttcatcagaaacgaggatgcagtcaatcagatggccgttactccctttccagtgccatcaagttctccatcttctattgaggatcagagcggcaccgaacctattagtagtgaggaagatggcagcgtcgaagttggtattaaacaattgcctgaaagtgaaagcttcaaactggctgtcagccagatgaaacagcaaaaatatccaacaaaagtctccttcagttcacaagagataccattagcaccagcttcatcataccattcaacagatgcagacttcacaggctatggtggtttccaggctcctctgtcagtggaccccgcaacgtgtcccattgtccctggacaggaaatgattatagaaatatccaagggacgttcagggcttggtctcagcattgtgggaggaaaagacacacccttgaatgctatagttatccatgaagtctatgaagaaggggcagcagccagagatggaagactttgggctggtgaccagatattagaggttaatggggttgacctgaggaactccagccacgaagaagccatcacagccctgaggcagaccccccagaaggtgcggctggtggtgtatagagatgaggcacactaccgggatgaggagaacttggagattttccctgtggatctgcagaagaaagctggccggggcctgggcctgagcatcgttgggaaacgaaatggaagcggagtgtttatttctgacatcgtgaaaggcggagccgcagacctggatgggagattgattcagggagatcagatcttatctgtgaatggggaggacatgagaaatgcctcacaggagacagtggccaccatcctcaagtgtgcacagggacttgtgcagctagagattggaagactccgagctggttcctggacctccgcaaggacgacatcacagaacagtcagtcagcagagtgcacacagcagctgtcatccctccttcgctcctgtcatcactggcctgcaaaacctggttggcacaaaaagagtttcagatccttcccagaaaaattcaggcacagatatggaaccaaggactgttgagataaacagggagctcagtgatgcccttggaatcagtattgctggaggaagaggaagtcccttaggagatatccccgtatttattgccatgattcaggctagcggagtggccgcacggacacagaagcttaaagttggagatcggattgtcagcattaacgggcaacctttggatgggctgtctcacgcggatgtggttaatctgctgaagaacgcctacgggcgcattatcctgcaggttgtagcagataccaatataagcgccatagcagctcagcttgaaaacatgtctacaggctaccaccttggttcgcccactgctgaacaccatccagaagacacagaaacacctccacctaagattattactttggagaaaggctctgaaggcttggggtttagtattgtagggggttatggaagtccccatggagacctgccaatttatgtcaagactgtatttgcaaagggagcagctgcagatgacggccgattaaaacgaggggatcagattttagctgttaatggcgagaccctggaaggtgttactcatgagcaagcagtcgccattctaaaacaccagagagggactgtaaccttaactgtgctgtcatgagcctcgggcctgatcacaagatagatgttgttgtttagaatatccacaggcagatgaagttctgagtgggtatgaaaagcaccctcaactaaaatgcaccttcattcttatttcttgccctctctgctcaggagaaatggctgaggtttcatgtgaatttcccaaatcaacaatcatctcctaatgtttcccagttcctgtcacctgttggcgaggttgatttctaaaacttaaatgagtctacctgttttgcatttaatttcagtgttccgatttctttttttttttttttttttttttttgagacggagtctcactctgtcacccaggctggagttgcagtgagccaagttcgtgccactccactccagcctgggtgacagagcaagactctgtctcgaaaaagaaaaaaaaccatgaaggatgagtactagagtcagtaatagaagtagttcagcattatttaactacaacacaatgctgcaaatatttcacagtaattatcaaaatttaatgggctctaatttaaaatgttatttaataagtatagattttaattgagaattatctttgagtagatgtaatcacaaagtgcattaactcttgttggaatattttatggctattccaaagtatagagtgcctaaattttgtgttgaaaatgtctttcatgacggtattaagttttctgaaattacacatggcttttaaaatttctaatgtatccaagatgtgcaatgttgttaggatctcattcttcagtgcatgaaaagctactaccctcagaacattttgtgttaattgtacctgcaagaacacctcaggcaagccaagaagaaatgaaacccaaataaaacttgaaaatgcaccttaaaaatatatatacatataatagttttgaaatgggattctgctttattttgatggaatggccattaaatacacattttgagataa

SEQ ID NO: 14750 - DNA, 532 bp, Homo sapiens
  source 1..532: mol_type = unassigned DNA
gatgaagaaagagaaattcttgttgatgaagaatatgagttatatcaagatccctcaccatccatggagttgtatcccttgtcgcacattcaagaggccactcctgtgccctctgtgaatgaacttcactttggtacacagtggttgcatgataatgaaccatccgagtctcaagaggcaagaaccgggaggactgtctattcccaggaggcacagccgtatggctattgccctgaaaatgtgatgaaagaaaattttgtcatggagtccctaccatctgtaccatcaactgaaggaaacagtcaacaaggcagatttgacgacctggaaaatcttaattcattagcaaaaactagtctggatttaggtttgtgacttttgtttctcataaacacaaattacattattttgcaagctttcagttttatgtttgtatacatgaatttcaccgtcatatttttattcattatgatgctttgaatttatgtctgcttaataattaatctgcttcagaattacctgaaagaataaa

SEQ ID NO: 14751 - DNA, 574 bp, Homo sapiens
  source 1..574: mol_type = unassigned DNA
tatatcaagatccctcaccatccatggagttgtatcccttgtcgcacattcaagaggccactcctgtgccctctgtgaatgaacttcactttggtacacagtggttgcatgataatgaaccatccgagtctcaagaggcaagaaccgggaggactgtctattcccaggaggcacagccgtatggctattgccctgaaaatgtgggcctctctctgtcgcccaggctggagtgcagtgcagtggcatattcatggctcactgcagcctcgacctcccaggctccatggatcctctcacctcggcttcctgagctgctgggaccacaggcatgtaccaccatgcctggctagttttgttttttttttaaatttttttgtagagatggagttttgccatgttgcccaggctggtcttgaactcctggggtcaagcatctcccatctcccatctcccatctcggcctcccgaagtgctgggattacaggtaggagccactgtgcccagcgaagagcattatattttaatagatttgcctttactattatatcaccaataaactttatttttcataaaa

SEQ ID NO: 14752 - DNA, 701 bp, Homo sapiens
  source 1..701: mol_type = unassigned DNA
tgttcagagtttgtcatccactccacgagtcattcctaacgtacataacaaggccaacaaaatcaccggtaaccagaaccaggacacccaagaaaagaaagaaaagaggcaaggaactgctccaccgccaatgaaacttcctcctccttataaagctctgactgatgacagtgatgaaaatgaagaagaagatgcctttaccgaccaaaaaatcagacaaagatatgcagatctgcctggagaactgcacattattgaacttgaaaaagataagaatggacttggactcagccttgctggtaataaagaccgatcacgcatgagcatatttgtggtgggaattaacccggaaggacctgctgccgcagatggacgaatgcgtattggagatgaactcttagagactctgactcagaatagaatttacagtcatccataattttacttgcctaataataactactgccacagctggccaggtgcaacaggaagaccatcgccatcaactctttcttccaaaccttggttgcttctccccacttaaaacctgtttctgcaaagaagtcacttccaggattacttttcttttcttgttcttttataatatagcaccacgaatgggacccacattgggtcgtaacactgactagcataatcattacataaataaagtcaaagatgaccttatgtaaccaatatta

SEQ ID NO: 14753 - DNA, 387 bp, Homo sapiens
  source 1..387: mol_type = unassigned DNA
caagaaaagaaagaaaagaggcaaggaactgctccaccgccaatgaaacttcctcctccttataaagctctgactgatgacagtgatgaaaatgaagaagaagatgcctttaccgaccaaaaaatcagacaaagatatgcagatctgcctggagaactgcacattattgaacttgaaaaagataagaatggacttggactcagccttgctggtaataaagaccgatcacgcatgagcatatttgtggtgggaattaacccggaaggacctgctgccgcagatggacgaatgcgtattggagatgaactcttagaggtgagaagcatgtgtttttaacttatcttttggtgaagtggatgggtgcagtggatgttgtataggaaaatg

SEQ ID NO: 14754 - DNA, 2298 bp, Homo sapiens
  source 1..2298: mol_type = unassigned DNA
atccaagggtctgatgtgggaaaccagggattttgcttctccggcatagttttccaggcagctttcacctgctgacagaggtgactgtttagcttgaggactagcttgaaattagcttaattgattgcttttcctgatataaatagattgacaggttgcccttaaagagaacaaaatctgagagagagagagagagagagagagaaaaataggcccaaggtcgtcagaagagagaggagtctgtggtgaggatttgagctgcgtccagcattggatatttgtcaggaatgcagataccctgaagggaacacaacaatggtccaagggggtttcccagaaaaaatcagacaaagatatgcagatctgcctggagaactgcacattattgaacttgaaaaagataagaatggacttggactcagccttgctggtaataaagaccgatcacgcatgagcatatttgtggtgggaattaacccggaaggacctgctgccgcagatggacgaatgcgtattggagatgaactcttagagataaacaatcagattctgtatggaagaagtcaccaaaatgcatctgccattattaagactgccccatcaaaggtcaagctggttttcatcagaaacgaggatgcagtcaatcagatggccgttactccctttccagtgccatcaagttctccatcttctattgaggatcagagcggcaccgaacctattagtagtgaggaagatggcagcgtcgaagttggtattaaacaattgcctgaaagtgaaagcttcaaactggctgtcagccagatgaaacagcaaaaatatccaacaaaagtctccttcagttcacaagagataccattagcaccagcttcatcataccattcaacagatgcagacttcacaggctatggtggtttccaggctcctctgtcagtggaccccgcaacgtgtcccattgtccctggacaggaaatgattatagaaatatccaagggacgttcagggcttggtctcagcattgtgggaggaaaagacacacccttgaatgctatagttatccatgaagtctatgaagaaggggcagcagccagagatggaagactttgggctggtgaccagatattagaggttaatggggttgacctgaggaactccagccacgaagaagccatcacagccctgaggcagaccccccagaaggtgcggctggtggtgtatagagatgaggcacactaccgggatgaggagaacttggagattttccctgtggatctgcagaagaaagctggccggggcctgggcctgagcatcgttgggaaacgaaatggaagcggagtgtttatttctgacatcgtgaaaggcggagccgcagacctggatgggagattgattcagggagatcagatcttatctgtgaatggggaggacatgagaaatgcctcacaggagacagtggccaccatcctcaagtgtgcacagggacttgtgcagctagagattggaagactccgagctggttcctggacctccgcaaggacgacatcacagaacagtcagggtagtcagcagagtgcacacagcagctgtcatccctccttcgctcctgtcatcactggcctgcaaaacctggttggcacaaaaagagtttcagatccttcccagaaaaattcaggcacagatatggaaccaaggactgttgagataaacagggagctcagtgatgcccttggaatcagtattgctggaggaagaggaagtcccttaggagatatccccgtatttattgccatgattcaggctagcggagtggccgcacggacacagaagcttaaagttggagatcggattgtcagcattaacgggcaacctttggatgggctgtctcacgcggatgtggttaatctgctgaagaacgcctacgggcgcattatcctgcaggttgtagcagataccaatataagcgccatagcagctcagcttgaaaacatgtctacaggctaccaccttggttcgcccactgctgaacaccatccagaagacacagagagatgctgtaattgcccaatggattcaccttgcccactgctgttggggtgatcagacccaacaccaggtcatggggacgacgaagtccggcggagtcaaaggaatgattaaaaagacagtttgagagaagtgggcccagggggccatcgtgtgaggctgcgaaggccccaagctctgggagcccacgctatttattggtgctcaaagaaacaggtggtgaggatgtggggtttgaaaagaaacagtgtatca

SEQ ID NO: 14755 - DNA, 1585 bp, Homo sapiens
  source 1..1585: mol_type = unassigned DNA
agtctgtggtgaggatttgagctgcgtccagcattggatatttgtcaggaatgcagataccctgaagggaacacaacaatggtccaagggggtttcccagaaaaaatcagacaaagatatgcagatctgcctggagaactgcacattattgaacttgaaaaagataagaatggacttggactcagccttgctggtaataaagaccgatcacgcatgagcatatttgtggtgggaattaacccggaaggacctgctgccgcagatggacgaatgcgtattggagatgaactcttagagataaacaatcagattctgtatggaagaagtcaccaaaatgcatctgccattattaagactgccccatcaaaggtcaagctggttttcatcagaaacgaggatgcagtcaatcagatggccgttactccctttccagtgccatcaagttctccatcttctattgaggatcagagcggcaccgaacctattagtagtgaggaagatggcagcgtcgaagttggtattaaacaattgcctgaaagtgaaagcttcaaactggctgtcagccagatgaaacagcaaaaatatccaacaaaagtctccttcagttcacaagagataccattagcaccagcttcatcataccattcaacagatgcagacttcacaggctatggtggtttccaggctcctctgtcagtggaccccgcaacgtgtcccattgtccctggacaggaaatgattatagaaatatccaagggacgttcagggcttggtctcagcattgtgggaggaaaagacacacccttgttctggaggctgggaagtccaagagcatggagccagcatctggtgagggccttcatgctgcatcatcctgtgacagaagttgaagggcaaaatgctatagttatccatgaagtctatgaagaaggggcagcagccagagatggaagactttgggctggtgaccagatattagaggttaatggggttgacctgaggaactccagccacgaagaagccatcacagccctgaggcagaccccccagaaggtgcggctggtggtgtatagagatgaggcacactaccgggatgaggagaacttggagattttccctgtggatctgcagaagaaagctggccggggcctgggcctgagcatcgttgggaaacgaaatggaagcggagtgtttatttctgacatcgtgaaaggcggagccgcagacctggatgggagattgattcagggagatcagatcttatctgtgaatggggaggacatgagaaatgcctcacaggagacagtggccaccatcctcaagtgtgcacagggacttgtgcagctagagattggaagactccgagctggttcctggacctccgcaaggacgacatcacagaacagtcaggttgtcgatggcttctcatcagactgactcactcttctgcccccactgggagaaagttccccatttaataaatggttgtttggaaataatatctaatgtacagcatattcacagcaccaagtttagtgaactttcatgtgtttgaaataaaaatgaaaggtgggatggaaattca

SEQ ID NO: 14756 - DNA, 569 bp, Homo sapiens
  source 1..569: mol_type = unassigned DNA
aagccatcacagccctgaggcagaccccccagaaggtgcggctggtggtgtatagagatgaggcacactaccgggatgaggagaacttggagattttccctgtggatctgcagaagaaagctggccggggcctgggcctgagcatcgttgggaaacgaaatggaagcggagtgtttatttctgacatcgtgaaaggcggagccgcagacctggatgggagattgattcagggagatcagatcttatctgtgaatggggaggacatgagaaatgcctcacaggagacagtggccaccatcctcaagtgtgcacagggacttgtgcagctagagattggaagactccgagctggttcctggacctccgcaaggacgacatcacagaacagtcaggttgtcgatggcttctcatcagactgactcactcttctgcccccactgggagaaagttccccatttaataaatggttgtttggaaataatatctaatgtacagcatattcacagcaccaagtttagtgaactttcatgtgtttgaaataaaaatgaaaggtgggatggaaattcatt

SEQ ID NO: 14757 - DNA, 946 bp, Homo sapiens
  source 1..946: mol_type = unassigned DNA
gaaaatggttttgattttatgtggagcaagaacagctgaaatgattctatggtctccaccttggtgattgaaaccatatacaaaagcacacataatggagaaagcaatggaggaaatgtctaaatgggattgggttgaggtagtaagagaatagtgtgggtgatttttgttttctttcctggcctcctcacgattttctgttagatggttatggtgacatcagtaattggcacactaatggataagtatgcatttagggggtcaagtcagtgtctgcacacaggtgacccctgggtctttctttcagggtagtcagcagagtgcacacagcagctgtcatccctccttcgctcctgtcatcactggcctgcaaaacctggttggcacaaaaagagtttcagatccttcccagaaaaattcaggcacagatatggaaccaaggactgttgagataaacagggagctcagtgatgcccttggaatcagtattgctggaggaagaggaagtcccttaggagatatccccgtatttattgccatgattcaggctagcggagtggccgcacggacacagaagcttaaagtaaacgagagaactggttgaaagactaacaatatgtgttggggtgggagaggaagttgcagccctgggcaccttgtttaaagttggaattccagtagccatcagagacccaggctgagggcaagatgcattagataaacttgatacctttagaaattcattaggtccccaggcacataaaaatattattatttgtatcaaagcttctccataaaagaagaaattgcagcccctttgcaaaccctcctttacccttttaagcacctcattccacccaaaatcagctctcaactgagagacatttgaccttagagtcttccctcaatcaaaagaatcaccatttttatgatttctcccccttgt

SEQ ID NO: 14758 - DNA, 3657 bp, Homo sapiens
  source 1..3657: mol_type = unassigned DNA
ctcacttccgcccaggtgaggcagggccgacaccgagcccgcccgacccgggctcccacctgctcctccagcgcaccaggtgtctttaagagtgattgaagagaataattcaaaatgcctgaaaatcctgctacagataaactgcaggtgctgcaggtacttgatcgcctgaaaatgaaattgcaggagaagggtgacacgtcgcagaatgagaagttatctatgttttatgagacactaaagagtcctctcttcaaccagatactcacacttcagcagtccatcaagcaactgaagggtcaactcaaccatataccctcagattgttcagccaactttgatttttctaggaaaggtttgttagtgttcacagatggttccatcactaatggaaatgtccacaggccctctaataactcgactgtatctgggttatttccgtggaccccgaagttgggaaatgaagactttaactcagtcattcaacagatggctcagggccggcaaattgaatatatagatatagaacggccttcaactggaggccttggattcagtgtggtggccctcagaagtcaaaatctcggaaaagttgatatcttcgtgaaggatgtccagccagggagtgtagcagacagggatcaaagattaaaggaaaatgatcaaatattggccattaatcacacgccattggatcagaacatttcccatcagcaagcaattgcattattacaacaaaccactggatctttgagactgattgtggccagggaaccagtccacacaaaaagcagtacttctagcagcctaaatgatacaactctgcctgaaacagtttgttggggccatgttgaagaggttgagctcattaatgatggctctggactaggttttggaatagttggaggaaaaacaagtggcgtggttgtgaggactatagttcctggaggattagcagatcgagatggaagactccagacaggggaccacatcttgaagattggtggcacaaacgtgcagggaatgaccagtgagcaagttgcacaagttctaaggaactgtgggaattcagtcaggatgctcgttgctagagatccagctggtgacatttcagtcaccccccctgcccctgcagccttacctgttgccctgcctactgtagccagcaagggccctggttctgacagttctctttttgaaacttataatgttgagcttgtgagaaaagatgggcagagtcttggaattagaattgttggctatgttggaacatctcatacaggggaagcttcagggatttatgtgaaaagtataatacctggcagtgctgcgtaccacaatggccacattcaagtgaatgacaaaatagttgctgtcgatggcgtgaacattcagggttttgccaaccatgatgttgttgaagtattacgaaatgcagggcaggtggtacacctaaccctagttcgaaggaagacatcctcatctacttctccacttgaaccaccttcagacagaggaactgttgtagaaccactgaaaccaccagctctctttctaactggagcagtggaaactgaaactaatgtggatggtgaagatgaggaaattaaagaaagaattgatactttaaaaaatgacaacatacaagccttagaaaaattggaaaaagtcccagactctccagaaaatgagctgaaatccagatgggaaaacctgttgggtcctgattatgaagtaatggttgctactttggacacacagattgcagatgatgctgagttacagaaatattcaaagctgctgcctattcacactctgaggcttggtgtggaagtggattcctttgatgggcaccattatatttcttcaattgtttctggtggtcctgttgatacattgggtctcctacagccagaagatgagctgcttgaggtcaatggcatgcagctttatggaaaatctcgccgagaagcagtctcctttcttaaagaagtgccacccccttttactttggtttgctgtcggaggttgtttgatgatgaagcttctgtagatgaaccaaggcgcactgaaacctctcttcctgagacagaggttgaccacaatatggatgtcaatactgaagaagatgatgatggggaattagcactgtggtcccctgaagtcaagattgttgaactagtaaaagattgtaaaggtttgggattcagcattttggattaccaggaccctttagatcctacaagatcagtgattgtgatccgctccctggtagcagatggtgtagcagaaagaagtgggggactattacctggagaccgcctggtctcagtcaatgaatactgtttggacaacacctcacttgctgaagctgtggaaatattgaaagctgtgccaccaggcctagtacaccttggcatctgtaagcctttggtggaagataatgaagaagaaagttgttatattttacattcaagcagtaatgaagacaagactgaattttcaggaacaattcatgatataaattcatctttaatactcgaagcacccaagggatttagagatgaaccatattttaaagaagaacttgtggatgaaccatttctagatctgggaaagtctttccattcccaacaaaaagagatagagcaaagcaaggaggcctgggagatgcatgaatttctgactcctagattgcaggaaatggatgaagaaagagaaattcttgttgatgaagaatatgagttatatcaagatccctcaccatccatggagttgtatcccttgtcgcacattcaagaggccactcctgtgccctctgtgaatgaacttcactttggtacacagtggttgcatgataatgaaccatccgagtctcaagaggcaagaaccgggaggactgtctattcccaggaggcacagccgtatggctattgccctgaaaatgtgatgaaagaaaattttgtcatggagtccctaccatctgtaccatcaactgaaggaaacagtcaacaaggcagatttgacgacctggaaaatcttaattcattagcaaaaactagtctggatttaggcatgatcccgaatgatgtccaaggtcctagcttgctcattgaccttcctgttgtggctcaaaggagggagcaagaagatttgcctttatatcaacaccaagcgacacgagttatttccaaggcctcagcatacacaggaatgttgtcttctagatatgccactgatacatgtgagttacctgagagagaagaaggcgaaggagaagaaactccaaattttagccactggggtccaccgagaattgttgagatttttagagaacccaatgtgtctcttgggatcagtattgttggtggacaaactgttataaaacgtctaaagaatggagaggagcttaaaggtatattcatcaaacaagttttagaagacagtccagcagggaagacgaacgcacttaaaactggagataaaatacttgaggtgtctggagtagatttgcagaatgcctcacacagcgaagcagttgaggccattaagaatgcaggaaaccctgtggtgttcattgttcagagtttgtcatccactccaccctggacgacagagcgagactctgtctcaaaaaaaaaaaaaagaaaagaaaga

SEQ ID NO: 14759 - DNA, 4172 bp, Homo sapiens
  source 1..4172: mol_type = unassigned DNA
gaggcagggccgacaccgagcccgcccgacccgggctcccacctgctcctccagcgcaccaggtgtctttaagagtgattgaagagaataattcaaaatgcctgaaaatcctgctacagataaactgcaggtgctgcaggtacttgatcgcctgaaaatgaaattgcaggagaagggtgacacgtcgcagaatgagaagttatctatgttttatgagacactaaagagtcctctcttcaaccagatactcacacttcagcagtccatcaagcaactgaagggtcaactcaaccatataccctcagattgttcagccaactttgatttttctaggaaaggtttgttagtgttcacagatggttccatcactaatggaaatgtccacaggccctctaataactcgactgtatctgggttatttccgtggaccccgaagttgggaaatgaagactttaactcagtcattcaacagatggctcagggccggcaaattgaatatatagatatagaacggccttcaactggaggccttggattcagtgtggtggccctcagaagtcaaaatctcggaaaagttgatatcttcgtgaaggatgtccagccagggagtgtagcagacagggatcaaagattaaaggaaaatgatcaaatattggccattaatcacacgccattggatcagaacatttcccatcagcaagcaattgcattattacaacaaaccactggatctttgagactgattgtggccagggaaccagtccacacaaaaagcagtacttctagcagcctaaatgatacaactctgcctgaaacagtttgttggggccatgttgaagaggttgagctcattaatgatggctctggactaggttttggaatagttggaggaaaaacaagtggcgtggttgtgaggactatagttcctggaggattagcagatcgagatggaagactccagacaggggaccacatcttgaagattggtggcacaaacgtgcagggaatgaccagtgagcaagttgcacaagttctaaggaactgtgggaattcagtcaggatgctcgttgctagagatccagctggtgacatttcagtcaccccccctgcccctgcagccttacctgttgccctgcctactgtagccagcaagggccctggttctgacagttctctttttgaaacttataatgttgagcttgtgagaaaagatgggcagagtcttggaattagaattgttggctatgttggaacatctcatacaggggaagcttcagggatttatgtgaaaagtataatacctggcagtgctgcgtaccacaatggccacattcaagtgaatgacaaaatagttgctgtcgatggcgtgaacattcagggttttgccaaccatgatgttgttgaagtattacgaaatgcagggcaggtggtacacctaaccctagttcgaaggaagacatcctcatctacttctccacttgaaccaccttcagacagaggaactgttgtagaaccactgaaaccaccagctctctttctaactggagcagtggaaactgaaactaatgtggatggtgaagatgaggaaattaaagaaagaattgatactttaaaaaatgacaacatacaagccttagaaaaattggaaaaagtcccagactctccagaaaatgagctgaaatccagatgggaaaacctgttgggtcctgattatgaagtaatggttgctactttggacacacagattgcagatgatgctgagttacagaaatattcaaagctgctgcctattcacactctgaggcttggtgtggaagtggattcctttgatgggcaccattatatttcttcaattgtttctggtggtcctgttgatacattgggtctcctacagccagaagatgagctgcttgaggtcaatggcatgcagctttatggaaaatctcgccgagaagcagtctcctttcttaaagaagtgccacccccttttactttggtttgctgtcggaggttgtttgatgatgaagcttctgtagatgaaccaaggcgcactgaaacctctcttcctgagacagaggttgaccacaatatggatgtcaatactgaagaagatgatgatggggaattagcactgtggtcccctgaagtcaagattgttgaactagtaaaagattgtaaaggtttgggattcagcattttggattaccaggaccctttagatcctacaagatcagtgattgtgatccgctccctggtagcagatggtgtagcagaaagaagtgggggactattacctggagaccgcctggtctcagtcaatgaatactgtttggacaacacctcacttgctgaagctgtggaaatattgaaagctgtgccaccaggcctagtacaccttggcatctgtaagcctttggtggaagataatgaagaagaaagttgttatattttacattcaagcagtaatgaagacaagactgaattttcaggaacaattcatgatataaattcatctttaatactcgaagcacccaagggatttagagatgaaccatattttaaagaagaacttgtggatgaaccatttctagatctgggaaagtctttccattcccaacaaaaagagatagagcaaagcaaggaggcctgggagatgcatgaatttctgactcctagattgcaggaaatggatgaagaaagagaaattcttgttgatgaagaatatgagttatatcaagatccctcaccatccatggagttgtatcccttgtcgcacattcaagaggccactcctgtgccctctgtgaatgaacttcactttggtacacagtggttgcatgataatgaaccatccgagtctcaagaggcaagaaccgggaggactgtctattcccaggaggcacagccgtatggctattgccctgaaaatgtgatgaaagaaaattttgtcatggagtccctaccatctgtaccatcaactgaaggaaacagtcaacaaggcagatttgacgacctggaaaatcttaattcattagcaaaaactagtctggatttaggcatgatcccgaatgatgtccaaggtcctagcttgctcattgaccttcctgttgtggctcaaaggagggagcaagaagatttgcctttatatcaacaccaagcgacacgagttatttccaaggcctcagcatacacaggaatgttgtcttctagatatgccactgatacatgtgagttacctgagagagaagaaggcgaaggagaagaaactccaaattttagccactggggtccaccgagaattgttgagatttttagagaacccaatgtgtctcttgggatcagtattgttggtggacaaactgttataaaacgtctaaagaatggagaggagcttaaaggtatattcatcaaacaagttttagaagacagtccagcagggaagacgaacgcacttaaaactggagataaaatacttgaggcttctggagtagataaagaattgtgtaatcagtttgtgtccccagctgagggcaggaaaattgctacctgggaggtgtgcagtgagccaagttcgtgccactccactccagcctgggtgacagagcaagactctgtctcgaaaaagaaaaaaaaccatgaaggatgagtactagagtcagtaatagaagtagttcagcattatttaactacaacacaatgctgcaaatatttcacagtaattatcaaaatttaatgggctctaatttaaaatgttatttaataagtatagattttaattgagaattatctttgagtagatgtaatcacaaagtgcattaactcttgttggaatattttatggctattccaaagtatagagtgcctaaattttgtgttgaaaatgtctttcatgacggtattaagttttctgaaattacacatggcttttaaaatttctaatgtatccaagatgtgcaatgttgttaggatctcattcttcagtgcatgaaaagctactaccctcagaacattttgtgttaattgtacctgcaagaacacctcaggcaagccaagaagaaatgaaacccaaataaaacttgaaaatgcaccttaaaaatatatatacatataatagttttgaaatgggattctgctttattttgatggaatggccattaaatacacattttgag

SEQ ID NO: 14760 - DNA, 507 bp, Homo sapiens
  source 1..507: mol_type = unassigned DNA
gatctccgggcggcggcggcggcgaaggcgagacgcgttgtcgggccgcggaggagcgggacagccagacccagccccaggacgcggcggccgcggggagcctagcatggaagagcgcgcgggtccggcagaatcatccggaccaaagttcagcagcctttccacccaacgccggatggggctgggacaggagtgaccgcccctggccacaccattgttcccagcacggcctcccctcctgtttccagcgcctccaatgacccagtgggatcctactccatcaatgggatcctggggattcctcgctccaatggtgagaagaggaaacgtgatgaagatgtgtctgagggctcagtccccaatggagattcccagagtggtgtggacagtttgcggaagcacttgcgagctgacaccttcacccagcagcagctggaagctttggatcgggtctttgagcgtccttcctaccctgacgtcttccaggcatcagagcacatcaaatca

SEQ ID NO: 14761 - DNA, 4057 bp, Homo sapiens
  source 1..4057: mol_type = unassigned DNA
cgggggcctggcccgcgcgctcccctcccgcaggcgccacctcggacatccccgggattgctacttctctgccaacttcgccaactcgccagcacttggagaggcccggctcccctcccggcgccctctgaccgcccccgccccgcgcgctctccgaccaccgcctctcggatgaccaggttccaggggagctgagcgagtcgcctcccccgcccagcttcagccctggctgcagctgcagcgcgagccatgcgcccccagtgcaccccggcccggcccaccgccccggggccattctgctgaccgcccagccccgagccccgacagtggcaagttgcggctactgcagttgcaagctccggccaacccggaggagccccagcggggagcgcagtgctgcgccccccgcccccgcgcgccccgcagcagccgggcgttcactcatcctccctcccccaccgtccctcccttttctcctcaagtcctgaagttgagtttgagaggcgacacggcggcggcggccgcgctgctcccgctcctctgcctccccatggatatgcactgcaaagcagaccccttctccgcgatgcacccagggcacgggggtgtgaaccagctcgggggggtgtttgtgaacggccggcccctacccgacgtggtgaggcagcgcatcgtggagctggcccaccagggtgtgcggccctgtgacatctcccggcagctgcgggtcagccacggctgtgtcagcaaaatcctgggcaggtactacgagaccggcagcatcaagccgggtgtgatcggtggctccaagcccaaagtggcgacgcccaaagtggtggacaagattgctgaatacaaacgacagaacccgactatgttcgcctgggagattcgagaccggctcctggccgagggcatctgtgacaatgacacagtgcccagcgtctcttccatcaacagaatcatccggaccaaagttcagcagcctttccacccaacgccggatggggctgggacaggagtgaccgcccctggccacaccattgttcccagcacggcctcccctcctgtttccagcgcctccaatgacccagtgggatcctactccatcaatgggatcctggggattcctcgctccaatggtgagaagaggaaacgtgatgaagatgtgtctgagggctcagtccccaatggagattcccagagtggtgtggacagtttgcggaagcacttgcgagctgacaccttcacccagcagcagctggaagctttggatcgggtctttgagcgtccttcctaccctgacgtcttccaggcatcagagcacatcaaatcagaacaggggaacgagtactccctcccagccctgacccctgggcttgatgaagtcaagtcgagtctatctgcatccaccaaccctgagctgggcagcaacgtgtcaggcacacagacatacccagttgtgactggtcgtgacatggcgagcaccactctgcctggttacccccctcacgtgccccccactggccagggaagctaccccacctccaccctggcaggaatggtgcctgggagcgagttctccggcaacccgtacagccacccccagtacacggcctacaacgaggcttggagattcagcaaccccgccttactaagttccccttattattatagtgccgccccccggggctccgcccctgccgctgctgccgctgcctatgaccgccactagttaccgcggggaccacatcaagcttcaggccgacagcttcggcctccacatcgtccccgtctgaccccaccccggagggagggaggaccgacgcgacgcgatgcctcccggccaccgccccagcctcaccccatcccacgacccccgcaacccttcacatcacccccctcgaaggtcggacaggacgggtggagccgtgggcgggaccctcaggcccgggcccgccgcccccagccccgcctgccgcccctccccgcctgcctggactgcgcggcgccgtgagggggattcggcccagctcgtcccggcctccaccaagccagccccgaagcccgccagccaccctgccggactcgggcgcgacctgctggcgcgcgccggatgtttctgtgacacacaatcagcgcggaccgcagcgcggcccagccccgggcacccgcctcggacgctcgggcgccaggaggcttcgctggaggggctgggccaaggagattaagaagaaaacgactttctgcaggaggaagagcccgctgccgaatccctgggaaaaattcttttcccccagtgccagccggactgccctcgccttccgggtgtgccctgtcccagaagatggaatgggggtgtgggggtccggctctaggaacgggctttgggggcgtcaggtctttccaaggttgggacccaaggatcggggggcccagcagcccgcaccgatcgagccggactctcggctcttcactgctcctcctggcctgcctagttccccagggcccggcacctcctgctgcgagacccggctctcagccctgccttgcccctacctcagcgtctcttccacctgctggcctcccagtttcccctcctgccagtccttcgcctgtcccttgacgccctgcatcctcctccctgactcgcagccccatcggacgctctcccgggaccgccgcaggaccagtttccatagactgcggactggggtcttcctccagcagttacttgatgccccctcccccgacacagactctcaatctgccggtggtaagaaccggttctgagctggcgtctgagctgctgcggggtggaagtggggggctgcccactccactcctcccatcccctcccagcctcctcctccggcaggaactgaacagaaccacaaaaagtctacatttatttaatatgatggtctttgcaaaaaggaacaaaacaacacaaaagcccaccaggctgctgctttgtggaaagacggtgtgtgtcgtgtgaaggcgaaacccggtgtacataacccctccccctccgccccgccccgcccggccccgtagagtccctgtcgcccgccggccctgcctgtagatacgccccgctgtctgtgctgtgagagtcgccgctcgctgggggggaagggggggacacagctacacgcccattaaagcacagcacgtcctgggggaggggggcattttttatgttacaaaaaaaaattacgaaagaaaagaaatctctatgcaaaatgacgaacatggtcctgtggactcctctggcctgttttgttggctctttctctgtaattccgtgttttcgctttttcctccctgcccctctctccctctgcccctctctcctctccgcttctctccccctctgtctctgtctctctccgtctctgtcgctcttgtctgtctgtctctgctctttcctcggcctctctccccagacctggcccggccgccctgtctccgcaggctagatccgaggtggcagctccagcccccgggctcgccccctcgcgggcgtgccccgcgcgccccgggcggccgaaggccgggccgccccgtcccgccccgtagttgctctttcggtagtggcgatgcgccctgcatgtctcctcacccgtggatcgtgacgactcgaaataacagaaacaaagtcaataaagtgaaaataaataaaaatccttgaacaaatccgaaaaggcttggagtcctcgcccagatctctctcccctgcgagccctttttatttgagaaggaaaaagagaaaagagaatcgtttaagggaacccggcgcccagccaggctccagtggcccgaacggggcggcgagggcggcgagggcgccgaggtccggcccatcccagtcctgtggggctggccgggcagagaccccggacccaggcccaggcctaacctgctaaatgtccccggacggttctggtctcctcggccactttcagtgcgtcggttcgttttgattctttttcttttgtgcacataagaaataaataataataataaataaagaataaaattttgtatgtca

SEQ ID NO: 14762 - DNA, 4140 bp, Homo sapiens
  source 1..4140: mol_type = unassigned DNA
cgggggcctggcccgcgcgctcccctcccgcaggcgccacctcggacatccccgggattgctacttctctgccaacttcgccaactcgccagcacttggagaggcccggctcccctcccggcgccctctgaccgcccccgccccgcgcgctctccgaccaccgcctctcggatgaccaggttccaggggagctgagcgagtcgcctcccccgcccagcttcagccctggctgcagctgcagcgcgagccatgcgcccccagtgcaccccggcccggcccaccgccccggggccattctgctgaccgcccagccccgagccccgacagtggcaagttgcggctactgcagttgcaagctccggccaacccggaggagccccagcggggagcgcagtgctgcgccccccgcccccgcgcgccccgcagcagccgggcgttcactcatcctccctcccccaccgtccctcccttttctcctcaagtcctgaagttgagtttgagaggcgacacggcggcggcggccgcgctgctcccgctcctctgcctccccatggatatgcactgcaaagcagaccccttctccgcgatgcacccagggcacgggggtgtgaaccagctcgggggggtgtttgtgaacggccggcccctacccgacgtggtgaggcagcgcatcgtggagctggcccaccagggtgtgcggccctgtgacatctcccggcagctgcgggtcagccacggctgtgtcagcaaaatcctgggcaggtactacgagaccggcagcatcaagccgggtgtgatcggtggctccaagcccaaagtggcgacgcccaaagtggtggacaagattgctgaatacaaacgacagaacccgactatgttcgcctgggagattcgagaccggctcctggccgagggcatctgtgacaatgacacagtgcccagcgtctcttccatcaacagaatcatccggaccaaagttcagcagcctttccacccaacgccggatggggctgggacaggagtgaccgcccctggccacaccattgttcccagcacggcctcccctcctgtttccagcgcctccaatgacccagtgggatcctactccatcaatgggatcctggggattcctcgctccaatggtgagaagaggaaacgtgatgaagatgtgtctgagggctcagtccccaatggagattcccagagtggtgtggacagtttgcggaagcacttgcgagctgacaccttcacccagcagcagctggaagctttggatcgggtctttgagcgtccttcctaccctgacgtcttccaggcatcagagcacatcaaatcagaacaggggaacgagtactccctcccagccctgacccctgggcttgatgaagtcaagtcgagtctatctgcatccaccaaccctgagctgggcagcaacgtgtcaggcacacagacatacccagttgtgactggtcgtgacatggcgagcaccactctgcctggttacccccctcacgtgccccccactggccagggaagctaccccacctccaccctggcaggaatggtgcctgaggctgcagttggtccctcatcctccctcatgagcaagccggggaggaagcttgcagaagtgcccccttgtgtgcaacccactggagcgagttctccggcaacccgtacagccacccccagtacacggcctacaacgaggcttggagattcagcaaccccgccttactaagttccccttattattatagtgccgccccccggggctccgcccctgccgctgctgccgctgcctatgaccgccactagttaccgcggggaccacatcaagcttcaggccgacagcttcggcctccacatcgtccccgtctgaccccaccccggagggagggaggaccgacgcgacgcgatgcctcccggccaccgccccagcctcaccccatcccacgacccccgcaacccttcacatcacccccctcgaaggtcggacaggacgggtggagccgtgggcgggaccctcaggcccgggcccgccgcccccagccccgcctgccgcccctccccgcctgcctggactgcgcggcgccgtgagggggattcggcccagctcgtcccggcctccaccaagccagccccgaagcccgccagccaccctgccggactcgggcgcgacctgctggcgcgcgccggatgtttctgtgacacacaatcagcgcggaccgcagcgcggcccagccccgggcacccgcctcggacgctcgggcgccaggaggcttcgctggaggggctgggccaaggagattaagaagaaaacgactttctgcaggaggaagagcccgctgccgaatccctgggaaaaattcttttcccccagtgccagccggactgccctcgccttccgggtgtgccctgtcccagaagatggaatgggggtgtgggggtccggctctaggaacgggctttgggggcgtcaggtctttccaaggttgggacccaaggatcggggggcccagcagcccgcaccgatcgagccggactctcggctcttcactgctcctcctggcctgcctagttccccagggcccggcacctcctgctgcgagacccggctctcagccctgccttgcccctacctcagcgtctcttccacctgctggcctcccagtttcccctcctgccagtccttcgcctgtcccttgacgccctgcatcctcctccctgactcgcagccccatcggacgctctcccgggaccgccgcaggaccagtttccatagactgcggactggggtcttcctccagcagttacttgatgccccctcccccgacacagactctcaatctgccggtggtaagaaccggttctgagctggcgtctgagctgctgcggggtggaagtggggggctgcccactccactcctcccatcccctcccagcctcctcctccggcaggaactgaacagaaccacaaaaagtctacatttatttaatatgatggtctttgcaaaaaggaacaaaacaacacaaaagcccaccaggctgctgctttgtggaaagacggtgtgtgtcgtgtgaaggcgaaacccggtgtacataacccctccccctccgccccgccccgcccggccccgtagagtccctgtcgcccgccggccctgcctgtagatacgccccgctgtctgtgctgtgagagtcgccgctcgctgggggggaagggggggacacagctacacgcccattaaagcacagcacgtcctgggggaggggggcattttttatgttacaaaaaaaaattacgaaagaaaagaaatctctatgcaaaatgacgaacatggtcctgtggactcctctggcctgttttgttggctctttctctgtaattccgtgttttcgctttttcctccctgcccctctctccctctgcccctctctcctctccgcttctctccccctctgtctctgtctctctccgtctctgtcgctcttgtctgtctgtctctgctctttcctcggcctctctccccagacctggcccggccgccctgtctccgcaggctagatccgaggtggcagctccagcccccgggctcgccccctcgcgggcgtgccccgcgcgccccgggcggccgaaggccgggccgccccgtcccgccccgtagttgctctttcggtagtggcgatgcgccctgcatgtctcctcacccgtggatcgtgacgactcgaaataacagaaacaaagtcaataaagtgaaaataaataaaaatccttgaacaaatccgaaaaggcttggagtcctcgcccagatctctctcccctgcgagccctttttatttgagaaggaaaaagagaaaagagaatcgtttaagggaacccggcgcccagccaggctccagtggcccgaacggggcggcgagggcggcgagggcgccgaggtccggcccatcccagtcctgtggggctggccgggcagagaccccggacccaggcccaggcctaacctgctaaatgtccccggacggttctggtctcctcggccactttcagtgcgtcggttcgttttgattctttttcttttgtgcacataagaaataaataataataataaataaagaataaaattttgtatgtca

SEQ ID NO: 14763 - DNA, 582 bp, Homo sapiens
  source 1..582: mol_type = unassigned DNA
cttttctcctcaagtcctgaagttgagtttgagaggcgacacggcggcggcggccgcgctgctcccgctcctctgcctccccatggatatgcactgcaaagcagaccccttctccgcgatgcaccaatcatccggaccaaagttcagcagcctttccacccaacgccggatggggctgggacaggagtgaccgcccctggccacaccattgttcccagcacggcctcccctcctgtttccagcgcctccaatgacccagtgggatcctactccatcaatgggatcctggggattcctcgctccaatggtgagaagaggaaacgtgatgaagatgtgtctgagggctcagtccccaatggagattcccagagtggtgtggacagtttgcggaagcacttgcgagctgacaccttcacccagcagcagctggaagctttggatcgggtctttgagcgtccttcctaccctgacgtcttccaggcatcagagcacatcaaatcagaacaggggaacgagtactccctcccagccctgacccctgggcttgatgaagtcaagtcgagtctatctgcatccaccaac

SEQ ID NO: 14764 - DNA, 3193 bp, Homo sapiens
  source 1..3193: mol_type = unassigned DNA
cggcggcggcggccgcgctgctcccgctcctctgcctccccatggatatgcactgcaaagcagaccccttctccgcgatgcaccggcacgggggtgtgaaccagctcgggggggtgtttgtgaacggccggcccctacccgacgtggtgaggcagcgcatcgtggagctggcccaccagggtgtgcggccctgtgacatctcccggcagctgcgggtcagccacggctgtgtcagcaaaatcctgggcaggtactacgagaccggcagcatcaagccgggtgtgatcggtggctccaagcccaaagtggcgacgcccaaagtggtggacaagattgctgaatacaaacgacagaacccgactatgttcgcctgggagattcgagaccggctcctggccgagggcatctgtgacaatgacacagtgcccagcgtctcttccatcaacagaatcatccggaccaaagttcagcagcctttccacccaacgccggatggggctgggacaggagtgaccgcccctggccacaccattgttcccagcacggcctcccctcctgtttccagcgcctccaatgacccagtgggatcctactccatcaatgggatcctggggattcctcgctccaatggtgagaagaggaaacgtgatgaagatgtgtctgagggctcagtccccaatggagattcccagagtggtgtggacagtttgcggaagcacttgcgagctgacaccttcacccagcagcagctggaagctttggatcgggtctttgagcgtccttcctaccctgacgtcttccaggcatcagagcacatcaaatcagaacaggggaacgagtactccctcccagccctgacccctgggcttgatgaagtcaagtcgagtctatctgcatccaccaaccctgagctgggcagcaacgtgtcaggcacacagacatacccagttgtgactggtcgtgacatggcgagcaccactctgcctggttacccccctcacgtgccccccactggccagggaagctaccccacctccaccctggcaggaatggtgcctgggagcgagttctccggcaacccgtacagccacccccagtacacggcctacaacgaggcttggagattcagcaaccccgccttactaagttccccttattattatagtgccgccccccggggctccgcccctgccgctgctgccgctgcctatgaccgccactagttaccgcggggaccacatcaagcttcaggccgacagcttcggcctccacatcgtccccgtctgaccccaccccggagggagggaggaccgacgcgacgcgatgcctcccggccaccgccccagcctcaccccatcccacgacccccgcaacccttcacatcacccccctcgaaggtcggacaggacgggtggagccgtgggcgggaccctcaggcccgggcccgccgcccccagccccgcctgccgcccctccccgcctgcctggactgcgcggcgccgtgagggggattcggcccagctcgtcccggcctccaccaagccagccccgaagcccgccagccaccctgccggactcgggcgcgacctgctggcgcgcgccggatgtttctgtgacacacaatcagcgcggaccgcagcgcggcccagccccgggcacccgcctcggacgctcgggcgccaggaggcttcgctggaggggctgggccaaggagattaagaagaaaacgactttctgcaggaggaagagcccgctgccgaatccctgggaaaaattcttttcccccagtgccagccggactgccctcgccttccgggtgtgccctgtcccagaagatggaatgggggtgtgggggtccggctctaggaacgggctttgggggcgtcaggtctttccaaggttgggacccaaggatcggggggcccagcagcccgcaccgatcgagccggactctcggctcttcactgctcctcctggcctgcctagttccccagggcccggcacctcctgctgcgagacccggctctcagccctgccttgcccctacctcagcgtctcttccacctgctggcctcccagtttcccctcctgccagtccttcgcctgtcccttgacgccctgcatcctcctccctgactcgcagccccatcggacgctctcccgggaccgccgcaggaccagtttccatagactgcggactggggtcttcctccagcagttacttgatgccccctcccccgacacagactctcaatctgccggtggtaagaaccggttctgagctggcgtctgagctgctgcggggtggaagtggggggctgcccactccactcctcccatcccctcccagcctcctcctccggcaggaactgaacagaaccacaaaaagtctacatttatttaatatgatggtctttgcaaaaaggaacaaaacaacacaaaagcccaccaggctgctgctttgtggaaagacggtgtgtgtcgtgtgaaggcgaaacccggtgtacataacccctccccctccgccccgccccgcccggccccgtagagtccctgtcgcccgccggccctgcctgtagatacgccccgctgtctgtgctgtgagagtcgccgctcgctgggggggaagggggggacacagctacacgcccattaaagcacagcacgtcctgggggaggggggcattttttatgttacaaaaaaaaattacgaaagaaaagaaatctctatgcaaaatgacgaacatggtcctgtggactcctctggcctgttttgttggctctttctctgtaattccgtgttttcgctttttcctccctgcccctctctccctctgcccctctctcctctccgcttctctccccctctgtctctgtctctctccgtctctgtcgctcttgtctgtctgtctctgctctttcctcggcctctctccccagacctggcccggccgccctgtctccgcaggctagatccgaggtggcagctccagcccccgggctcgccccctcgcgggcgtgccccgcgcgccccgggcggccgaaggccgggccgccccgtcccgccccgtagttgctctttcggtagtggcgatgcgccctgcatgtctcctcacccgtggatcgtgacgactcgaaataacagaaacaaagtcaataaagtgaaaataaataaaaatccttgaacaaatcc

SEQ ID NO: 14765 - DNA, 677 bp, Homo sapiens
  source 1..677: mol_type = unassigned DNA
gcggccgcgctgctcccgctcctctgcctccccatggatatgcactgcaaagcagaccccttctccgcgatgcacccagggcacgggggtgtgaaccagctcgggggggtgtttgtgaacggccggcccctacccgacgtggtgaggcagcgcatcgtggagctggcccaccagggtgtgcggccctgtgacatctcccggcagctgcgggtcagccacggctgtgtcagcaaaatcctgggcaggtactacgagaccggcagcatcaagccgggtgtgatcggtggctccaagcccaaagtggcgacgcccaaagtggtggacaagattgctgaatacaaacgacagaacccgactatgttcgcctgggagattcgagaccggctcctggccgagggcatctgtgacaatgacacagtgcccagcgtctcttccatcaacagaatcatccggaccaaagttcagcagcctttccacccaacgccggatggggctgggacaggagtgaccgcccctggccacaccattgttcccagcacggcctcccctcctgtttccagcgcctccaatgacccagtgggatcctactccatcaatgggatcctggggattcctcgctccaatggtgagaagaggaaacgtgatgaagttgaggtatacactgatcctgcccacat

SEQ ID NO: 14766 - DNA, 1216 bp, Homo sapiens
  source 1..1216: mol_type = unassigned DNA
gatatgcactgcaaagcagaccccttctccgcgatgcaccgttgtcaagacacgatggtcatctttccctgcctctgcctgggggatgctctaaaaacaaagaggggctccgagaagaaatcgaagtcagggagagagccagcagcgcagccttccaggtgggcccccggcagagtgcagctctgctctcagctctggaggctccttgcctagactgccgactccccattgaggatcacgcagccagcaacctggccagggggtcagcaaagagcaaaaaatgagggggaaagaacaaaaggaaagcaaatgccaaagctgaggagaaaggaaaagagaaatccaaacacgggaaaggaaattaaagaaagaaagttgacatgatgttacagaagaaaagggagaagggagaaaaaaatagagaaaagagggaattattttaataaaatttgaatttatgccatgtctttagcttgaaaaactattctgagattttttttgcaggcttttttttttaaaagctaaaattctaaatagaaaactcctccctatctgcagattaataattaaggataatttgtaacttttcacaaggaaactttagacccggcttggacctgtgtttaggacaagagagccgaggagggagagctgtgtttttcgctaatcatatatttagcgttgcgggggttggggggggcgtttaaaaatacttctgggataaaatatatttttctaagtaatttccaagcgcaggaaagccgcgccgagggcatcaggcctccgcgggtctcggcgagcgggccggaaagcctcggtccttttcgggaggagtggaaccgggtccacacgccgttttcgcccagccagcctgcctcgcggcccgctgccacagctctcgttctccttttttgcggattccgccgggggtccgccgagtcctggctgcccgcgggcagccactttgaaacccaaaggtttctgcacggccaagcagaggtcggagggagagagccgcagcgcgggcccgcgggccggtggactgcagggcacgggggtgtgaaccagctcgggggggtgtttgtgaacggccggcccctacccgacgtggtgaggcagcgcatcgtggagctggcccaccagggtgtgcggccctgtgacatctcccggcagctgcgggtcagccacggctgtgtcagcaaaatcctgggcaggt

SEQ ID NO: 14767 - DNA, 1755 bp, Homo sapiens
  source 1..1755: mol_type = unassigned DNA
cgccccgagagttattaactcgccagcgaggcctatgccgtgccacctgggcgagacggtgggccccaaccaggctctgcgaggcgcggcaggcaggcgagcccaagcagccggcattctctgcctgctgcctggagccgctctgcctccctgtctctgagcgcagcagaccccgggcccctgcctcatccgccttccttgctctacttcagatactaaggaggtgaaagagagatacggtccccctacagataaataacattagaaaaacttcccatcaaaaacaaacaacacaggaaagaggtagaaaaattccgattacaatttaatactttttaaagaagaggcagagagcaaaggggggtgtgtgtgtcaggcacttatcccctgtctgtgctaggagctcggataaacagtcagccgagcctcgacgcccccaaatcgtccgcctccaagccccgcacgcgcggacagctcccgggttgcctgcggcgcaggcgggatgctgcttcgcactagtccagtcctctgccaggcccttcctctcctcgctttcttacgccctttccgctggcatgaattcccctttggcattttctcccctctcccctcttttctgtcatctggtttctctccagtcccccctttgctttctaccttgcgtcgcaaggcctgagtcgccctctcgcccagcccccagtcttcagcccagcgtctgtgcttccagtccccactcctccgcgtggtcgtggaggtccaccacctttcttctcaagctcgggaacatgcccttccgccctgcctgcttccttcgcccgtcccgggccgcggaccctgactaatggccggtccctgctgtgtgtggggtgttgtgtttttttcttgtctctccccagcagggcacgggggtgtgaaccagctcgggggggtgtttgtgaacggccggcccctacccgacgtggtgaggcagcgcatcgtggagctggcccaccagggtgtgcggccctgtgacatctcccggcagctgcgggtcagccacggctgtgtcagcaaaatcctgggcaggtactacgagaccggcagcatcaagccgggtgtgatcggtggctccaagcccaaagtggcgacgcccaaagtggtggacaagattgctgaatacaaacgacagaacccgactatgttcgcctgggagattcgagaccggctcctggccgagggcatctgtgacaatgacacagtgcccagcgtctcttccatcaacagaatcatccggaccaaagttcagcagcctttccacccaacgccggatggggctgggacaggagtgaccgcccctggccacaccattgttcccagcacggcctcccctcctgtttccagcgcctccaatgacccagtgggatcctactccatcaatgggatcctggggattcctcgctccaatgatgtgtctgagggctcagtccccaatggagattcccagagtggtgtggacagtttgcggaagcacttgcgagctgacaccttcacccagcagcagctggaagctttggatcgggtctttgagcgtccttcctaccctgacgtcttccaggcatcagagcacatcaaatcagaacaggggaacgagtactccctcccagccctgacccctgggcttgatgaagtcaagtcgagtctatctgcatccaccaaccctgagctgggcagcaacgtgtcaggcacacagacatacccagttgtgactggtcgtga

SEQ ID NO: 14768 - DNA, 4126 bp, Homo sapiens
  source 1..4126: mol_type = unassigned DNA
cgggggcctggcccgcgcgctcccctcccgcaggcgccacctcggacatccccgggattgctacttctctgccaacttcgccaactcgccagcacttggagaggcccggctcccctcccggcgccctctgaccgcccccgccccgcgcgctctccgaccaccgcctctcggatgaccaggttccaggggagctgagcgagtcgcctcccccgcccagcttcagccctggctgcagctgcagcgcgagccatgcgcccccagtgcaccccggcccggcccaccgccccggggccattctgctgaccgcccagccccgagccccgacagtggcaagttgcggctactgcagttgcaagctccggccaacccggaggagccccagcggggagcgcagtgctgcgccccccgcccccgcgcgccccgcagcagccgggcgttcactcatcctccctcccccaccgtccctcccttttctcctcaagtcctgaagttgagtttgagaggcgacacggcggcggcggccgcgctgctcccgctcctctgcctccccatggatatgcactgcaaagcagaccccttctccgcgatgcacccagggcacgggggtgtgaaccagctcgggggggtgtttgtgaacggccggcccctacccgacgtggtgaggcagcgcatcgtggagctggcccaccagggtgtgcggccctgtgacatctcccggcagctgcgggtcagccacggctgtgtcagcaaaatcctgggcaggtactacgagaccggcagcatcaagccgggtgtgatcggtggctccaagcccaaagtggcgacgcccaaagtggtggacaagattgctgaatacaaacgacagaacccgactatgttcgcctgggagattcgagaccggctcctggccgagggcatctgtgacaatgacacagtgcccagcgtctcttccatcaacagaatcatccggaccaaagttcagcagcctttccacccaacgccggatggggctgggacaggagtgaccgcccctggccacaccattgttcccagcacggcctcccctcctgtttccagcgcctccaatgacccagtgggatcctactccatcaatgggatcctggggattcctcgctccaatggtgagaagaggaaacgtgatgaagttgaggtatacactgatcctgcccacattagaggaggtggaggtttgcatctggtctggactttaagagatgtgtctgagggctcagtccccaatggagattcccagagtggtgtggacagtttgcggaagcacttgcgagctgacaccttcacccagcagcagctggaagctttggatcgggtctttgagcgtccttcctaccctgacgtcttccaggcatcagagcacatcaaatcagaacaggggaacgagtactccctcccagccctgacccctgggcttgatgaagtcaagtcgagtctatctgcatccaccaaccctgagctgggcagcaacgtgtcaggcacacagacatacccagttgtgactggtcgtgacatggcgagcaccactctgcctggttacccccctcacgtgccccccactggccagggaagctaccccacctccaccctggcaggaatggtgcctgggagcgagttctccggcaacccgtacagccacccccagtacacggcctacaacgaggcttggagattcagcaaccccgccttactaagttccccttattattatagtgccgccccccggggctccgcccctgccgctgctgccgctgcctatgaccgccactagttaccgcggggaccacatcaagcttcaggccgacagcttcggcctccacatcgtccccgtctgaccccaccccggagggagggaggaccgacgcgacgcgatgcctcccggccaccgccccagcctcaccccatcccacgacccccgcaacccttcacatcacccccctcgaaggtcggacaggacgggtggagccgtgggcgggaccctcaggcccgggcccgccgcccccagccccgcctgccgcccctccccgcctgcctggactgcgcggcgccgtgagggggattcggcccagctcgtcccggcctccaccaagccagccccgaagcccgccagccaccctgccggactcgggcgcgacctgctggcgcgcgccggatgtttctgtgacacacaatcagcgcggaccgcagcgcggcccagccccgggcacccgcctcggacgctcgggcgccaggaggcttcgctggaggggctgggccaaggagattaagaagaaaacgactttctgcaggaggaagagcccgctgccgaatccctgggaaaaattcttttcccccagtgccagccggactgccctcgccttccgggtgtgccctgtcccagaagatggaatgggggtgtgggggtccggctctaggaacgggctttgggggcgtcaggtctttccaaggttgggacccaaggatcggggggcccagcagcccgcaccgatcgagccggactctcggctcttcactgctcctcctggcctgcctagttccccagggcccggcacctcctgctgcgagacccggctctcagccctgccttgcccctacctcagcgtctcttccacctgctggcctcccagtttcccctcctgccagtccttcgcctgtcccttgacgccctgcatcctcctccctgactcgcagccccatcggacgctctcccgggaccgccgcaggaccagtttccatagactgcggactggggtcttcctccagcagttacttgatgccccctcccccgacacagactctcaatctgccggtggtaagaaccggttctgagctggcgtctgagctgctgcggggtggaagtggggggctgcccactccactcctcccatcccctcccagcctcctcctccggcaggaactgaacagaaccacaaaaagtctacatttatttaatatgatggtctttgcaaaaaggaacaaaacaacacaaaagcccaccaggctgctgctttgtggaaagacggtgtgtgtcgtgtgaaggcgaaacccggtgtacataacccctccccctccgccccgccccgcccggccccgtagagtccctgtcgcccgccggccctgcctgtagatacgccccgctgtctgtgctgtgagagtcgccgctcgctgggggggaagggggggacacagctacacgcccattaaagcacagcacgtcctgggggaggggggcattttttatgttacaaaaaaaaattacgaaagaaaagaaatctctatgcaaaatgacgaacatggtcctgtggactcctctggcctgttttgttggctctttctctgtaattccgtgttttcgctttttcctccctgcccctctctccctctgcccctctctcctctccgcttctctccccctctgtctctgtctctctccgtctctgtcgctcttgtctgtctgtctctgctctttcctcggcctctctccccagacctggcccggccgccctgtctccgcaggctagatccgaggtggcagctccagcccccgggctcgccccctcgcgggcgtgccccgcgcgccccgggcggccgaaggccgggccgccccgtcccgccccgtagttgctctttcggtagtggcgatgcgccctgcatgtctcctcacccgtggatcgtgacgactcgaaataacagaaacaaagtcaataaagtgaaaataaataaaaatccttgaacaaatccgaaaaggcttggagtcctcgcccagatctctctcccctgcgagccctttttatttgagaaggaaaaagagaaaagagaatcgtttaagggaacccggcgcccagccaggctccagtggcccgaacggggcggcgagggcggcgagggcgccgaggtccggcccatcccagtcctgtggggctggccgggcagagaccccggacccaggcccaggcctaacctgctaaatgtccccggacggttctggtctcctcggccactttcagtgcgtcggttcgttttgattctttttcttttgtgcacataagaaataaataataataataaataaagaataaaattttgtatgtca

SEQ ID NO: 14769 - DNA, 3170 bp, Homo sapiens
  source 1..3170: mol_type = unassigned DNA
aggaggagactcaggcaggccgcgctccagcctcaccaggctccccggctcgccgtggctctctgagcccccttttcagggaccccagtcgctggaacatttgcccagactcgtaccaaacttttccgccctgggctcgggatcctggactccggggcctccccgtcctcccctttcccgggttccagctccggcctctggactaggaaccgacagcccccctccccgcgtccctccctctctctccagccgttttggggaggggctctccacgctccggatagttcccgagggtcatccgcgccgcactcgcctttccgtttcgccttcacctggatataatttccgagcgaagctgcccccaggatgaccacgctggccggcgctgtgcccaggatgatgcggccgggcccggggcagaactacccgcgtagcgggttcccgctggaagtgtccactcccctcggccagggccgcgtcaaccagctcggcggtgtttttatcaacggcaggccgctgcccaaccacatccgccacaagatcgtggagatggcccaccacggcatccggccctgcgtcatctcgcgccagctgcgcgtgtcccacggctgcgtctccaagatcctgtgcaggtaccaggagactggctccatacgtcctggtgccatcggcggcagcaagcccaagcaggtgacaacgcctgacgtggagaagaaaattgaggaatacaaaagagagaacccgggcatgttcagctgggaaatccgagacaaattactcaaggacgcggtctgtgatcgaaacaccgtgccgtcagtgagttccatcagccgcatcctgagaagtaaattcgggaaaggtgaagaggaggaggccgacttggagaggaaggaggcagaggaaagcgagaagaaggccaaacacagcatcgacggcatcctgagcgagcgagcctcagcaccccaatcagatgaaggctctgatattgactctgaaccagatttaccactaaagaggaaacagcgcagaagccgaaccaccttcacagcagaacagctggaggaactggagcgtgcttttgagagaactcattaccctgacatttatactagggaggaactggcccagagggcgaagctcaccgaggcccgagtacaggtctggtttagcaaccgccgtgcaagatggaggaagcaagctggggccaatcaactgatggctttcaaccatctcattcccggggggttccctcccactgccatgccgaccttgccaacgtaccagctgtcggagacctcttaccagcccacatctattccacaagctgtgtcagatcccagcagcaccgttcacagacctcaaccgcttcctccaagcactgtacaccaaagcacgattccttccaacccagacagcagctctgcctactgcctccccagcaccaggcatggattttccagctatacagacagctttgtgcctccgtcggggccctccaaccccatgaaccccaccattggcaatggcctctcacctcaggtaatgggactcctgaccaaccacggtggggtacctcatcagccccagactgattacgcgctctcccctctcaccgggggtctggaacctaccaccacggtgtcggccagctgcagtcagagactagaccatatgaagagcttggacagtctgccaacatctcagtcctactgtccacccacctatagcaccacaggctacagtatggaccctgtcacaggctaccaatatgggcagtatggacaaagtgcctttcattatctcaagccagatatcgcttggtttcaaatccttttgaacacgttcgacaaaagcagtggagaagaggaagacctggagcaataaaagacaaatgcaacattttaaggcaatggtttcacatggttacatatcaaaacatcccaattctttagtgctgatcatcgaggagctagaacattccatttgcttgtgtgcgtgcgtgcgtgtgtgtgtgtgtgtgtgtattgagatttacccagactggtttgggcaagcagactgttctaaaatataatagaataccctaaagtataacatgtcgatgttcgatgctgatacttctacaactttaaaactgctcatttcatgaagcaagaatggaggaatccttgactcttacacactggaaattgaaataaagataaatgcaaccatttttaggaagctagactagctgtaaaggacctcctaaataaattatttgttactgtatcctcatttgtaatctagttgtcaataaatggcccggacatgtcttgctaacaggatatgggctaccaggaagaaggacttgtttccctttcctgtgtggggagaggtgtgtgacgtttttccagttcacatttatttggtagcccacctgggttggaggaagggcacggtggagagaaagtgacatgcattcacatatctgcttatcagtgtgcaatactgtgtacctcatggatgctttggcaatgcccaaggcgatataagcaaaatcagaagtatatttttgcaggtgcttttattttcacagcccataattcatagtgatagagtgcagtgatgtttgccatttgctggacaaccaacacccgggttgctcctttgattagagaccagatcagataattatgcttttaaactgattacgtttacattcttctcttttctatgaaaggcagggcaagaacagaagtgttcacatggctctcatgtacttttaaattatacaatgatatccaatattaaaagattataggaactgaggtttacatacgtttgtgtggtgacattttagaatgtcaataaatttgctttttgagatgttgagaggaacaagaaggtggaaggcagtgttatttatttctttctattcttggaaccacgaatgaggtaggcacaaatacattccttttagagttaagaactatgacgtagcgagttagtgagactagacatagtaccgaatttagttcatgcattggtcttagagggtgatggaacaagagaagtactatctttgtgttgcagcctcaaccaacaacaatgtgttgtaaaaatgtctttcatgtaaaaagtgcagtaaatatttactatttataatgaataaacagttatgaaaactt

SEQ ID NO: 14770 - DNA, 3109 bp, Homo sapiens
  source 1..3109: mol_type = unassigned DNA
actcggtgtcaccacaggaggagactcaggcaggccgcgctccagcctcaccaggctccccggctcgccgtggctctctgagcccccttttcagggaccccagtcgctggaacatttgcccagactcgtaccaaacttttccgccctgggctcgggatcctggactccggggcctccccgtcctcccctttcccgggttccagctccggcctctggactaggaaccgacagcccccctccccgcgtccctccctctctctccagccgttttggggaggggctctccacgctccggatagttcccgagggtcatccgcgccgcactcgcctttccgtttcgccttcacctggatataatttccgagcgaagctgcccccaggatgaccacgctggccggcgctgtgcccaggatgatgcggccgggcccggggcagaactacccgcgtagcgggttcccgctggaagtgtccactcccctcggccagggccgcgtcaaccagctcggcggtgtttttatcaacggcaggccgctgcccaaccacatccgccacaagatcgtggagatggcccaccacggcatccggccctgcgtcatctcgcgccagctgcgcgtgtcccacggctgcgtctccaagatcctgtgcaggtaccaggagactggctccatacgtcctggtgccatcggcggcagcaagcccaagcaggtgacaacgcctgacgtggagaagaaaattgaggaatacaaaagagagaacccgggcatgttcagctgggaaatccgagacaaattactcaaggacgcggtctgtgatcgaaacaccgtgccgtcagtgagttccatcagccgcatcctgagaagtaaattcgggaaaggtgaagaggaggaggccgacttggagaggaaggaggcagaggaaagcgagaagaaggccaaacacagcatcgacggcatcctgagcgagcgagcctcagcaccccaatcagatgaaggctctgatattgactctgaaccagatttaccactaaagaggaaacagcgcagaagccgaaccaccttcacagcagaacagctggaggaactggagcgtgcttttgagagaactcattaccctgacatttatactagggaggaactggcccagagggcgaagctcaccgaggcccgagtacaggtctggtttagcaaccgccgtgcaagatggaggaagcaagctggggccaatcaactgatggctttcaaccatctcattcccggggggttccctcccactgccatgccgaccttgccaacgtaccagctgtcggagacctcttaccagcccacatctattccacaagctgtgtcagatcccagcagcaccgttcacagacctcaaccgcttcctccaagcactgtacaccaaagcacgattccttccaacccagacagcagctctgcctactgcctccccagcaccaggcatggattttccagctatacagacagctttgtgcctccgtcggggccctccaaccccatgaaccccaccattggcaatggcctctcacctcaggtgcctttcattatctcaagccagatatcgcgtaagtgaactgtccacttggagctaaaactggccctgtttctggtcttcgcagcctagatatgaagaatctgctctgaaaacaaaaaaaaattacccttttgttggggggggtggggcagtggtcccaataggagacaaaggagagtgattgattttcttcctccaatagttggtttcaaatccttttgaacacgttcgacaaaagcagtggagaagaggaagacctggagcaataaaagacaaatgcaacattttaaggcaatggtttcacatggttacatatcaaaacatcccaattctttagtgctgatcatcgaggagctagaacattccatttgcttgtgtgcgtgcgtgcgtgtgtgtgtgtgtgtgtgtattgagatttacccagactggtttgggcaagcagactgttctaaaatataatagaataccctaaagtataacatgtcgatgttcgatgctgatacttctacaactttaaaactgctcatttcatgaagcaagaatggaggaatccttgactcttacacactggaaattgaaataaagataaatgcaaccatttttaggaagctagactagctgtaaaggacctcctaaataaattatttgttactgtatcctcatttgtaatctagttgtcaataaatggcccggacatgtcttgctaacaggatatgggctaccaggaagaaggacttgtttccctttcctgtgtggggagaggtgtgtgacgtttttccagttcacatttatttggtagcccacctgggttggaggaagggcacggtggagagaaagtgacatgcattcacatatctgcttatcagtgtgcaatactgtgtacctcatggatgctttggcaatgcccaaggcgatataagcaaaatcagaagtatatttttgcaggtgcttttattttcacagcccataattcatagtgatagagtgcagtgatgtttgccatttgctggacaaccaacacccgggttgctcctttgattagagaccagatcagataattatgcttttaaactgattacgtttacattcttctcttttctatgaaaggcagggcaagaacagaagtgttcacatggctctcatgtacttttaaattatacaatgatatccaatattaaaagattataggaactgaggtttacatacgtttgtgtggtgacattttagaatgtcaataaatttgctttttgagatgttgagaggaacaagaaggtggaaggcagtgttatttatttctttctattcttggaaccacgaatgaggtaggcacaaatacattccttttagagttaagaactatgacgtagcgagttagtgagactagacatagtaccgaatttagttcatgcattggtcttagagggtgatggaacaagagaagtactatctttgtgttgcagcctcaaccaacaacaatgtgttgtaaaaatgtctttcatgtaaaaagtgcagtaaatatttactatttataatgaataaacagttatgaaaactt

SEQ ID NO: 14771 - DNA, 3610 bp, Homo sapiens
  source 1..3610: mol_type = unassigned DNA
gtccctccctctctctccagccgttttggggaggggctctccacgctccggatagttcccgagggtcatccgcgccgcactcgcctttccgtttcgccttcacctggatataatttccgagcgaagctgcccccaggatgaccacgctggccggcgctgtgcccaggatgatgcggccgggcccggggcagaactacccgcgtagcgggttcccgctggaagtgtccactcccctcggccagggccgcgtcaaccagctcggcggtgtttttatcaacggcaggccgctgcccaaccacatccgccacaagatcgtggagatggcccaccacggcatccggccctgcgtcatctcgcgccagctgcgcgtgtcccacggctgcgtctccaagatcctgtgcaggtaccaggagactggctccatacgtcctggtgccatcggcggcagcaagcccaagcaggtgacaacgcctgacgtggagaagaaaattgaggaatacaaaagagagaacccgggcatgttcagctgggaaatccgagacaaattactcaaggacgcggtctgtgatcgaaacaccgtgccgtcagtgagttccatcagccgcatcctgagaagtaaattcgggaaaggtgaagaggaggaggccgacttggagaggaaggaggcagaggaaagcgagaagaaggccaaacacagcatcgacggcatcctgagcgagcgagcctcagcaccccaatcagatgaaggctctgatattgactctgaaccagatttaccactaaagaggaaacagcgcagaagccgaaccaccttcacagcagaacagctggaggaactggagcgtgcttttgagagaactcattaccctgacatttatactagggaggaactggcccagagggcgaagctcaccgaggcccgagtacaggtctggtttagcaaccgccgtgcaagatggaggaagcaagctggggccaatcaactgatggctttcaaccatctcattcccggggggttccctcccactgccatgccgaccttgccaacgtaccagctgtcggagacctcttaccagcccacatctattccacaagctgtgtcagatcccagcagcaccgttcacagacctcaaccgcttcctccaagcactgtacaccaaagcacgattccttccaacccagacagcagctctgcctactgcctccccagcaccaggcatggattttccagctatacagacagctttgtgcctccgtcggggccctccaaccccatgaaccccaccattggcaatggcctctcacctcaggtaatgggactcctgaccaaccacggtggggtacctcatcagccccagactgattacgcgctctcccctctcaccgggggtctggaacctaccaccacggtgtcggccagctgcagtcagagactagaccatatgaagagcttggacagtctgccaacatctcagtcctactgtccacccacctatagcaccacaggctacagtatggaccctgtcacaggctaccaatatgggcagtatggacaaagtaagccttggactttttagggggcaatttctcctggaagggagataaactcaactcttccttaagaaaggtgaattagaggcaagattaagccacacatgccggtatcaatttttttttttttttgcaaagccagctgactgttccagcaggggcttccttgtgtaattattttcttaactgatgtcaacaacatcttgcggttattaattgttgagacgtgaaacctgattgccactaggtaaaacacaagggttggccaaaatgaaataatccctgacattagaaacacatgttcttaatgaggtcagctccaggatcatatgggggataatcccagggacacaaagttgtgtcaaacttgtctcaggaataaaaatattagtctcaagcctttgatagcacggtattaaatatgacattgtcagcctgtagctgatcttgcccctgactgtgaattgtcccagcatgacctaaaaagctgcgtgtgtttccttacaggtgcctttcattatctcaagccagatatcgcgtaagtgaactgtccacttggagctaaaactggccctgtttctggtcttcgcagcctagatatgaagaatctgctctgaaaacaaaaaaaaattacccttttgttggggggggtggggcagtggtcccaataggagacaaaggagagtgattgattttcttcctccaatagttggtttcaaatccttttgaacacgttcgacaaaagcagtggagaagaggaagacctggagcaataaaagacaaatgcaacattttaaggcaatggtttcacatggttacatatcaaaacatcccaattctttagtgctgatcatcgaggagctagaacattccatttgcttgtgtgcgtgcgtgcgtgtgtgtgtgtgtgtgtgtattgagatttacccagactggtttgggcaagcagactgttctaaaatataatagaataccctaaagtataacatgtcgatgttcgatgctgatacttctacaactttaaaactgctcatttcatgaagcaagaatggaggaatccttgactcttacacactggaaattgaaataaagataaatgcaaccatttttaggaagctagactagctgtaaaggacctcctaaataaattatttgttactgtatcctcatttgtaatctagttgtcaataaatggcccggacatgtcttgctaacaggatatgggctaccaggaagaaggacttgtttccctttcctgtgtggggagaggtgtgtgacgtttttccagttcacatttatttggtagcccacctgggttggaggaagggcacggtggagagaaagtgacatgcattcacatatctgcttatcagtgtgcaatactgtgtacctcatggatgctttggcaatgcccaaggcgatataagcaaaatcagaagtatatttttgcaggtgcttttattttcacagcccataattcatagtgatagagtgcagtgatgtttgccatttgctggacaaccaacacccgggttgctcctttgattagagaccagatcagataattatgcttttaaactgattacgtttacattcttctcttttctatgaaaggcagggcaagaacagaagtgttcacatggctctcatgtacttttaaattatacaatgatatccaatattaaaagattataggaactgaggtttacatacgtttgtgtggtgacattttagaatgtcaataaatttgctttttgagatgttgagaggaacaagaaggtggaaggcagtgttatttatttctttctattcttggaaccacgaatgaggtaggcacaaatacattccttttagagttaagaactatgacgtagcgagttagtgagactagacatagtaccgaatttagttcatgcattggtcttagagggtgatggaacaagagaagtactatctttgtgttgcagcctcaaccaacaacaatgtgttgtaaaaatgtctttcatgtaaaaagtgcagtaaatatttactatttataatgaataaacagttatgaaaa

SEQ ID NO: 14772 - DNA, 2038 bp, Homo sapiens
  source 1..2038: mol_type = unassigned DNA
actcggtgtcaccacaggaggagactcaggcaggccgcgctccagcctcaccaggctccccggctcgccgtggctctctgagcccccttttcagggaccccagtcgctggaacatttgcccagactcgtaccaaacttttccgccctgggctcgggatcctggactccggggcctccccgtcctcccctttcccgggttccagctccggcctctggactaggaaccgacagcccccctccccgcgtccctccctctctctccagccgttttggggaggggctctccacgctccggatagttcccgagggtcatccgcgccgcactcgcctttccgtttcgccttcacctggatataatttccgagcgaagctgcccccaggatgaccacgctggccggcgctgtgcccaggatgatgcggccgggcccggggcagaactacccgcgtagcgggttcccgctggaagtgtccactcccctcggccagggccgcgtcaaccagctcggcggtgtttttatcaacggcaggccgctgcccaaccacatccgccacaagatcgtggagatggcccaccacggcatccggccctgcgtcatctcgcgccagctgcgcgtgtcccacggctgcgtctccaagatcctgtgcaggtaccaggagactggctccatacgtcctggtgccatcggcggcagcaagcccaagcaggtgacaacgcctgacgtggagaagaaaattgaggaatacaaaagagagaacccgggcatgttcagctgggaaatccgagacaaattactcaaggacgcggtctgtgatcgaaacaccgtgccgtcagtgagttccatcagccgcatcctgagaagtaaattcgggaaaggtgaagaggaggaggccgacttggagaggaaggaggcagaggaaagcgagaagaaggccaaacacagcatcgacggcatcctgagcgagcgagcctcagcaccccaatcagatgaaggctctgatattgactctgaaccagatttaccactaaagaggaaacagcgcagaagccgaaccaccttcacagcagaacagctggaggaactggagcgtgcttttgagagaactcattaccctgacatttatactagggaggaactggcccagagggcgaagctcaccgaggcccgagtacaggtctggtttagcaaccgccgtgcaagatggaggaagcaagctggggccaatcaactgatggctttcaaccatctcattcccggggggttccctcccactgccatgccgaccttgccaacgtaccagctgtcggagacctcttaccagcccacatctattccacaagctgtgtcagatcccagcagcaccgttcacagacctcaaccgcttcctccaagcactgtacaccaaagcacgattccttccaacccagacagcagctctgcctactgcctccccagcaccaggcatggattttccagctatacagacagctttgtgcctccgtcggggccctccaaccccatgaaccccaccattggcaatggcctctcacctcaggtgcctttcattatctcaagccagatatcgcttggtttcaaatccttttgaacacgttcgacaaaagcagtggagaagaggaagacctggagcaataaaagacaaatgcaacattttaaggcaatggtttcacatggttacatatcaaaacatcccaattctttagtgctgatcatcgaggagctagaacattccatttgcttgtgtgcgtgcgtgcgtgtgtgtgtgtgtgtgtgtattgagatttacccagactggtttgggcaagcagactgttctaaaatataatagaataccctaaagtataacatgtcgatgttcgatgctgatacttctacaactttaaaactgctcatttcatgaagcaagaatggaggaatccttgactcttacacactggaaattgaaataaagataaatgcaaccatttttaggaagctagactagctgtaaaggacctcctaaataaattatttgttactgt

SEQ ID NO: 14773 - DNA, 2258 bp, Homo sapiens
  source 1..2258: mol_type = unassigned DNA
actcggtgtcaccacaggaggagactcaggcaggccgcgctccagcctcaccaggctccccggctcgccgtggctctctgagcccccttttcagggaccccagtcgctggaacatttgcccagactcgtaccaaacttttccgccctgggctcgggatcctggactccggggcctccccgtcctcccctttcccgggttccagctccggcctctggactaggaaccgacagcccccctccccgcgtccctccctctctctccagccgttttggggaggggctctccacgctccggatagttcccgagggtcatccgcgccgcactcgcctttccgtttcgccttcacctggatataatttccgagcgaagctgcccccaggatgaccacgctggccggcgctgtgcccaggatgatgcggccgggcccggggcagaactacccgcgtagcgggttcccgctggaagtgtccactcccctcggccagggccgcgtcaaccagctcggcggtgtttttatcaacggcaggccgctgcccaaccacatccgccacaagatcgtggagatggcccaccacggcatccggccctgcgtcatctcgcgccagctgcgcgtgtcccacggctgcgtctccaagatcctgtgcaggtaccaggagactggctccatacgtcctggtgccatcggcggcagcaagcccaagcaggtgacaacgcctgacgtggagaagaaaattgaggaatacaaaagagagaacccgggcatgttcagctgggaaatccgagacaaattactcaaggacgcggtctgtgatcgaaacaccgtgccgtcagtgagttccatcagccgcatcctgagaagtaaattcgggaaaggtgaagaggaggaggccgacttggagaggaaggaggcagaggaaagcgagaagaaggccaaacacagcatcgacggcatcctgagcgagcgagcctcagcaccccaatcagatgaaggctctgatattgactctgaaccagatttaccactaaagaggaaacagcgcagaagccgaaccaccttcacagcagaacagctggaggaactggagcgtgcttttgagagaactcattaccctgacatttatactagggaggaactggcccagagggcgaagctcaccgaggcccgagtacaggtctggtttagcaaccgccgtgcaagatggaggaagcaagctggggccaatcaactgatggctttcaaccatctcattcccggggggttccctcccactgccatgccgaccttgccaacgtaccagctgtcggagacctcttaccagcccacatctattccacaagctgtgtcagatcccagcagcaccgttcacagacctcaaccgcttcctccaagcactgtacaccaaagcacgattccttccaacccagacagcagctctgcctactgcctccccagcaccaggcatggattttccagctatacagacagctttgtgcctccgtcggggccctccaaccccatgaaccccaccattggcaatggcctctcacctcaggtaatgggactcctgaccaaccacggtggggtacctcatcagccccagactgattacgcgctctcccctctcaccgggggtctggaacctaccaccacggtgtcggccagctgcagtcagagactagaccatatgaagagcttggacagtctgccaacatctcagtcctactgtccacccacctatagcaccacaggctacagtatggaccctgtcacaggctaccaatatgggcagtatggacaaagtgcctttcattatctcaagccagatatcgcgtaagtgaactgtccacttggagctaaaactggccctgtttctggtcttcgcagcctagatatgaagaatctgctctgaaaacaaaaaaaaattacccttttgttggggggggtggggcagtggtcccaataggagacaaaggagagtgattgattttcttcctccaatagttggtttcaaatccttttgaacacgttcgacaaaagcagtggagaagaggaagacctggagcaataaaagacaaatgcaacattttaaggcaatggtttcacatggttacatatcaaaacatcccaattctttagtgctgatcatcgaggagctagaacattccatttgcttgtgtgcgtgcgtgcgtgtgtgtgtgtgtgtgtgtattgagatttacccagactggtttgggcaagcagactgttctaaaatat

SEQ ID NO: 14774 - DNA, 1782 bp, Homo sapiens
  source 1..1782: mol_type = unassigned DNA
agtcgctggaacatttgcccagactcgtaccaaacttttccgccctgggctcgggatcctggactccggggcctccccgtcctcccctttcccgggttccagctccggcctctggactaggaaccgacagcccccctccccgcgtccctccctctctctccagccgttttggggaggggctctccacgctccggatagttcccgagggtcatccgcgccgcactcgcctttccgtttcgccttcacctggatataatttccgagcgaagctgcccccaggatgaccacgctggccggcgctgtgcccaggatgatgcggccgggcccggggcagaactacccgcgtagcgggttcccgctggaagtgtccactcccctcggccagggccgcgtcaaccagctcggcggtgtttttatcaacggcaggccgctgcccaaccacatccgccacaagatcgtggagatggcccaccacggcatccggccctgcgtcatctcgcgccagctgcgcgtgtcccacggctgcgtctccaagatcctgtgcaggtaccaggagactggctccatacgtcctggtgccatcggcggcagcaagcccaaggtgacaacgcctgacgtggagaagaaaattgaggaatacaaaagagagaacccgggcatgttcagctgggaaatccgagacaaattactcaaggacgcggtctgtgatcgaaacaccgtgccgtcagtgagttccatcagccgcatcctgagaagtaaattcgggaaaggtgaagaggaggaggccgacttggagaggaaggaggcagaggaaagcgagaagaaggccaaacacagcatcgacggcatcctgagcgagcgagcctcagcaccccaatcagatgaaggctctgatattgactctgaaccagatttaccactaaagaggaaacagcgcagaagccgaaccaccttcacagcagaacagctggaggaactggagcgtgcttttgagagaactcattaccctgacatttatactagggaggaactggcccagagggcgaagctcaccgaggcccgagtacaggtctggtttagcaaccgccgtgcaagatggaggaagcaagctggggccaatcaactgatggctttcaaccatctcattcccggggggttccctcccactgccatgccgaccttgccaacgtaccagctgtcggagacctcttaccagcccacatctattccacaagctgtgtcagatcccagcagcaccgttcacagacctcaaccgcttcctccaagcactgtacaccaaagcacgattccttccaacccagacagcagctctgcctactgcctccccagcaccaggcatggattttccagctatacagacagctttgtgcctccgtcggggccctccaaccccatgaaccccaccattggcaatggcctctcacctcaggtaatgggactcctgaccaaccacggtggggtacctcatcagccccagactgattacgcgctctcccctctcaccgggggtctggaacctaccaccacggtgtcggccagctgcagtcagagactagaccatatgaagagcttggacagtctgccaacatctcagtcctactgtccacccacctatagcaccacaggctacagtatggaccctgtcacaggctaccaatatgggcagtatggacaaagtgcctttcattatctcaagccagatatcgcgtaagtgaactgtccacttggagctaaaactggccctgtttctggtcttcgcag

SEQ ID NO: 14775 - DNA, 822 bp, Homo sapiens
  source 1..822: mol_type = unassigned DNA
gttgagggtagggaggggagttcctgttgttcctactcctgctcagtgattcctgcccatggtcctcataaggttcatgggggctgttgttgcaagatcatggtgggtccctgaagcccctctactgacctttgacactaaactcttcttttactcctgacaattcgcccaaacaacacagaaggcagagaactcttgcatctatttgccctttcagtctggtttagcaaccgccgtgcaagatggaggaagcaagctggggccaatcaactgatggctttcaaccatctcattcccggggggttccctcccactgccatgccgaccttgccaacgtaccagctgtcggagacctcttaccagcccacatctattccacaagctgtgtcagatcccagcagcaccgttcacagacctcaaccgcttcctccaagcactgtacaccaaagcacgattccttccaacccagacagcagctctgcctactgcctccccagcaccaggcatggattttccagctatacagacagctttgtgcctccgtcggggccctccaaccccatgaaccccaccattggcaatggcctctcacctcaggtaatgggactcctgaccaaccacggtggggtacctcatcagccccagactgattacgcgctctcccctctcaccgggggtctggaacctaccaccacggtgtcggccagctgcagtcagagactagaccatatgaagagcttggacagtctgccaacatctcagtcctactgtccacccacctatagcaccacaggctacagtatggaccctgtcacaggctac

SEQ ID NO: 14776 - DNA, 458 bp, Homo sapiens
  source 1..458: mol_type = unassigned DNA
taaattttaaattaaatccataggtctggtttagcaaccgccgtgcaagatggaggaagcaagctggggccaatcaactgatggctttcaaccatctcattcccggggggttccctcccactgccatgccgaccttgccaacgtaccagctgtcggagacctcttaccagcccacatctattccacaagctgtgtcagatcccagcagcaccgttcacagacctcaaccgcttcctccaagcactgtacaccaaagcacgattccttccaacccagacagcagctctgcctactgcctccccagcaccaggcatggattttccagctatacagacagctttgtgcctccgtcggggccctccaaccccatgaaccccaccattggcaatggcctctcacctcaggtaatgggactcctgaccaaccacggtggggtacctcatcagccccagactgat

SEQ ID NO: 14777 - DNA, 1254 bp, Homo sapiens
  source 1..1254: mol_type = unassigned DNA
ccctctctctccagccgttttggggaggggctctccacgctccggatagttcccgagggtcatccgcgccgcactcgcctttccgtttcgccttcacctggatataatttccgagcgaagctgcccccaggatgaccacgctggccggcgctgtgcccaggatgatgcggccgggcccggggcagaactacccgcgtagcgggttcccgctggaagtgtccactcccctcggccagggccgcgtcaaccagctcggcggtgtttttatcaacggcaggccgctgcccaaccacatccgccacaagatcgtggagatggcccaccacggcatccggccctgcgtcatctcgcgccagctgcgcgtgtcccacggctgcgtctccaagatcctgtgcaggtaccaggagactggctccatacgtcctggtgccatcggcggcagcaagcccaagcaggtgacaacgcctgacgtggagaagaaaattgaggaatacaaaagagagaacccgggcatgttcagctgggaaatccgagacaaattactcaaggacgcggtctgtgatcgaaacaccgtgccgtcagtgagttccatcagccgcatcctgagaagtaaattcgggaaaggtgaagaggaggaggccgacttggagaggaaggaggcagaggaaagcgagaagaaggccaaacacagcatcgacggcatcctgagcgagcgaggtaagcggtggcgccttgggcggcgcacttgctgggtgacttggagggcatcggctagctgacattggtgatctgacggcagccaagcccagctcggatcaaggtcccttcatgcgcggtgtctctgcgcctgagtaacgacatggaactgaaagaccagagggacactaggaatcaaaacaaacatttctattctgcttagtttttctgttttgtaaatctttctttcttaaccactttcagcccctgggattctagaactgtgaattgtgctctgttgtagggggcaggggaagctctcactctgttgccattaaatgtatgagactgggcatctctgagcaattgtagggccggggatagagggtacttgaatcttcagaagttgaagtagcttttatgccctcaggaaaggccctggtctccggagtttcctcgcattaaaggagagagagagagagtactcttttgggcaacggccctccaaaattgcccccacattggctgccttataaatatgtctgtgtgttgactggt

SEQ ID NO: 14778 - DNA, 958 bp, Homo sapiens
  source 1..958: mol_type = unassigned DNA
caaacttttccgccctgggctcgggatcctggactccggggcctccccgtcctcccctttcccgggttccagctccggcctctggactaggaaccgacagcccccctccccgcgtccctccctctctctccagccgttttggggaggggctctccacgctccggatagttcccgagggtcatccgcgccgcactcgcctttccgtttcgccttcacctggatataatttccgagcgaagctgcccccaggatgaccacgctggccggcgctgtgcccaggatgatgcggccgggcccggggcagaactacccgcgtagcgggttcccgctggaagtgtccactcccctcggccagggccgcgtcaaccagctcggcggtgtttttatcaacggcaggccgctgcccaaccacatccgccacaagatcgtggagatggcccaccacggcatccggccctgcgtcatctcgcgccagctgcgcgtgtcccacggctgcgtctccaagatcctgtgcaggtaccaggagactggctccatacgtcctggtgccatcggcggcagcaagcccaagcaggtgacaacgcctgacgtggagaagaaaattgaggaatacaaaagagagaacccgggcatgttcagctgggaaatccgagacaaattactcaaggacgcggtctgtgatcgaaacaccgtgccgtcagtgagttccatcagccgcatcctgagaagtaaattcgggaaaggtgaagaggaggaggccgacttggagaggaaggaggcagaggaaagcgagaagaaggccaaacacagcatcgacggcatcctgagcgagcgaggaaaggccctggtctccggagtttcctcgcattaaaggagagagagagagagtactcttttgggcaacggccctccaaaattgcccccacattggctgccttataaatatgtctgtgtgttg

SEQ ID NO: 14779 - DNA, 6901 bp, Homo sapiens
  source 1..6901: mol_type = unassigned DNA
gccatcaccaatcagcataggtgtgctggctgcagccacttccctcacccacactctttatctctcactctccagccgctgacagcccattttattgtcaatctctgtctccttcccaggaatctgagaattgctctcacacaccaacccagcaacatccgtggagaaaactctcaccagcaactcctttaaaacaccgtcatttcaaaccattgtggtcttcaagcaacaacagcagcacaaaaaaccccaaccaaacaaaactcttgacagaagctgtgacaaccagaaaggatgcctcataaagggggaagactttaactaggggcgcgcagatgtgtgaggccttttattgtgagagtggacagacatccgagatttcagagccccatattcgagccccgtggaatcccgcggcccccagccagagccagcatgcagaacagtcacagcggagtgaatcagctcggtggtgtctttgtcaacgggcggccactgccggactccacccggcagaagattgtagagctagctcacagcggggcccggccgtgcgacatttcccgaattctgcagacccatgcagatgcaaaagtccaagtgctggacaatcaaaacgtgtccaacggatgtgtgagtaaaattctgggcaggtattacgagactggctccatcagacccagggcaatcggtggtagtaaaccgagagtagcgactccagaagttgtaagcaaaatagcccagtataagcgggagtgcccgtccatctttgcttgggaaatccgagacagattactgtccgagggggtctgtaccaacgataacataccaagcgtgtcatcaataaacagagttcttcgcaacctggctagcgaaaagcaacagatgggcgcagacggcatgtatgataaactaaggatgttgaacgggcagaccggaagctggggcacccgccctggttggtatccggggacttcggtgccagggcaacctacgcaagatggctgccagcaacaggaaggagggggagagaataccaactccatcagttccaacggagaagattcagatgaggctcaaatgcgacttcagctgaagcggaagctgcaaagaaatagaacatcctttacccaagagcaaattgaggccctggagaaagagtttgagagaacccattatccagatgtgtttgcccgagaaagactagcagccaaaatagatctacctgaagcaagaatacaggtatggttttctaatcgaagggccaaatggagaagagaagaaaaactgaggaatcagagaagacaggccagcaacacacctagtcatattcctatcagcagtagtttcagcaccagtgtctaccaaccaattccacaacccaccacaccggtttcctccttcacatctggctccatgttgggccgaacagacacagccctcacaaacacctacagcgctctgccgcctatgcccagcttcaccatggcaaataacctgcctatgcaacccccagtccccagccagacctcctcatactcctgcatgctgcccaccagcccttcggtgaatgggcggagttatgatacctacacccccccacatatgcagacacacatgaacagtcagccaatgggcacctcgggcaccacttcaacaggactcatttcccctggtgtgtcagttccagttcaagttcccggaagtgaacctgatatgtctcaatactggccaagattacagtaaaaaaaaaaaaaaaaaaaaaaaggaaaggaaatattgtgttaattcagtcagtgactatggggacacaacagttgagctttcaggaaagaaagaaaaatggctgttagagccgcttcagttctacaattgtgtcctgtattgtaccactggggaaggaatggacttgaaacaaggacctttgtatacagaaggcacgatatcagttggaacaaatcttcattttggtatccaaacttttattcattttggtgtattatttgtaaatgggcatttgtatgttataatgaaaaaaagaacaatgtagactggatggatgtttgatctgtgttggtcatgaagttgttttttttttttttaaaaagaaaaccatgatcaacaagctttgccacgaatttaagagttttatcaagatatatcgaatacttctacccatctgttcatagtttatggactgatgttccaagtttgtatcattcctttgcatataattaaacctggaacaacatgcactagatttatgtcagaaatatctgttggttttccaaaggttgttaacagatgaagtttatgtgcaaaaaagggtaagatataaattcaaggaagaaaaaaagttgatagctaaaaggtagagtgtgtcttcgatataatccaatttgttttatgtcaaaatgtaagtatttgtcttccctagaaatcctcagaatgatttctataataaagttaatttcatttatatttgacaagaatatagatgttttatacacattttcatgcaatcatacgtttcttttttggccagcaaaagttaattgttcttagatatagttgtattactgttcacggtccaatcattttgtgcatctagagttcattcctaatcaattaaaagtgcttgcaagagttttaaacttaagtgttttgaagttgttcacaactacatatcaaaattaaccattgttgattgtaaaaaaccatgccaaagcctttgtatttcctttattatacagttttctttttaaccttatagtgtggtgttacaaattttatttccatgttagatcaacattctaaaccaatggttactttcacacacactctgttttacatcctgatgatccttaaaaaataatccttatagataccataaatcaaaaacgtgttagaaaaaaattccacttacagcagggtgtagatctgtgcccatttatacccacaacatatatacaaaatggtaacatttcccagttagccatttaattctaaagctcaaagtctagaaataatttaaaaatgcaacaagcgattagctaggaattgttttttgaattaggactggcattttcaatctgggcagatttccattgtcagcctatttcaacaatgatttcactgaagtatattcaaaagtagatttcttaaaggagactttctgaaagctgttgcctttttcaaataggccctctcccttttctgtctccctcccctttgcacaagaggcatcatttcccattgaaccactacagctgttcccatttgaatcttgctttctgtgcggttgtggatggttggagggtggaggggggatgttgcatgtcaaggaataatgagcacagacacatcaacagacaacaacaaagcagactgtgactggccggtgggaattaaaggccttcagtcattggcagcttaagccaaacattcccaaatctatgaagcagggcccattgttggtcagttgttatttgcaatgaagcacagttctgatcatgtttaaagtggaggcacgcagggcaggagtgcttgagcccaagcaaaggatggaaaaaaataagcctttgttgggtaaaaaaggactgtctgagactttcatttgttctgtgcaacatataagtcaatacagataagtcttcctctgcaaacttcactaaaaagcctgggggttctggcagtctagattaaaatgcttgcacatgcagaaacctctggggacaaagacacacttccactgaattatactctgctttaaaaaaatccccaaaagcaaatgatcagaaatgtagaaattaatggaaggatttaaacatgaccttctcgttcaatatctactgttttttagttaaggaattacttgtgaacagataattgagattcattgctccggcatgaaatatactaataattttattccaccagagttgctgcacatttggagacaccttcctaagttgcagtttttgtatgtgtgcatgtagttttgttcagtgtcagcctgcactgcacagcagcacatttctgcaggggagtgagcacacatacgcactgttggtacaattgccggtgcagacatttctacctcctgacattttgcagcctacattccctgagggctgtgtgctgagggaactgtcagagaagggctatgtgggagtgcatgccacagctgctggctggcttacttcttccttctcgctggctgtaatttccaccacggtcaggcagccagttccggcccacggttctgttgtgtagacagcagagactttggagacccggatgtcgcacgccaggtgcaagaggtgggaatgggagaaaaggagtgacgtgggagcggagggtctgtatgtgtgcacttgggcacgtatatgtgtgctctgaaggtcaggattgccagggcaaagtagcacagtctggtatagtctgaagaagcggctgctcagctgcagaagccctctggtccggcaggatgggaacggctgccttgccttctgcccacaccctagggacatgagctgtccttccaaacagagctccaggcactctcttggggacagcatggcaggctctgtgtggtagcagtgcctgggagttggccttttactcattgttgaaataatttttgtttattatttatttaacgatacatatatttatatatttatcaatggggtatctgcagggatgttttgacaccatcttccaggatggagattatttgtgaagacttcagtagaatcccaggactaaacgtctaaattttttctccaaacttgactgacttgggaaaaccaggtgaatagaataagagctgaatgttttaagtaataaacgttcaaactgctctaagtaaaaaaatgcattttactgcaatgaatttctagaatatttttcccccaaagctatgcctcctaacccttaaatggtgaacaactggtttcttgctacagctcactgccatttcttcttactatcatcactaggtttcctaagattcactcatacagtattatttgaagattcagctttgttctgtgaatgtcatcttaggattgtgtctatattcttttgcttatttctttttactctgggcctctcatactagtaagattttaaaaagccttttcttctctgtatgtttggctcaccaaggcgaaatatatattcttctctttttcatttctcaagaataaacctcatctgcttttttgtttttctgtgttttggcttggtactgaatgactcaactgctcggttttaaagttcaaagtgtaagtacttagggttagtactgcttatttcaataatgttgacggtgactatctttggaaagcagtaacatgctgtcttagaaatgacattaataatgggcttaaacaaatgaataggggggtccccccactctccttttgtatgcctatgtgtgtctgatttgttaaaagatggacagggaattgattgcagagtgtcgcttccttctaaagtagttttattttgtctactgttagtatttaaagatcctggaggtggacataaggaataaatggaagagaaaagtagatattgtatggtggctactaaaaggaaattcaaaaagtcttagaacccgagcacctgagcaaactgcagtagtcaaaatatttatctcatgttaaagaaaggcaaatctagtgtaagaaatgagtaccatatagggttttgaagttcatatactagaaacacttaaaagatatcatttcagatattacgtttggcattgttcttaagtatttatatctttgagtcaagctgataattaaaaaaaatctgttaatggagtgtatatttcataatgtatcaaaatggtgtctatacctaaggtagcattattgaagagagatatgtttatgtagtaagttattaacataatgagtaacaaataatgtttccagaagaaaggaaaacacattttcagagtgcgtttttatcagaggaagacaaaaatacacacccctctccagtagcttatttttacaaagccggcccagtgaattagaaaaacaaagcacttggatatgatttttggaaagcccaggtacacttattattcaaaatgcacttttactgagtttgaaaagtttcttttatatttaaaataagggttcaaatatgcatattcaatttttatagtagttatctatttgcaaagcatatattaactagtaattggctgttaattttatagacatggtagccagggaagtatatcaatgacctattaagtattttgacaagcaatttacatatctgatgacctcgtatctctttttcagcaagtcaaatgctatgtaattgttccattgtgtgttgtataaaatgaatcaacacggtaagaaaaaggttagagttattaaaataataaactgactaaaatactcatttgaatttattcagaatgttcataatgctttcaaaggacatagcagagcttttgtggagtatccgcacaacattatttattatctatggactaaatcaattttttgaagttgctttaaaatttaaaagcacctttgcttaatataaagccctttaattttaactgacagatcaattctgaaactttattttgaaaagaaaatggggaagaatctgtgtctttagaattaaaagaaatgaaaaaaataaacccgacattctaaaaaaatagaataagaaacctgatttttagtactaatgaaatagcgggtgacaaaatagttgtctttttgattttgatcacaaaaaataaactggtagtgacaggatatgatggagagatttgacatcctggcaaatcactgtcattgattcaattattctaattctgaataaaagctgtatacagtatgtgtttatgcta

SEQ ID NO: 14780 - DNA, 6975 bp, Homo sapiens
  source 1..6975: mol_type = unassigned DNA
gtgattagtgggtttgaaaagggaaccgtggctcggcctcatttcccgctctggttcaggcgcaggaggaagtgttttgctggaggatgatgacagaggtcaggcttcgctaatgggccagtgaggagcggtggaggcgaggccgggcgccggcacacacacattaacacacttgagccatcaccaatcagcataggaatctgagaattgctctcacacaccaacccagcaacatccgtggagaaaactctcaccagcaactcctttaaaacaccgtcatttcaaaccattgtggtcttcaagcaacaacagcagcacaaaaaaccccaaccaaacaaaactcttgacagaagctgtgacaaccagaaaggatgcctcataaagggggaagactttaactaggggcgcgcagatgtgtgaggccttttattgtgagagtggacagacatccgagatttcagagccccatattcgagccccgtggaatcccgcggcccccagccagagccagcatgcagaacagtcacagcggagtgaatcagctcggtggtgtctttgtcaacgggcggccactgccggactccacccggcagaagattgtagagctagctcacagcggggcccggccgtgcgacatttcccgaattctgcagacccatgcagatgcaaaagtccaagtgctggacaatcaaaacgtgtccaacggatgtgtgagtaaaattctgggcaggtattacgagactggctccatcagacccagggcaatcggtggtagtaaaccgagagtagcgactccagaagttgtaagcaaaatagcccagtataagcgggagtgcccgtccatctttgcttgggaaatccgagacagattactgtccgagggggtctgtaccaacgataacataccaagcgtgtcatcaataaacagagttcttcgcaacctggctagcgaaaagcaacagatgggcgcagacggcatgtatgataaactaaggatgttgaacgggcagaccggaagctggggcacccgccctggttggtatccggggacttcggtgccagggcaacctacgcaagatggctgccagcaacaggaaggagggggagagaataccaactccatcagttccaacggagaagattcagatgaggctcaaatgcgacttcagctgaagcggaagctgcaaagaaatagaacatcctttacccaagagcaaattgaggccctggagaaagagtttgagagaacccattatccagatgtgtttgcccgagaaagactagcagccaaaatagatctacctgaagcaagaatacaggtatggttttctaatcgaagggccaaatggagaagagaagaaaaactgaggaatcagagaagacaggccagcaacacacctagtcatattcctatcagcagtagtttcagcaccagtgtctaccaaccaattccacaacccaccacaccggtttcctccttcacatctggctccatgttgggccgaacagacacagccctcacaaacacctacagcgctctgccgcctatgcccagcttcaccatggcaaataacctgcctatgcaacccccagtccccagccagacctcctcatactcctgcatgctgcccaccagcccttcggtgaatgggcggagttatgatacctacacccccccacatatgcagacacacatgaacagtcagccaatgggcacctcgggcaccacttcaacaggactcatttcccctggtgtgtcagttccagttcaagttcccggaagtgaacctgatatgtctcaatactggccaagattacagtaaaaaaaaaaaaaaaaaaaaaaaggaaaggaaatattgtgttaattcagtcagtgactatggggacacaacagttgagctttcaggaaagaaagaaaaatggctgttagagccgcttcagttctacaattgtgtcctgtattgtaccactggggaaggaatggacttgaaacaaggacctttgtatacagaaggcacgatatcagttggaacaaatcttcattttggtatccaaacttttattcattttggtgtattatttgtaaatgggcatttgtatgttataatgaaaaaaagaacaatgtagactggatggatgtttgatctgtgttggtcatgaagttgttttttttttttttaaaaagaaaaccatgatcaacaagctttgccacgaatttaagagttttatcaagatatatcgaatacttctacccatctgttcatagtttatggactgatgttccaagtttgtatcattcctttgcatataattaaacctggaacaacatgcactagatttatgtcagaaatatctgttggttttccaaaggttgttaacagatgaagtttatgtgcaaaaaagggtaagatataaattcaaggaagaaaaaaagttgatagctaaaaggtagagtgtgtcttcgatataatccaatttgttttatgtcaaaatgtaagtatttgtcttccctagaaatcctcagaatgatttctataataaagttaatttcatttatatttgacaagaatatagatgttttatacacattttcatgcaatcatacgtttcttttttggccagcaaaagttaattgttcttagatatagttgtattactgttcacggtccaatcattttgtgcatctagagttcattcctaatcaattaaaagtgcttgcaagagttttaaacttaagtgttttgaagttgttcacaactacatatcaaaattaaccattgttgattgtaaaaaaccatgccaaagcctttgtatttcctttattatacagttttctttttaaccttatagtgtggtgttacaaattttatttccatgttagatcaacattctaaaccaatggttactttcacacacactctgttttacatcctgatgatccttaaaaaataatccttatagataccataaatcaaaaacgtgttagaaaaaaattccacttacagcagggtgtagatctgtgcccatttatacccacaacatatatacaaaatggtaacatttcccagttagccatttaattctaaagctcaaagtctagaaataatttaaaaatgcaacaagcgattagctaggaattgttttttgaattaggactggcattttcaatctgggcagatttccattgtcagcctatttcaacaatgatttcactgaagtatattcaaaagtagatttcttaaaggagactttctgaaagctgttgcctttttcaaataggccctctcccttttctgtctccctcccctttgcacaagaggcatcatttcccattgaaccactacagctgttcccatttgaatcttgctttctgtgcggttgtggatggttggagggtggaggggggatgttgcatgtcaaggaataatgagcacagacacatcaacagacaacaacaaagcagactgtgactggccggtgggaattaaaggccttcagtcattggcagcttaagccaaacattcccaaatctatgaagcagggcccattgttggtcagttgttatttgcaatgaagcacagttctgatcatgtttaaagtggaggcacgcagggcaggagtgcttgagcccaagcaaaggatggaaaaaaataagcctttgttgggtaaaaaaggactgtctgagactttcatttgttctgtgcaacatataagtcaatacagataagtcttcctctgcaaacttcactaaaaagcctgggggttctggcagtctagattaaaatgcttgcacatgcagaaacctctggggacaaagacacacttccactgaattatactctgctttaaaaaaatccccaaaagcaaatgatcagaaatgtagaaattaatggaaggatttaaacatgaccttctcgttcaatatctactgttttttagttaaggaattacttgtgaacagataattgagattcattgctccggcatgaaatatactaataattttattccaccagagttgctgcacatttggagacaccttcctaagttgcagtttttgtatgtgtgcatgtagttttgttcagtgtcagcctgcactgcacagcagcacatttctgcaggggagtgagcacacatacgcactgttggtacaattgccggtgcagacatttctacctcctgacattttgcagcctacattccctgagggctgtgtgctgagggaactgtcagagaagggctatgtgggagtgcatgccacagctgctggctggcttacttcttccttctcgctggctgtaatttccaccacggtcaggcagccagttccggcccacggttctgttgtgtagacagcagagactttggagacccggatgtcgcacgccaggtgcaagaggtgggaatgggagaaaaggagtgacgtgggagcggagggtctgtatgtgtgcacttgggcacgtatatgtgtgctctgaaggtcaggattgccagggcaaagtagcacagtctggtatagtctgaagaagcggctgctcagctgcagaagccctctggtccggcaggatgggaacggctgccttgccttctgcccacaccctagggacatgagctgtccttccaaacagagctccaggcactctcttggggacagcatggcaggctctgtgtggtagcagtgcctgggagttggccttttactcattgttgaaataatttttgtttattatttatttaacgatacatatatttatatatttatcaatggggtatctgcagggatgttttgacaccatcttccaggatggagattatttgtgaagacttcagtagaatcccaggactaaacgtctaaattttttctccaaacttgactgacttgggaaaaccaggtgaatagaataagagctgaatgttttaagtaataaacgttcaaactgctctaagtaaaaaaatgcattttactgcaatgaatttctagaatatttttcccccaaagctatgcctcctaacccttaaatggtgaacaactggtttcttgctacagctcactgccatttcttcttactatcatcactaggtttcctaagattcactcatacagtattatttgaagattcagctttgttctgtgaatgtcatcttaggattgtgtctatattcttttgcttatttctttttactctgggcctctcatactagtaagattttaaaaagccttttcttctctgtatgtttggctcaccaaggcgaaatatatattcttctctttttcatttctcaagaataaacctcatctgcttttttgtttttctgtgttttggcttggtactgaatgactcaactgctcggttttaaagttcaaagtgtaagtacttagggttagtactgcttatttcaataatgttgacggtgactatctttggaaagcagtaacatgctgtcttagaaatgacattaataatgggcttaaacaaatgaataggggggtccccccactctccttttgtatgcctatgtgtgtctgatttgttaaaagatggacagggaattgattgcagagtgtcgcttccttctaaagtagttttattttgtctactgttagtatttaaagatcctggaggtggacataaggaataaatggaagagaaaagtagatattgtatggtggctactaaaaggaaattcaaaaagtcttagaacccgagcacctgagcaaactgcagtagtcaaaatatttatctcatgttaaagaaaggcaaatctagtgtaagaaatgagtaccatatagggttttgaagttcatatactagaaacacttaaaagatatcatttcagatattacgtttggcattgttcttaagtatttatatctttgagtcaagctgataattaaaaaaaatctgttaatggagtgtatatttcataatgtatcaaaatggtgtctatacctaaggtagcattattgaagagagatatgtttatgtagtaagttattaacataatgagtaacaaataatgtttccagaagaaaggaaaacacattttcagagtgcgtttttatcagaggaagacaaaaatacacacccctctccagtagcttatttttacaaagccggcccagtgaattagaaaaacaaagcacttggatatgatttttggaaagcccaggtacacttattattcaaaatgcacttttactgagtttgaaaagtttcttttatatttaaaataagggttcaaatatgcatattcaatttttatagtagttatctatttgcaaagcatatattaactagtaattggctgttaattttatagacatggtagccagggaagtatatcaatgacctattaagtattttgacaagcaatttacatatctgatgacctcgtatctctttttcagcaagtcaaatgctatgtaattgttccattgtgtgttgtataaaatgaatcaacacggtaagaaaaaggttagagttattaaaataataaactgactaaaatactcatttgaatttattcagaatgttcataatgctttcaaaggacatagcagagcttttgtggagtatccgcacaacattatttattatctatggactaaatcaattttttgaagttgctttaaaatttaaaagcacctttgcttaatataaagccctttaattttaactgacagatcaattctgaaactttattttgaaaagaaaatggggaagaatctgtgtctttagaattaaaagaaatgaaaaaaataaacccgacattctaaaaaaatagaataagaaacctgatttttagtactaatgaaatagcgggtgacaaaatagttgtctttttgattttgatcacaaaaaataaactggtagtgacaggatatgatggagagatttgacatcctggcaaatcactgtcattgattcaattattctaattctgaataaaagctgtatacagtatgtgtttatg

SEQ ID NO: 14781 - DNA, 7300 bp, Homo sapiens
  source 1..7300: mol_type = unassigned DNA
tgcaccctccgaggactgggagtcccgagtccagcttagggggagtgggggcgcgacccccaacccagaaaccttcacttgaccgctcaagttcgcggcagcagggcgggccgcgccgaatctcggcgtgcgcggagcggggagatgcaggcgagcgccagagcccgggctcgggggccctgcgccggggagaggagccgggacccaccggcggagccgaaaacaagtgtattcatattcaaacaaacggaccaattgcaccaggcggggagagggagcatccaatcggctggcgcgaggccccggcgctgctttgcataaagcaatattttgtgtgagagcgagcggtgcatttgcatgttgcggagtgattagtgggtttgaaaagggaaccgtggctcggcctcatttcccgctctggttcaggcgcaggaggaagtgttttgctggaggatgatgacagaggtcaggcttcgctaatgggccagtgaggagcggtggaggcgaggccgggcgccggcacacacacattaacacacttgagccatcaccaatcagcataggaatctgagaattgctctcacacaccaacccagcaacatccgtggagaaaactctcaccagcaactcctttaaaacaccgtcatttcaaaccattgtggtcttcaagcaacaacagcagcacaaaaaaccccaaccaaacaaaactcttgacagaagctgtgacaaccagaaaggatgcctcataaagggggaagactttaactaggggcgcgcagatgtgtgaggccttttattgtgagagtggacagacatccgagatttcagagccccatattcgagccccgtggaatcccgcggcccccagccagagccagcatgcagaacagtcacagcggagtgaatcagctcggtggtgtctttgtcaacgggcggccactgccggactccacccggcagaagattgtagagctagctcacagcggggcccggccgtgcgacatttcccgaattctgcaggtgtccaacggatgtgtgagtaaaattctgggcaggtattacgagactggctccatcagacccagggcaatcggtggtagtaaaccgagagtagcgactccagaagttgtaagcaaaatagcccagtataagcgggagtgcccgtccatctttgcttgggaaatccgagacagattactgtccgagggggtctgtaccaacgataacataccaagcgtgtcatcaataaacagagttcttcgcaacctggctagcgaaaagcaacagatgggcgcagacggcatgtatgataaactaaggatgttgaacgggcagaccggaagctggggcacccgccctggttggtatccggggacttcggtgccagggcaacctacgcaagatggctgccagcaacaggaaggagggggagagaataccaactccatcagttccaacggagaagattcagatgaggctcaaatgcgacttcagctgaagcggaagctgcaaagaaatagaacatcctttacccaagagcaaattgaggccctggagaaagagtttgagagaacccattatccagatgtgtttgcccgagaaagactagcagccaaaatagatctacctgaagcaagaatacaggtatggttttctaatcgaagggccaaatggagaagagaagaaaaactgaggaatcagagaagacaggccagcaacacacctagtcatattcctatcagcagtagtttcagcaccagtgtctaccaaccaattccacaacccaccacaccggtttcctccttcacatctggctccatgttgggccgaacagacacagccctcacaaacacctacagcgctctgccgcctatgcccagcttcaccatggcaaataacctgcctatgcaacccccagtccccagccagacctcctcatactcctgcatgctgcccaccagcccttcggtgaatgggcggagttatgatacctacacccccccacatatgcagacacacatgaacagtcagccaatgggcacctcgggcaccacttcaacaggactcatttcccctggtgtgtcagttccagttcaagttcccggaagtgaacctgatatgtctcaatactggccaagattacagtaaaaaaaaaaaaaaaaaaaaaaaggaaaggaaatattgtgttaattcagtcagtgactatggggacacaacagttgagctttcaggaaagaaagaaaaatggctgttagagccgcttcagttctacaattgtgtcctgtattgtaccactggggaaggaatggacttgaaacaaggacctttgtatacagaaggcacgatatcagttggaacaaatcttcattttggtatccaaacttttattcattttggtgtattatttgtaaatgggcatttgtatgttataatgaaaaaaagaacaatgtagactggatggatgtttgatctgtgttggtcatgaagttgttttttttttttttaaaaagaaaaccatgatcaacaagctttgccacgaatttaagagttttatcaagatatatcgaatacttctacccatctgttcatagtttatggactgatgttccaagtttgtatcattcctttgcatataattaaacctggaacaacatgcactagatttatgtcagaaatatctgttggttttccaaaggttgttaacagatgaagtttatgtgcaaaaaagggtaagatataaattcaaggaagaaaaaaagttgatagctaaaaggtagagtgtgtcttcgatataatccaatttgttttatgtcaaaatgtaagtatttgtcttccctagaaatcctcagaatgatttctataataaagttaatttcatttatatttgacaagaatatagatgttttatacacattttcatgcaatcatacgtttcttttttggccagcaaaagttaattgttcttagatatagttgtattactgttcacggtccaatcattttgtgcatctagagttcattcctaatcaattaaaagtgcttgcaagagttttaaacttaagtgttttgaagttgttcacaactacatatcaaaattaaccattgttgattgtaaaaaaccatgccaaagcctttgtatttcctttattatacagttttctttttaaccttatagtgtggtgttacaaattttatttccatgttagatcaacattctaaaccaatggttactttcacacacactctgttttacatcctgatgatccttaaaaaataatccttatagataccataaatcaaaaacgtgttagaaaaaaattccacttacagcagggtgtagatctgtgcccatttatacccacaacatatatacaaaatggtaacatttcccagttagccatttaattctaaagctcaaagtctagaaataatttaaaaatgcaacaagcgattagctaggaattgttttttgaattaggactggcattttcaatctgggcagatttccattgtcagcctatttcaacaatgatttcactgaagtatattcaaaagtagatttcttaaaggagactttctgaaagctgttgcctttttcaaataggccctctcccttttctgtctccctcccctttgcacaagaggcatcatttcccattgaaccactacagctgttcccatttgaatcttgctttctgtgcggttgtggatggttggagggtggaggggggatgttgcatgtcaaggaataatgagcacagacacatcaacagacaacaacaaagcagactgtgactggccggtgggaattaaaggccttcagtcattggcagcttaagccaaacattcccaaatctatgaagcagggcccattgttggtcagttgttatttgcaatgaagcacagttctgatcatgtttaaagtggaggcacgcagggcaggagtgcttgagcccaagcaaaggatggaaaaaaataagcctttgttgggtaaaaaaggactgtctgagactttcatttgttctgtgcaacatataagtcaatacagataagtcttcctctgcaaacttcactaaaaagcctgggggttctggcagtctagattaaaatgcttgcacatgcagaaacctctggggacaaagacacacttccactgaattatactctgctttaaaaaaatccccaaaagcaaatgatcagaaatgtagaaattaatggaaggatttaaacatgaccttctcgttcaatatctactgttttttagttaaggaattacttgtgaacagataattgagattcattgctccggcatgaaatatactaataattttattccaccagagttgctgcacatttggagacaccttcctaagttgcagtttttgtatgtgtgcatgtagttttgttcagtgtcagcctgcactgcacagcagcacatttctgcaggggagtgagcacacatacgcactgttggtacaattgccggtgcagacatttctacctcctgacattttgcagcctacattccctgagggctgtgtgctgagggaactgtcagagaagggctatgtgggagtgcatgccacagctgctggctggcttacttcttccttctcgctggctgtaatttccaccacggtcaggcagccagttccggcccacggttctgttgtgtagacagcagagactttggagacccggatgtcgcacgccaggtgcaagaggtgggaatgggagaaaaggagtgacgtgggagcggagggtctgtatgtgtgcacttgggcacgtatatgtgtgctctgaaggtcaggattgccagggcaaagtagcacagtctggtatagtctgaagaagcggctgctcagctgcagaagccctctggtccggcaggatgggaacggctgccttgccttctgcccacaccctagggacatgagctgtccttccaaacagagctccaggcactctcttggggacagcatggcaggctctgtgtggtagcagtgcctgggagttggccttttactcattgttgaaataatttttgtttattatttatttaacgatacatatatttatatatttatcaatggggtatctgcagggatgttttgacaccatcttccaggatggagattatttgtgaagacttcagtagaatcccaggactaaacgtctaaattttttctccaaacttgactgacttgggaaaaccaggtgaatagaataagagctgaatgttttaagtaataaacgttcaaactgctctaagtaaaaaaatgcattttactgcaatgaatttctagaatatttttcccccaaagctatgcctcctaacccttaaatggtgaacaactggtttcttgctacagctcactgccatttcttcttactatcatcactaggtttcctaagattcactcatacagtattatttgaagattcagctttgttctgtgaatgtcatcttaggattgtgtctatattcttttgcttatttctttttactctgggcctctcatactagtaagattttaaaaagccttttcttctctgtatgtttggctcaccaaggcgaaatatatattcttctctttttcatttctcaagaataaacctcatctgcttttttgtttttctgtgttttggcttggtactgaatgactcaactgctcggttttaaagttcaaagtgtaagtacttagggttagtactgcttatttcaataatgttgacggtgactatctttggaaagcagtaacatgctgtcttagaaatgacattaataatgggcttaaacaaatgaataggggggtccccccactctccttttgtatgcctatgtgtgtctgatttgttaaaagatggacagggaattgattgcagagtgtcgcttccttctaaagtagttttattttgtctactgttagtatttaaagatcctggaggtggacataaggaataaatggaagagaaaagtagatattgtatggtggctactaaaaggaaattcaaaaagtcttagaacccgagcacctgagcaaactgcagtagtcaaaatatttatctcatgttaaagaaaggcaaatctagtgtaagaaatgagtaccatatagggttttgaagttcatatactagaaacacttaaaagatatcatttcagatattacgtttggcattgttcttaagtatttatatctttgagtcaagctgataattaaaaaaaatctgttaatggagtgtatatttcataatgtatcaaaatggtgtctatacctaaggtagcattattgaagagagatatgtttatgtagtaagttattaacataatgagtaacaaataatgtttccagaagaaaggaaaacacattttcagagtgcgtttttatcagaggaagacaaaaatacacacccctctccagtagcttatttttacaaagccggcccagtgaattagaaaaacaaagcacttggatatgatttttggaaagcccaggtacacttattattcaaaatgcacttttactgagtttgaaaagtttcttttatatttaaaataagggttcaaatatgcatattcaatttttatagtagttatctatttgcaaagcatatattaactagtaattggctgttaattttatagacatggtagccagggaagtatatcaatgacctattaagtattttgacaagcaatttacatatctgatgacctcgtatctctttttcagcaagtcaaatgctatgtaattgttccattgtgtgttgtataaaatgaatcaacacggtaagaaaaaggttagagttattaaaataataaactgactaaaatactcatttgaatttattcagaatgttcataatgctttcaaaggacatagcagagcttttgtggagtatccgcacaacattatttattatctatggactaaatcaattttttgaagttgctttaaaatttaaaagcacctttgcttaatataaagccctttaattttaactgacagatcaattctgaaactttattttgaaaagaaaatggggaagaatctgtgtctttagaattaaaagaaatgaaaaaaataaacccgacattctaaaaaaatagaataagaaacctgatttttagtactaatgaaatagcgggtgacaaaatagttgtctttttgattttgatcacaaaaaataaactggtagtgacaggatatgatggagagatttgacatcctggcaaatcactgtcattgattcaattattctaattctgaataaaagctgtatacagtatgtgtttatg

SEQ ID NO: 14782 - DNA, 6888 bp, Homo sapiens
  source 1..6888: mol_type = unassigned DNA
ggtgcatttgcatgttgcggagtgattagtgggtttgaaaagggaaccgtggctcggcctcatttcccgctctggttcaggcgcaggaggaagtgttttgctggaggatgatgacagaggaatctgagaattgctctcacacaccaacccagcaacatccgtggagaaaactctcaccagcaactcctttaaaacaccgtcatttcaaaccattgtggtcttcaagcaacaacagcagcacaaaaaaccccaaccaaacaaaactcttgacagaagctgtgacaaccagaaaggatgcctcataaagggggaagactttaactaggggcgcgcagatgtgtgaggccttttattgtgagagtggacagacatccgagatttcagagccccatattcgagccccgtggaatcccgcggcccccagccagagccagcatgcagaacagtcacagcggagtgaatcagctcggtggtgtctttgtcaacgggcggccactgccggactccacccggcagaagattgtagagctagctcacagcggggcccggccgtgcgacatttcccgaattctgcagacccatgcagatgcaaaagtccaagtgctggacaatcaaaacgtgtccaacggatgtgtgagtaaaattctgggcaggtattacgagactggctccatcagacccagggcaatcggtggtagtaaaccgagagtagcgactccagaagttgtaagcaaaatagcccagtataagcgggagtgcccgtccatctttgcttgggaaatccgagacagattactgtccgagggggtctgtaccaacgataacataccaagcgtgtcatcaataaacagagttcttcgcaacctggctagcgaaaagcaacagatgggcgcagacggcatgtatgataaactaaggatgttgaacgggcagaccggaagctggggcacccgccctggttggtatccggggacttcggtgccagggcaacctacgcaagatggctgccagcaacaggaaggagggggagagaataccaactccatcagttccaacggagaagattcagatgaggctcaaatgcgacttcagctgaagcggaagctgcaaagaaatagaacatcctttacccaagagcaaattgaggccctggagaaagagtttgagagaacccattatccagatgtgtttgcccgagaaagactagcagccaaaatagatctacctgaagcaagaatacaggtatggttttctaatcgaagggccaaatggagaagagaagaaaaactgaggaatcagagaagacaggccagcaacacacctagtcatattcctatcagcagtagtttcagcaccagtgtctaccaaccaattccacaacccaccacaccggtttcctccttcacatctggctccatgttgggccgaacagacacagccctcacaaacacctacagcgctctgccgcctatgcccagcttcaccatggcaaataacctgcctatgcaacccccagtccccagccagacctcctcatactcctgcatgctgcccaccagcccttcggtgaatgggcggagttatgatacctacacccccccacatatgcagacacacatgaacagtcagccaatgggcacctcgggcaccacttcaacaggactcatttcccctggtgtgtcagttccagttcaagttcccggaagtgaacctgatatgtctcaatactggccaagattacagtaaaaaaaaaaaaaaaaaaaaaaaggaaaggaaatattgtgttaattcagtcagtgactatggggacacaacagttgagctttcaggaaagaaagaaaaatggctgttagagccgcttcagttctacaattgtgtcctgtattgtaccactggggaaggaatggacttgaaacaaggacctttgtatacagaaggcacgatatcagttggaacaaatcttcattttggtatccaaacttttattcattttggtgtattatttgtaaatgggcatttgtatgttataatgaaaaaaagaacaatgtagactggatggatgtttgatctgtgttggtcatgaagttgttttttttttttttaaaaagaaaaccatgatcaacaagctttgccacgaatttaagagttttatcaagatatatcgaatacttctacccatctgttcatagtttatggactgatgttccaagtttgtatcattcctttgcatataattaaacctggaacaacatgcactagatttatgtcagaaatatctgttggttttccaaaggttgttaacagatgaagtttatgtgcaaaaaagggtaagatataaattcaaggaagaaaaaaagttgatagctaaaaggtagagtgtgtcttcgatataatccaatttgttttatgtcaaaatgtaagtatttgtcttccctagaaatcctcagaatgatttctataataaagttaatttcatttatatttgacaagaatatagatgttttatacacattttcatgcaatcatacgtttcttttttggccagcaaaagttaattgttcttagatatagttgtattactgttcacggtccaatcattttgtgcatctagagttcattcctaatcaattaaaagtgcttgcaagagttttaaacttaagtgttttgaagttgttcacaactacatatcaaaattaaccattgttgattgtaaaaaaccatgccaaagcctttgtatttcctttattatacagttttctttttaaccttatagtgtggtgttacaaattttatttccatgttagatcaacattctaaaccaatggttactttcacacacactctgttttacatcctgatgatccttaaaaaataatccttatagataccataaatcaaaaacgtgttagaaaaaaattccacttacagcagggtgtagatctgtgcccatttatacccacaacatatatacaaaatggtaacatttcccagttagccatttaattctaaagctcaaagtctagaaataatttaaaaatgcaacaagcgattagctaggaattgttttttgaattaggactggcattttcaatctgggcagatttccattgtcagcctatttcaacaatgatttcactgaagtatattcaaaagtagatttcttaaaggagactttctgaaagctgttgcctttttcaaataggccctctcccttttctgtctccctcccctttgcacaagaggcatcatttcccattgaaccactacagctgttcccatttgaatcttgctttctgtgcggttgtggatggttggagggtggaggggggatgttgcatgtcaaggaataatgagcacagacacatcaacagacaacaacaaagcagactgtgactggccggtgggaattaaaggccttcagtcattggcagcttaagccaaacattcccaaatctatgaagcagggcccattgttggtcagttgttatttgcaatgaagcacagttctgatcatgtttaaagtggaggcacgcagggcaggagtgcttgagcccaagcaaaggatggaaaaaaataagcctttgttgggtaaaaaaggactgtctgagactttcatttgttctgtgcaacatataagtcaatacagataagtcttcctctgcaaacttcactaaaaagcctgggggttctggcagtctagattaaaatgcttgcacatgcagaaacctctggggacaaagacacacttccactgaattatactctgctttaaaaaaatccccaaaagcaaatgatcagaaatgtagaaattaatggaaggatttaaacatgaccttctcgttcaatatctactgttttttagttaaggaattacttgtgaacagataattgagattcattgctccggcatgaaatatactaataattttattccaccagagttgctgcacatttggagacaccttcctaagttgcagtttttgtatgtgtgcatgtagttttgttcagtgtcagcctgcactgcacagcagcacatttctgcaggggagtgagcacacatacgcactgttggtacaattgccggtgcagacatttctacctcctgacattttgcagcctacattccctgagggctgtgtgctgagggaactgtcagagaagggctatgtgggagtgcatgccacagctgctggctggcttacttcttccttctcgctggctgtaatttccaccacggtcaggcagccagttccggcccacggttctgttgtgtagacagcagagactttggagacccggatgtcgcacgccaggtgcaagaggtgggaatgggagaaaaggagtgacgtgggagcggagggtctgtatgtgtgcacttgggcacgtatatgtgtgctctgaaggtcaggattgccagggcaaagtagcacagtctggtatagtctgaagaagcggctgctcagctgcagaagccctctggtccggcaggatgggaacggctgccttgccttctgcccacaccctagggacatgagctgtccttccaaacagagctccaggcactctcttggggacagcatggcaggctctgtgtggtagcagtgcctgggagttggccttttactcattgttgaaataatttttgtttattatttatttaacgatacatatatttatatatttatcaatggggtatctgcagggatgttttgacaccatcttccaggatggagattatttgtgaagacttcagtagaatcccaggactaaacgtctaaattttttctccaaacttgactgacttgggaaaaccaggtgaatagaataagagctgaatgttttaagtaataaacgttcaaactgctctaagtaaaaaaatgcattttactgcaatgaatttctagaatatttttcccccaaagctatgcctcctaacccttaaatggtgaacaactggtttcttgctacagctcactgccatttcttcttactatcatcactaggtttcctaagattcactcatacagtattatttgaagattcagctttgttctgtgaatgtcatcttaggattgtgtctatattcttttgcttatttctttttactctgggcctctcatactagtaagattttaaaaagccttttcttctctgtatgtttggctcaccaaggcgaaatatatattcttctctttttcatttctcaagaataaacctcatctgcttttttgtttttctgtgttttggcttggtactgaatgactcaactgctcggttttaaagttcaaagtgtaagtacttagggttagtactgcttatttcaataatgttgacggtgactatctttggaaagcagtaacatgctgtcttagaaatgacattaataatgggcttaaacaaatgaataggggggtccccccactctccttttgtatgcctatgtgtgtctgatttgttaaaagatggacagggaattgattgcagagtgtcgcttccttctaaagtagttttattttgtctactgttagtatttaaagatcctggaggtggacataaggaataaatggaagagaaaagtagatattgtatggtggctactaaaaggaaattcaaaaagtcttagaacccgagcacctgagcaaactgcagtagtcaaaatatttatctcatgttaaagaaaggcaaatctagtgtaagaaatgagtaccatatagggttttgaagttcatatactagaaacacttaaaagatatcatttcagatattacgtttggcattgttcttaagtatttatatctttgagtcaagctgataattaaaaaaaatctgttaatggagtgtatatttcataatgtatcaaaatggtgtctatacctaaggtagcattattgaagagagatatgtttatgtagtaagttattaacataatgagtaacaaataatgtttccagaagaaaggaaaacacattttcagagtgcgtttttatcagaggaagacaaaaatacacacccctctccagtagcttatttttacaaagccggcccagtgaattagaaaaacaaagcacttggatatgatttttggaaagcccaggtacacttattattcaaaatgcacttttactgagtttgaaaagtttcttttatatttaaaataagggttcaaatatgcatattcaatttttatagtagttatctatttgcaaagcatatattaactagtaattggctgttaattttatagacatggtagccagggaagtatatcaatgacctattaagtattttgacaagcaatttacatatctgatgacctcgtatctctttttcagcaagtcaaatgctatgtaattgttccattgtgtgttgtataaaatgaatcaacacggtaagaaaaaggttagagttattaaaataataaactgactaaaatactcatttgaatttattcagaatgttcataatgctttcaaaggacatagcagagcttttgtggagtatccgcacaacattatttattatctatggactaaatcaattttttgaagttgctttaaaatttaaaagcacctttgcttaatataaagccctttaattttaactgacagatcaattctgaaactttattttgaaaagaaaatggggaagaatctgtgtctttagaattaaaagaaatgaaaaaaataaacccgacattctaaaaaaatagaataagaaacctgatttttagtactaatgaaatagcgggtgacaaaatagttgtctttttgattttgatcacaaaaaataaactggtagtgacaggatatgatggagagatttgacatcctggcaaatcactgtcattgattcaattattctaattctgaataaaagctgtatacagta

SEQ ID NO: 14783 - DNA, 2730 bp, Homo sapiens
  source 1..2730: mol_type = unassigned DNA
ggtgcatttgcatgttgcggagtgattagtgggtttgaaaagggaaccgtggctcggcctcatttcccgctctggttcaggcgcaggaggaagtgttttgctggaggatgatgacagaggaatctgagaattgctctcacacaccaacccagcaacatccgtggagaaaactctcaccagcaactcctttaaaacaccgtcatttcaaaccattgtggtcttcaagcaacaacagcagcacaaaaaaccccaaccaaacaaaactcttgacagaagctgtgacaaccagaaaggatgcctcataaagggggaagactttaactaggggcgcgcagatgtgtgaggccttttattgtgagagtggacagacatccgagatttcagagccccatattcgagccccgtggaatcccgcggcccccagccagagccagcatgcagaacagtcacagcggagtgaatcagctcggtggtgtctttgtcaacgggcggccactgccggactccacccggcagaagattgtagagctagctcacagcggggcccggccgtgcgacatttcccgaattctgcaggtgtccaacggatgtgtgagtaaaattctgggcaggtattacgagactggctccatcagacccagggcaatcggtggtagtaaaccgagagtagcgactccagaagttgtaagcaaaatagcccagtataagcgggagtgcccgtccatctttgcttgggaaatccgagacagattactgtccgagggggtctgtaccaacgataacataccaagcgtgtcatcaataaacagagttcttcgcaacctggctagcgaaaagcaacagatgggcgcagacggcatgtatgataaactaaggatgttgaacgggcagaccggaagctggggcacccgccctggttggtatccggggacttcggtgccagggcaacctacgcaagatggctgccagcaacaggaaggagggggagagaataccaactccatcagttccaacggagaagattcagatgaggctcaaatgcgacttcagctgaagcggaagctgcaaagaaatagaacatcctttacccaagagcaaattgaggccctggagaaagagtttgagagaacccattatccagatgtgtttgcccgagaaagactagcagccaaaatagatctacctgaagcaagaatacaggtatggttttctaatcgaagggccaaatggagaagagaagaaaaactgaggaatcagagaagacaggccagcaacacacctagtcatattcctatcagcagtagtttcagcaccagtgtctaccaaccaattccacaacccaccacaccggtttcctccttcacatctggctccatgttgggccgaacagacacagccctcacaaacacctacagcgctctgccgcctatgcccagcttcaccatggcaaataacctgcctatgcaacccccagtccccagccagacctcctcatactcctgcatgctgcccaccagcccttcggtgaatgggcggagttatgatacctacacccccccacatatgcagacacacatgaacagtcagccaatgggcacctcgggcaccacttcaacaggactcatttcccctggtgtgtcagttccagttcaagttcccggaagtgaacctgatatgtctcaatactggccaagattacagtaaaaaaaaaaaaaaaaaaaaaaaggaaaggaaatattgtgttaattcagtcagtgactatggggacacaacagttgagctttcaggaaagaaagaaaaatggctgttagagccgcttcagttctacaattgtgtcctgtattgtaccactggggaaggaatggacttgaaacaaggacctttgtatacagaaggcacgatatcagttggaacaaatcttcattttggtatccaaacttttattcattttggtgtattatttgtaaatgggcatttgtatgttataatgaaaaaaagaacaatgtagactggatggatgtttgatctgtgttggtcatgaagttgttttttttttttttaaaaagaaaaccatgatcaacaagctttgccacgaatttaagagttttatcaagatatatcgaatacttctacccatctgttcatagtttatggactgatgttccaagtttgtatcattcctttgcatataattaaacctggaacaacatgcactagatttatgtcagaaatatctgttggttttccaaaggttgttaacagatgaagtttatgtgcaaaaaagggtaagatataaattcaaggaagaaaaaaagttgatagctaaaaggtagagtgtgtcttcgatataatccaatttgttttatgtcaaaatgtaagtatttgtcttccctagaaatcctcagaatgatttctataataaagttaatttcatttatatttgacaagaatatagatgttttatacacattttcatgcaatcatacgtttcttttttggccagcaaaagttaattgttcttagatatagttgtattactgttcacggtccaatcattttgtgcatctagagttcattcctaatcaattaaaagtgcttgcaagagttttaaacttaagtgttttgaagttgttcacaactacatatcaaaattaaccattgttgattgtaaaaaaccatgccaaagcctttgtatttcctttattatacagttttctttttaaccttata

SEQ ID NO: 14784 - DNA, 2576 bp, Homo sapiens
  source 1..2576: mol_type = unassigned DNA
accctcttttcttatcattgacatttaaactctggggcaggtcctcgcgtagaacgcggctgtcagatctgccacttcccctgccgagcggcggtgagaagtgtgggaaccggcgctgccaggctcacctgcctccccgccctccgctcccagggggaagactttaactaggggcgcgcagatgtgtgaggccttttattgtgagagtggacagacatccgagatttcagagccccatattcgagccccgtggaatcccgcggcccccagccagagccagcatgcagaacagtcacagcggagtgaatcagctcggtggtgtctttgtcaacgggcggccactgccggactccacccggcagaagattgtagagctagctcacagcggggcccggccgtgcgacatttcccgaattctgcaggtgtccaacggatgtgtgagtaaaattctgggcaggtattacgagactggctccatcagacccagggcaatcggtggtagtaaaccgagagtagcgactccagaagttgtaagcaaaatagcccagtataagcgggagtgcccgtccatctttgcttgggaaatccgagacagattactgtccgagggggtctgtaccaacgataacataccaagcgtgtcatcaataaacagagttcttcgcaacctggctagcgaaaagcaacagatgggcgcagacggcatgtatgataaactaaggatgttgaacgggcagaccggaagctggggcacccgccctggttggtatccggggacttcggtgccagggcaacctacgcaagatggctgccagcaacaggaaggagggggagagaataccaactccatcagttccaacggagaagattcagatgaggctcaaatgcgacttcagctgaagcggaagctgcaaagaaatagaacatcctttacccaagagcaaattgaggccctggagaaagagtttgagagaacccattatccagatgtgtttgcccgagaaagactagcagccaaaatagatctacctgaagcaagaatacaggtatggttttctaatcgaagggccaaatggagaagagaagaaaaactgaggaatcagagaagacaggccagcaacacacctagtcatattcctatcagcagtagtttcagcaccagtgtctaccaaccaattccacaacccaccacaccggtttcctccttcacatctggctccatgttgggccgaacagacacagccctcacaaacacctacagcgctctgccgcctatgcccagcttcaccatggcaaataacctgcctatgcaacccccagtccccagccagacctcctcatactcctgcatgctgcccaccagcccttcggtgaatgggcggagttatgatacctacacccccccacatatgcagacacacatgaacagtcagccaatgggcacctcgggcaccacttcaacaggactcatttcccctggtgtgtcagttccagttcaagttcccggaagtgaacctgatatgtctcaatactggccaagattacagtaaaaaaaaaaaaaaaaaaaaaaaggaaaggaaatattgtgttaattcagtcagtgactatggggacacaacagttgagctttcaggaaagaaagaaaaatggctgttagagccgcttcagttctacaattgtgtcctgtattgtaccactggggaaggaatggacttgaaacaaggacctttgtatacagaaggcacgatatcagttggaacaaatcttcattttggtatccaaacttttattcattttggtgtattatttgtaaatgggcatttgtatgttataatgaaaaaaagaacaatgtagactggatggatgtttgatctgtgttggtcatgaagttgttttttttttttttaaaaagaaaaccatgatcaacaagctttgccacgaatttaagagttttatcaagatatatcgaatacttctacccatctgttcatagtttatggactgatgttccaagtttgtatcattcctttgcatataattaaacctggaacaacatgcactagatttatgtcagaaatatctgttggttttccaaaggttgttaacagatgaagtttatgtgcaaaaaagggtaagatataaattcaaggaagaaaaaaagttgatagctaaaaggtagagtgtgtcttcgatataatccaatttgttttatgtcaaaatgtaagtatttgtcttccctagaaatcctcagaatgatttctataataaagttaatttcatttatatttgacaagaatatagatgttttatacacattttcatgcaatcatacgtttcttttttggccagcaaaagttaattgttcttagatatagttgtattactgttcacggtccaatcattttgtgcatctagagttcattcctaatcaattaaaagtgcttgcaagagttttaaacttaagtgttttgaagttgttcacaactacatatcaaaattaaccattgttgattgtaaaaaaccatgccaaagcctttgtatttcctttattatacagttttctttttaaccttata

SEQ ID NO: 14785 - DNA, 3182 bp, Homo sapiens
  source 1..3182: mol_type = unassigned DNA
ctacttccagcgaaagcccgcgtcggagggcgactgccggcgagcgggagcggcgcagggctcggggcgggcggccagctcagccccagcgccagcgccagcgccagcgcgggctgagctcgcgggaagaagggagactccaggcgcgacagcagccgcggctcctagccccagcgtcgcccaatgctcccgacccgcgggaaaagacgaagaggctctgtggtgcccaaggccctggaacggccgcagagagcaaccgctgccggctgctttgtccagcccgaggcccagcgaacgcgcagagagcgggcgctccgaggactcgccgagggagcgccgagggaacctgctcgccgcgtctccgcccgcccgccggccctcgggctttgtgccgcactgggctccggcgcagaagagtcagccggcactcgagcgccgaggggggcaccgcgcccgccaccagcccgagtggagtcagtcggcaaggcagccgcacgctggaggtagagggaagagcgagctagcgcgagccgggaaggaagccaccaggccaaggcggtggaacgcgcgctccgagggagctcagagccgagcgggaggactgtcagcttccacccagcccccgggctcttgcccccaactccactggagcgctgagctcggaacttgaaaactctctgctccccaggcttcccccgactctcatctcccttgccttgcggaggctggggctcttccctgttctccggccccctgcgcttgggggaagactttaactaggggcgcgcagatgtgtgaggccttttattgtgagagtggacagacatccgagatttcagagccccatattcgagccccgtggaatcccgcggcccccagccagagccagcatgcagaacagtcacagcggagtgaatcagctcggtggtgtctttgtcaacgggcggccactgccggactccacccggcagaagattgtagagctagctcacagcggggcccggccgtgcgacatttcccgaattctgcaggtgtccaacggatgtgtgagtaaaattctgggcaggtattacgagactggctccatcagacccagggcaatcggtggtagtaaaccgagagtagcgactccagaagttgtaagcaaaatagcccagtataagcgggagtgcccgtccatctttgcttgggaaatccgagacagattactgtccgagggggtctgtaccaacgataacataccaagcgtgtcatcaataaacagagttcttcgcaacctggctagcgaaaagcaacagatgggcgcagacggcatgtatgataaactaaggatgttgaacgggcagaccggaagctggggcacccgccctggttggtatccggggacttcggtgccagggcaacctacgcaagatggctgccagcaacaggaaggagggggagagaataccaactccatcagttccaacggagaagattcagatgaggctcaaatgcgacttcagctgaagcggaagctgcaaagaaatagaacatcctttacccaagagcaaattgaggccctggagaaagagtttgagagaacccattatccagatgtgtttgcccgagaaagactagcagccaaaatagatctacctgaagcaagaatacaggtatggttttctaatcgaagggccaaatggagaagagaagaaaaactgaggaatcagagaagacaggccagcaacacacctagtcatattcctatcagcagtagtttcagcaccagtgtctaccaaccaattccacaacccaccacaccggtttcctccttcacatctggctccatgttgggccgaacagacacagccctcacaaacacctacagcgctctgccgcctatgcccagcttcaccatggcaaataacctgcctatgcaacccccagtccccagccagacctcctcatactcctgcatgctgcccaccagcccttcggtgaatgggcggagttatgatacctacacccccccacatatgcagacacacatgaacagtcagccaatgggcacctcgggcaccacttcaacaggactcatttcccctggtgtgtcagttccagttcaagttcccggaagtgaacctgatatgtctcaatactggccaagattacagtaaaaaaaaaaaaaaaaaaaaaaaggaaaggaaatattgtgttaattcagtcagtgactatggggacacaacagttgagctttcaggaaagaaagaaaaatggctgttagagccgcttcagttctacaattgtgtcctgtattgtaccactggggaaggaatggacttgaaacaaggacctttgtatacagaaggcacgatatcagttggaacaaatcttcattttggtatccaaacttttattcattttggtgtattatttgtaaatgggcatttgtatgttataatgaaaaaaagaacaatgtagactggatggatgtttgatctgtgttggtcatgaagttgttttttttttttttaaaaagaaaaccatgatcaacaagctttgccacgaatttaagagttttatcaagatatatcgaatacttctacccatctgttcatagtttatggactgatgttccaagtttgtatcattcctttgcatataattaaacctggaacaacatgcactagatttatgtcagaaatatctgttggttttccaaaggttgttaacagatgaagtttatgtgcaaaaaagggtaagatataaattcaaggaagaaaaaaagttgatagctaaaaggtagagtgtgtcttcgatataatccaatttgttttatgtcaaaatgtaagtatttgtcttccctagaaatcctcagaatgatttctataataaagttaatttcatttatatttgacaagaatatagatgttttatacacattttcatgcaatcatacgtttcttttttggccagcaaaagttaattgttcttagatatagttgtattactgttcacggtccaatcattttgtgcatctagagttcattcctaatcaattaaaagtgcttgcaagagttttaaacttaagtgttttgaagttgttcacaactacatatcaaaattaaccattgttgattgtaaaaaaccatgccaaagcctttgtatttcctttattatacagttttctttttaacctt

SEQ ID NO: 14786 - DNA, 2614 bp, Homo sapiens
  source 1..2614: mol_type = unassigned DNA
accctcttttcttatcattgacatttaaactctggggcaggtcctcgcgtagaacgcggctgtcagatctgccacttcccctgccgagcggcggtgagaagtgtgggaaccggcgctgccaggctcacctgcctccccgccctccgctcccagggggaagactttaactaggggcgcgcagatgtgtgaggccttttattgtgagagtggacagacatccgagatttcagagccccatattcgagccccgtggaatcccgcggcccccagccagagccagcatgcagaacagtcacagcggagtgaatcagctcggtggtgtctttgtcaacgggcggccactgccggactccacccggcagaagattgtagagctagctcacagcggggcccggccgtgcgacatttcccgaattctgcagacccatgcagatgcaaaagtccaagtgctggacaatcaaaacgtgtccaacggatgtgtgagtaaaattctgggcaggtattacgagactggctccatcagacccagggcaatcggtggtagtaaaccgagagtagcgactccagaagttgtaagcaaaatagcccagtataagcgggagtgcccgtccatctttgcttgggaaatccgagacagattactgtccgagggggtctgtaccaacgataacataccaagcgtgtcatcaataaacagagttcttcgcaacctggctagcgaaaagcaacagatgggcgcagacggcatgtatgataaactaaggatgttgaacgggcagaccggaagctggggcacccgccctggttggtatccggggacttcggtgccagggcaacctacgcaagatggctgccagcaacaggaaggagggggagagaataccaactccatcagttccaacggagaagattcagatgaggctcaaatgcgacttcagctgaagcggaagctgcaaagaaatagaacatcctttacccaagagcaaattgaggccctggagaaagagtttgagagaacccattatccagatgtgtttgcccgagaaagactagcagccaaaatagatctacctgaagcaagaatacaggtatggttttctaatcgaagggccaaatggagaagagaagaaaaactgaggaatcagagaagacaggccagcaacacacctagtcatattcctatcagcagtagtttcagcaccagtgtctaccaaccaattccacaacccaccacaccggtttcctccttcacatctggctccatgttgggccgaacagacacagccctcacaaacacctacagcgctctgccgcctatgcccagcttcaccatggcaaataacctgcctatgcaacccccagtccccagccagacctcctcatactcctgcatgctgcccaccagcccttcggtgaatgggcggagttatgatacctacacccccccacatatgcagacacacatgaacagtcagccaatgggcacctcgggcaccacttcaacaggactcatttcccctggtgtgtcagttccagttcaagttcccggaagtgaacctgatatgtctcaatactggccaagattacagtaaaaaaaaaaaaaaaaaaaaaaaggaaaggaaatattgtgttaattcagtcagtgactatggggacacaacagttgagctttcaggaaagaaagaaaaatggctgttagagccgcttcagttctacaattgtgtcctgtattgtaccactggggaaggaatggacttgaaacaaggacctttgtatacagaaggcacgatatcagttggaacaaatcttcattttggtatccaaacttttattcattttggtgtattatttgtaaatgggcatttgtatgttataatgaaaaaaagaacaatgtagactggatggatgtttgatctgtgttggtcatgaagttgttttttttttttttaaaaagaaaaccatgatcaacaagctttgccacgaatttaagagttttatcaagatatatcgaatacttctacccatctgttcatagtttatggactgatgttccaagtttgtatcattcctttgcatataattaaacctggaacaacatgcactagatttatgtcagaaatatctgttggttttccaaaggttgttaacagatgaagtttatgtgcaaaaaagggtaagatataaattcaaggaagaaaaaaagttgatagctaaaaggtagagtgtgtcttcgatataatccaatttgttttatgtcaaaatgtaagtatttgtcttccctagaaatcctcagaatgatttctataataaagttaatttcatttatatttgacaagaatatagatgttttatacacattttcatgcaatcatacgtttcttttttggccagcaaaagttaattgttcttagatatagttgtattactgttcacggtccaatcattttgtgcatctagagttcattcctaatcaattaaaagtgcttgcaagagttttaaacttaagtgttttgaagttgttcacaactacatatcaaaattaaccattgttgattgtaaaaaaccatgccaaagcctttgtatttcctttattatacagttttctttttaacct

SEQ ID NO: 14787 - DNA, 2622 bp, Homo sapiens
  source 1..2622: mol_type = unassigned DNA
acacacttgagccatcaccaatcagcataggtgtgctggctgcagccacttccctcacccacactctttatctctcactctccagccgctgacagcccattttattgtcaatctctgtctccttcccaggaatctgagaattgctctcacacaccaacccagcaacatccgtggagaaaactctcaccagcaactcctttaaaacaccgtcatttcaaaccattgtggtcttcaagcaacaacagcagcacaaaaaaccccaaccaaacaaaactcttgacagaagctgtgacaaccagaaaggatgcctcataaagggggaagactttaactaggggcgcgcagatgtgtgaggccttttattgtgagagtggacagacatccgagatttcagagccccatattcgagccccgtggaatcccgcggcccccagccagagccagcatgcagaacagtcacagcggagtgaatcagctcggtggtgtctttgtcaacgggcggccactgccggactccacccggcagaagattgtagagctagctcacagcggggcccggccgtgcgacatttcccgaattctgcaggtgtccaacggatgtgtgagtaaaattctgggcaggtattacgagactggctccatcagacccagggcaatcggtggtagtaaaccgagagtagcgactccagaagttgtaagcaaaatagcccagtataagcgggagtgcccgtccatctttgcttgggaaatccgagacagattactgtccgagggggtctgtaccaacgataacataccaagcgtgtcatcaataaacagagttcttcgcaacctggctagcgaaaagcaacagatgggcgcagacggcatgtatgataaactaaggatgttgaacgggcagaccggaagctggggcacccgccctggttggtatccggggacttcggtgccagggcaacctacgcaagatggctgccagcaacaggaaggagggggagagaataccaactccatcagttccaacggagaagattcagatgaggctcaaatgcgacttcagctgaagcggaagctgcaaagaaatagaacatcctttacccaagagcaaattgaggccctggagaaagagtttgagagaacccattatccagatgtgtttgcccgagaaagactagcagccaaaatagatctacctgaagcaagaatacaggtatggttttctaatcgaagggccaaatggagaagagaagaaaaactgaggaatcagagaagacaggccagcaacacacctagtcatattcctatcagcagtagtttcagcaccagtgtctaccaaccaattccacaacccaccacaccggtttcctccttcacatctggctccatgttgggccgaacagacacagccctcacaaacacctacagcgctctgccgcctatgcccagcttcaccatggcaaataacctgcctatgcaacccccagtccccagccagacctcctcatactcctgcatgctgcccaccagcccttcggtgaatgggcggagttatgatacctacacccccccacatatgcagacacacatgaacagtcagccaatgggcacctcgggcaccacttcaacaggactcatttcccctggtgtgtcagttccagttcaagttcccggaagtgaacctgatatgtctcaatactggccaagattacagtaaaaaaaaaaaaaaaaaaaaaaaggaaaggaaatattgtgttaattcagtcagtgactatggggacacaacagttgagctttcaggaaagaaagaaaaatggctgttagagccgcttcagttctacaattgtgtcctgtattgtaccactggggaaggaatggacttgaaacaaggacctttgtatacagaaggcacgatatcagttggaacaaatcttcattttggtatccaaacttttattcattttggtgtattatttgtaaatgggcatttgtatgttataatgaaaaaaagaacaatgtagactggatggatgtttgatctgtgttggtcatgaagttgttttttttttttttaaaaagaaaaccatgatcaacaagctttgccacgaatttaagagttttatcaagatatatcgaatacttctacccatctgttcatagtttatggactgatgttccaagtttgtatcattcctttgcatataattaaacctggaacaacatgcactagatttatgtcagaaatatctgttggttttccaaaggttgttaacagatgaagtttatgtgcaaaaaagggtaagatataaattcaaggaagaaaaaaagttgatagctaaaaggtagagtgtgtcttcgatataatccaatttgttttatgtcaaaatgtaagtatttgtcttccctagaaatcctcagaatgatttctataataaagttaatttcatttatatttgacaagaatatagatgttttatacacattttcatgcaatcatacgtttcttttttggccagcaaaagttaattgttcttagatatagttgtattactgttcacggtccaatcattttgtgcatctagagttcattcctaatcaattaaaagtgcttgcaagagttttaaa

SEQ ID NO: 14788 - DNA, 2372 bp, Homo sapiens
  source 1..2372: mol_type = unassigned DNA
ctttccctaagtcaagaagagtctagcgtacccttcggctgcttcatttcagcctccctgcctcagctcttcagccctattccccctcgccctgtcctggggtgtgtacagcagcccaggccttccttctccttcccggctccgtggcccgaagccgccgagagagctcgggacagcgcaggaccaggcagccgctcgctctcctgtcaccttaactgcaggctccgaggggcgcctttggagtgtactgaggtgtgtcctaatcgtgcggcattcaacaaatggacttctggtgtgtggtcagaagagaaaagccatttacttactttcctccccggttttctggcaacagctgaaggggagctgcctccgtggactgagcagacccaggagagggagtcgtggtgcggagacacacgcaccacacacagatgaccggtggcacacacgacacacgctgacataccgacatcgccagtgggacacacacacacacacacacacacacacacacacacacagagagagagagagaatccctcccagcattggtcatccgcccccccacccaggcttccactccccctcccctcttatctcccctggcttcccctcctctcgggcgctgcgaaaagcagccgcacttagtcaacaaatggcacgtgggagaagttggtgagtgtttggtgaggactcttcagggcttttcacaagaaccctctgtacacaaaggggaagactttaactaggggcgcgcagatgtgtgaggccttttattgtgagagtggacagacatccgagatttcagagccccatattcgagccccgtggaatcccgcggcccccagccagagccagcatgcagaacaatggctgccagcaacaggaaggagggggagagaataccaactccatcagttccaacggagaagattcagatgaggctcaaatgcgacttcagctgaagcggaagctgcaaagaaatagaacatcctttacccaagagcaaattgaggccctggagaaagagtttgagagaacccattatccagatgtgtttgcccgagaaagactagcagccaaaatagatctacctgaagcaagaatacaggtatggttttctaatcgaagggccaaatggagaagagaagaaaaactgaggaatcagagaagacaggccagcaacacacctagtcatattcctatcagcagtagtttcagcaccagtgtctaccaaccaattccacaacccaccacaccggtttcctccttcacatctggctccatgttgggccgaacagacacagccctcacaaacacctacagcgctctgccgcctatgcccagcttcaccatggcaaataacctgcctatgcaagactcatttcccctggtgtgtcagttccagttcaagttcccggaagtgaacctgatatgtctcaatactggccaagattacagtaaaaaaaaaaaaaaaaaaaaaaaggaaaggaaatattgtgttaattcagtcagtgactatggggacacaacagttgagctttcaggaaagaaagaaaaatggctgttagagccgcttcagttctacaattgtgtcctgtattgtaccactggggaaggaatggacttgaaacaaggacctttgtatacagaaggcacgatatcagttggaacaaatcttcattttggtatccaaacttttattcattttggtgtattatttgtaaatgggcatttgtatgttataatgaaaaaaagaacaatgtagactggatggatgtttgatctgtgttggtcatgaagttgttttttttttttttaaaaagaaaaccatgatcaacaagctttgccacgaatttaagagttttatcaagatatatcgaatacttctacccatctgttcatagtttatggactgatgttccaagtttgtatcattcctttgcatataattaaacctggaacaacatgcactagatttatgtcagaaatatctgttggttttccaaaggttgttaacagatgaagtttatgtgcaaaaaagggtaagatataaattcaaggaagaaaaaaagttgatagctaaaaggtagagtgtgtcttcgatataatccaatttgttttatgtcaaaatgtaagtatttgtcttccctagaaatcctcagaatgatttctataataaagttaatttcatttatatttgacaagaatatagatgttttatacacattttcatgcaatcatacgtttcttttttggccagcaaaagttaattgttcttagatatagttgtattactgttcacggtccaatcattttgtgcatctagagttcattcctaatcaattaaaagtgcttgcaagagttttaaa

SEQ ID NO: 14789 - DNA, 2579 bp, Homo sapiens
  source 1..2579: mol_type = unassigned DNA
cgcccgcccgccggccctcgggctttgtgccgcactgggctccggcgcagaagagtcagccggcactcgagcgccgaggggggcaccgcgcccgccaccagcccgagtggagtcagtcggcaaggcagccgcacgctggaggtagagggaagagcgagctagcgcgagccgggaaggaagccaccaggccaaggcggtggaacgcgcgctccgagggagctcagagccgagcgggaggactgtcagcttccacccagcccccgggctcttgcccccaactccactggagcgctgagctcggaacttgaaaactctctgctccccaggcttcccccgactctcatctcccttgccttgcggaggctggggctcttccctgttctccggccccctgcgcttgggggaagactttaactaggggcgcgcagatgtgtgaggccttttattgtgagagtggacagacatccgagatttcagagccccatattcgagccccgtggaatcccgcggcccccagccagagccagcatgcagaacagtcacagcggagtgaatcagctcggtggtgtctttgtcaacgggcggccactgccggactccacccggcagaagattgtagagctagctcacagcggggcccggccgtgcgacatttcccgaattctgcagacccatgcagatgcaaaagtccaagtgctggacaatcaaaacgtgtccaacggatgtgtgagtaaaattctgggcaggtattacgagactggctccatcagacccagggcaatcggtggtagtaaaccgagagtagcgactccagaagttgtaagcaaaatagcccagtataagcgggagtgcccgtccatctttgcttgggaaatccgagacagattactgtccgagggggtctgtaccaacgataacataccaagcgtgtcatcaataaacagagttcttcgcaacctggctagcgaaaagcaacagatgggcgcagacggcatgtatgataaactaaggatgttgaacgggcagaccggaagctggggcacccgccctggttggtatccggggacttcggtgccagggcaacctacgcaagatggctgccagcaacaggaaggagggggagagaataccaactccatcagttccaacggagaagattcagatgaggctcaaatgcgacttcagctgaagcggaagctgcaaagaaatagaacatcctttacccaagagcaaattgaggccctggagaaagagtttgagagaacccattatccagatgtgtttgcccgagaaagactagcagccaaaatagatctacctgaagcaagaatacaggtatggttttctaatcgaagggccaaatggagaagagaagaaaaactgaggaatcagagaagacaggccagcaacacacctagtcatattcctatcagcagtagtttcagcaccagtgtctaccaaccaattccacaacccaccacaccggtttcctccttcacatctggctccatgttgggccgaacagacacagccctcacaaacacctacagcgctctgccgcctatgcccagcttcaccatggcaaataacctgcctatgcaacccccagtccccagccagacctcctcatactcctgcatgctgcccaccagcccttcggtgaatgggcggagttatgatacctacacccccccacatatgcagacacacatgaacagtcagccaatgggcacctcgggcaccacttcaacaggactcatttcccctggtgtgtcagttccagttcaagttcccggaagtgaacctgatatgtctcaatactggccaagattacagtaaaaaaaaaaaaaaaaaaaaaaaggaaaggaaatattgtgttaattcagtcagtgactatggggacacaacagttgagctttcaggaaagaaagaaaaatggctgttagagccgcttcagttctacaattgtgtcctgtattgtaccactggggaaggaatggacttgaaacaaggacctttgtatacagaaggcacgatatcagttggaacaaatcttcattttggtatccaaacttttattcattttggtgtattatttgtaaatgggcatttgtatgttataatgaaaaaaagaacaatgtagactggatggatgtttgatctgtgttggtcatgaagttgttttttttttttttaaaaagaaaaccatgatcaacaagctttgccacgaatttaagagttttatcaagatatatcgaatacttctacccatctgttcatagtttatggactgatgttccaagtttgtatcattcctttgcatataattaaacctggaacaacatgcactagatttatgtcagaaatatctgttggttttccaaaggttgttaacagatgaagtttatgtgcaaaaaagggtaagatataaattcaaggaagaaaaaaagttgatagctaaaaggtagagtgtgtcttcgatataatccaatttgttttatgtcaaaatgtaagtatttgtcttccctagaaatcctcagaatgatttctataataaagttaatttcatttatatttga

SEQ ID NO: 14790 - DNA, 2620 bp, Homo sapiens
  source 1..2620: mol_type = unassigned DNA
gagctgtgcccaactctagccgccatgacgtcacgcgggccgggcagccaatgaggacggcgctggcgtggatattaaggaaagttagcgcctgcctgagcaccctcttttcttatcattgacatttaaactctggggcaggtcctcgcgtagaacgcggctgtcagatctgccacttcccctgccgagcggcggtgagaagtgtgggaaccggcgctgccaggctcacctgcctccccgccctccgctcccaggaatctgagaattgctctcacacaccaacccagcaacatccgtggagaaaactctcaccagcaactcctttaaaacaccgtcatttcaaaccattgtggtcttcaagcaacaacagcagcacaaaaaaccccaaccaaacaaaactcttgacagaagctgtgacaaccagaaaggatgcctcataaagggggaagactttaactaggggcgcgcagatgtgtgaggccttttattgtgagagtggacagacatccgagatttcagagccccatattcgagccccgtggaatcccgcggcccccagccagagccagcatgcagaacagtcacagcggagtgaatcagctcggtggtgtctttgtcaacgggcggccactgccggactccacccggcagaagattgtagagctagctcacagcggggcccggccgtgcgacatttcccgaattctgcagacccatgcagatgcaaaagtccaagtgctggacaatcaaaacgtgtccaacggatgtgtgagtaaaattctgggcaggtattacgagactggctccatcagacccagggcaatcggtggtagtaaaccgagagtagcgactccagaagttgtaagcaaaatagcccagtataagcgggagtgcccgtccatctttgcttgggaaatccgagacagattactgtccgagggggtctgtaccaacgataacataccaagcgtgtcatcaataaacagagttcttcgcaacctggctagcgaaaagcaacagatgggcgcagacggcatgtatgataaactaaggatgttgaacgggcagaccggaagctggggcacccgccctggttggtatccggggacttcggtgccagggcaacctacgcaagatggctgccagcaacaggaaggagggggagagaataccaactccatcagttccaacggagaagattcagatgaggctcaaatgcgacttcagctgaagcggaagctgcaaagaaatagaacatcctttacccaagagcaaattgaggccctggagaaagagtttgagagaacccattatccagatgtgtttgcccgagaaagactagcagccaaaatagatctacctgaagcaagaatacaggtatggttttctaatcgaagggccaaatggagaagagaagaaaaactgaggaatcagagaagacaggccagcaacacacctagtcatattcctatcagcagtagtttcagcaccagtgtctaccaaccaattccacaacccaccacaccggtttcctccttcacatctggctccatgttgggccgaacagacacagccctcacaaacacctacagcgctctgccgcctatgcccagcttcaccatggcaaataacctgcctatgcaacccccagtccccagccagacctcctcatactcctgcatgctgcccaccagcccttcggtgaatgggcggagttatgatacctacacccccccacatatgcagacacacatgaacagtcagccaatgggcacctcgggcaccacttcaacaggactcatttcccctggtgtgtcagttccagttcaagttcccggaagtgaacctgatatgtctcaatactggccaagattacagtaaaaaaaaaaaaaaaaaaaaaaaggaaaggaaatattgtgttaattcagtcagtgactatggggacacaacagttgagctttcaggaaagaaagaaaaatggctgttagagccgcttcagttctacaattgtgtcctgtattgtaccactggggaaggaatggacttgaaacaaggacctttgtatacagaaggcacgatatcagttggaacaaatcttcattttggtatccaaacttttattcattttggtgtattatttgtaaatgggcatttgtatgttataatgaaaaaaagaacaatgtagactggatggatgtttgatctgtgttggtcatgaagttgttttttttttttttaaaaagaaaaccatgatcaacaagctttgccacgaatttaagagttttatcaagatatatcgaatacttctacccatctgttcatagtttatggactgatgttccaagtttgtatcattcctttgcatataattaaacctggaacaacatgcactagatttatgtcagaaatatctgttggttttccaaaggttgttaacagatgaagtttatgtgcaaaaaagggtaagatataaattcaaggaagaaaaaaagttgatagctaaaaggtagagtgtgtcttcgatataatccaatttgttttatgtcaaaatgtaagtatttgtcttccctagaaatcctcagaatgatttctataataaagttaatttcatttatatttg

SEQ ID NO: 14791 - DNA, 2450 bp, Homo sapiens
  source 1..2450: mol_type = unassigned DNA
gcacttagtcaacaaatggcacgtgggagaagttggtgagtgtttggtgaggactcttcagggcttttcacaagaaccctctgtacacaaagaatctgagaattgctctcacacaccaacccagcaacatccgtggagaaaactctcaccagcaactcctttaaaacaccgtcatttcaaaccattgtggtcttcaagcaacaacagcagcacaaaaaaccccaaccaaacaaaactcttgacagaagctgtgacaaccagaaaggatgcctcataaagggggaagactttaactaggggcgcgcagatgtgtgaggccttttattgtgagagtggacagacatccgagatttcagagccccatattcgagccccgtggaatcccgcggcccccagccagagccagcatgcagaacagtcacagcggagtgaatcagctcggtggtgtctttgtcaacgggcggccactgccggactccacccggcagaagattgtagagctagctcacagcggggcccggccgtgcgacatttcccgaattctgcagacccatgcagatgcaaaagtccaagtgctggacaatcaaaacgtgtccaacggatgtgtgagtaaaattctgggcaggtattacgagactggctccatcagacccagggcaatcggtggtagtaaaccgagagtagcgactccagaagttgtaagcaaaatagcccagtataagcgggagtgcccgtccatctttgcttgggaaatccgagacagattactgtccgagggggtctgtaccaacgataacataccaagcgtgtcatcaataaacagagttcttcgcaacctggctagcgaaaagcaacagatgggcgcagacggcatgtatgataaactaaggatgttgaacgggcagaccggaagctggggcacccgccctggttggtatccggggacttcggtgccagggcaacctacgcaagatggctgccagcaacaggaaggagggggagagaataccaactccatcagttccaacggagaagattcagatgaggctcaaatgcgacttcagctgaagcggaagctgcaaagaaatagaacatcctttacccaagagcaaattgaggccctggagaaagagtttgagagaacccattatccagatgtgtttgcccgagaaagactagcagccaaaatagatctacctgaagcaagaatacaggtatggttttctaatcgaagggccaaatggagaagagaagaaaaactgaggaatcagagaagacaggccagcaacacacctagtcatattcctatcagcagtagtttcagcaccagtgtctaccaaccaattccacaacccaccacaccggtttcctccttcacatctggctccatgttgggccgaacagacacagccctcacaaacacctacagcgctctgccgcctatgcccagcttcaccatggcaaataacctgcctatgcaacccccagtccccagccagacctcctcatactcctgcatgctgcccaccagcccttcggtgaatgggcggagttatgatacctacacccccccacatatgcagacacacatgaacagtcagccaatgggcacctcgggcaccacttcaacaggactcatttcccctggtgtgtcagttccagttcaagttcccggaagtgaacctgatatgtctcaatactggccaagattacagtaaaaaaaaaaaaaaaaaaaaaaaggaaaggaaatattgtgttaattcagtcagtgactatggggacacaacagttgagctttcaggaaagaaagaaaaatggctgttagagccgcttcagttctacaattgtgtcctgtattgtaccactggggaaggaatggacttgaaacaaggacctttgtatacagaaggcacgatatcagttggaacaaatcttcattttggtatccaaacttttattcattttggtgtattatttgtaaatgggcatttgtatgttataatgaaaaaaagaacaatgtagactggatggatgtttgatctgtgttggtcatgaagttgttttttttttttttaaaaagaaaaccatgatcaacaagctttgccacgaatttaagagttttatcaagatatatcgaatacttctacccatctgttcatagtttatggactgatgttccaagtttgtatcattcctttgcatataattaaacctggaacaacatgcactagatttatgtcagaaatatctgttggttttccaaaggttgttaacagatgaagtttatgtgcaaaaaagggtaagatataaattcaaggaagaaaaaaagttgatagctaaaaggtagagtgtgtcttcgatataatccaatttgttttatgtcaaaatgtaagtatttgtcttccctagaaatcctcagaatgatttctataataaagttaatttcattt

SEQ ID NO: 14792 - DNA, 2553 bp, Homo sapiens
  source 1..2553: mol_type = unassigned DNA
gacacacacacacacacacacacacacacacacacacacagagagagagagagaatccctcccagcattggtcatccgcccccccacccaggcttccactccccctcccctcttatctcccctggcttcccctcctctcgggcgctgcgaaaagcagccgcacttagtcaacaaatggcacgtgggagaagttggaatctgagaattgctctcacacaccaacccagcaacatccgtggagaaaactctcaccagcaactcctttaaaacaccgtcatttcaaaccattgtggtcttcaagcaacaacagcagcacaaaaaaccccaaccaaacaaaactcttgacagaagctgtgacaaccagaaaggatgcctcataaagggggaagactttaactaggggcgcgcagatgtgtgaggccttttattgtgagagtggacagacatccgagatttcagagccccatattcgagccccgtggaatcccgcggcccccagccagagccagcatgcagaacagtcacagcggagtgaatcagctcggtggtgtctttgtcaacgggcggccactgccggactccacccggcagaagattgtagagctagctcacagcggggcccggccgtgcgacatttcccgaattctgcagacccatgcagatgcaaaagtccaagtgctggacaatcaaaacgtgtccaacggatgtgtgagtaaaattctgggcaggtattacgagactggctccatcagacccagggcaatcggtggtagtaaaccgagagtagcgactccagaagttgtaagcaaaatagcccagtataagcgggagtgcccgtccatctttgcttgggaaatccgagacagattactgtccgagggggtctgtaccaacgataacataccaagcgtgtcatcaataaacagagttcttcgcaacctggctagcgaaaagcaacagatgggcgcagacggcatgtatgataaactaaggatgttgaacgggcagaccggaagctggggcacccgccctggttggtatccggggacttcggtgccagggcaacctacgcaagatggctgccagcaacaggaaggagggggagagaataccaactccatcagttccaacggagaagattcagatgaggctcaaatgcgacttcagctgaagcggaagctgcaaagaaatagaacatcctttacccaagagcaaattgaggccctggagaaagagtttgagagaacccattatccagatgtgtttgcccgagaaagactagcagccaaaatagatctacctgaagcaagaatacaggtatggttttctaatcgaagggccaaatggagaagagaagaaaaactgaggaatcagagaagacaggccagcaacacacctagtcatattcctatcagcagtagtttcagcaccagtgtctaccaaccaattccacaacccaccacaccggtttcctccttcacatctggctccatgttgggccgaacagacacagccctcacaaacacctacagcgctctgccgcctatgcccagcttcaccatggcaaataacctgcctatgcaacccccagtccccagccagacctcctcatactcctgcatgctgcccaccagcccttcggtgaatgggcggagttatgatacctacacccccccacatatgcagacacacatgaacagtcagccaatgggcacctcgggcaccacttcaacaggactcatttcccctggtgtgtcagttccagttcaagttcccggaagtgaacctgatatgtctcaatactggccaagattacagtaaaaaaaaaaaaaaaaaaaaaaaggaaaggaaatattgtgttaattcagtcagtgactatggggacacaacagttgagctttcaggaaagaaagaaaaatggctgttagagccgcttcagttctacaattgtgtcctgtattgtaccactggggaaggaatggacttgaaacaaggacctttgtatacagaaggcacgatatcagttggaacaaatcttcattttggtatccaaacttttattcattttggtgtattatttgtaaatgggcatttgtatgttataatgaaaaaaagaacaatgtagactggatggatgtttgatctgtgttggtcatgaagttgttttttttttttttaaaaagaaaaccatgatcaacaagctttgccacgaatttaagagttttatcaagatatatcgaatacttctacccatctgttcatagtttatggactgatgttccaagtttgtatcattcctttgcatataattaaacctggaacaacatgcactagatttatgtcagaaatatctgttggttttccaaaggttgttaacagatgaagtttatgtgcaaaaaagggtaagatataaattcaaggaagaaaaaaagttgatagctaaaaggtagagtgtgtcttcgatataatccaatttgttttatgtcaaaatgtaagtatttgtcttccctagaaatcctcagaatgatttctataataaagttaatttcattt

SEQ ID NO: 14793 - DNA, 1580 bp, Homo sapiens
  source 1..1580: mol_type = unassigned DNA
atattcgagccccgtggaatcccgcggcccccagccagagccagcatgcagaacagtcacagcggagtgaatcagctcggtggtgtctttgtcaacgggcggccactgccggactccacccggcagaagattgtagagctagctcacagcggggcccggccgtgcgacatttcccgaattctgcaggtgtccaacggatgtgtgagtaaaattctgggcaggtattacgagactggctccatcagacccagggcaatcggtggtagtaaaccgagagtagcgactccagaagttgtaagcaaaatagcccagtataagcgggagtgcccgtccatctttgcttgggaaatccgagacagattactgtccgagggggtctgtaccaacgataacataccaagcgtgtcatcaataaacagagttcttcgcaacctggctagcgaaaagcaacagatgggcgcagacggcatgtatgataaactaaggatgttgaacgggcagaccggaagctggggcacccgccctggttggtatccggggacttcggtgccagggcaacctacgcaagatggctgccagcaacaggaaggagggggagagaataccaactccatcagttccaacggagaagattcagatgaggctcaaatgcgacttcagctgaagcggaagctgcaaagaaatagaacatcctttacccaagagcaaattgaggccctggagaaagagtttgagagaacccattatccagatgtgtttgcccgagaaagactagcagccaaaatagatctacctgaagcaagaatacaggtatggttttctaatcgaagggccaaatggagaagagaagaaaaactgaggaatcagagaagacaggccagcaacacacctagtcatattcctatcagcagtagtttcagcaccagtgtctaccaaccaattccacaacccaccacaccggtttcctccttcacatctggctccatgttgggccgaacagacacagccctcacaaacacctacagcgctctgccgcctatgcccagcttcaccatggcaaataacctgcctatgcaagactcatttcccctggtgtgtcagttccagttcaagttcccggaagtgaacctgatatgtctcaatactggccaagattacagtaaaaaaaaaaaaaaaaaaaaaaaggaaaggaaatattgtgttaattcagtcagtgactatggggacacaacagttgagctttcaggaaagaaagaaaaatggctgttagagccgcttcagttctacaattgtgtcctgtattgtaccactggggaaggaatggacttgaaacaaggacctttgtatacagaaggcacgatatcagttggaacaaatcttcattttggtatccaaacttttattcattttggtgtattatttgtaaatgggcatttgtatgttataatgaaaaaaagaacaatgtagactggatggatgtttgatctgtgttggtcatgaagttgttttttttttttttaaaaagaaaaccatgatcaacaagctttgccacgaatttaagagttttatcaagatatatc

SEQ ID NO: 14794 - DNA, 979 bp, Homo sapiens
  source 1..979: mol_type = unassigned DNA
ttaaactctggggcaggtcctcgcgtagaacgcggctgtcagatctgccacttcccctgccgagcggcggtgagaagtgtgggaaccggcgctgccaggctcacctgcctccccgccctccgctcccagatggctgccagcaacaggaaggagggggagagaataccaactccatcagttccaacggagaagattcagatgaggctcaaatgcgacttcagctgaagcggaagctgcaaagaaatagaacatcctttacccaagagcaaattgaggccctggagaaagagtttgagagaacccattatccagatgtgtttgcccgagaaagactagcagccaaaatagatctacctgaagcaagaatacaggtatggttttctaatcgaagggccaaatggagaagagaagaaaaactgaggaatcagagaagacaggccagcaacacacctagtcatattcctatcagcagtagtttcagcaccagtgtctaccaaccaattccacaacccaccacaccggtttcctccttcacatctggctccatgttgggccgaacagacacagccctcacaaacacctacagcgctctgccgcctatgcccagcttcaccatggcaaataacctgcctatgcaacccccagtccccagccagacctcctcatactcctgcatgctgcccaccagcccttcggtgaatgggcggagttatgatacctacacccccccacatatgcagacacacatgaacagtcagccaatgggcacctcgggcaccacttcaacaggactcatttcccctggtgtgtcagttccagttcaagttcccggaagtgaacctgatatgtctcaatactggccaagattacagtaaaaaaaaaaaaaaaaaaaaaaaggaaaggaaatattgtgttaattcagtcagtgactatggggacacaacagttgagctttcaggaaagaaagaaaaatggctgt

SEQ ID NO: 14795 - DNA, 1736 bp, Homo sapiens
  source 1..1736: mol_type = unassigned DNA
tttaaactctggggcaggtcctcgcgtagaacgcggctgtcagatctgccacttcccctgccgagcggcggtgagaagtgtgggaaccggcgctgccaggctcacctgcctccccgccctccgctcccaggaatctgagaattgctctcacacaccaacccagcaacatccgtggagaaaactctcaccagcaactcctttaaaacaccgtcatttcaaaccattgtggtcttcaagcaacaacagcagcacaaaaaaccccaaccaaacaaaactcttgacagaagctgtgacaaccagaaaggatgcctcataaagggggaagactttaactaggggcgcgcagatgtgtgaggccttttattgtgagagtggacagacatccgagatttcagagccccatattcgagccccgtggaatcccgcggcccccagccagagccagcatgcagaacagtcacagcggagtgaatcagctcggtggtgtctttgtcaacgggcggccactgccggactccacccggcagaagattgtagagctagctcacagcggggcccggccgtgcgacatttcccgaattctgcaggtgtccaacggatgtgtgagtaaaattctgggcaggtattacgagactggctccatcagacccagggcaatcggtggtagtaaaccgagagtagcgactccagaagttgtaagcaaaatagcccagtataagcgggagtgcccgtccatctttgcttgggaaatccgagacagattactgtccgagggggtctgtaccaacgataacataccaagcgtgtcatcaataaacagagttcttcgcaacctggctagcgaaaagcaacagatgggcgcagacggcatgtatgataaactaaggatgttgaacgggcagaccggaagctggggcacccgccctggttggtatccggggacttcggtgccagggcaacctacgcaagatggctgccagcaacaggaaggagggggagagaataccaactccatcagttccaacggagaagattcagatgaggctcaaatgcgacttcagctgaagcggaagctgcaaagaaatagaacatcctttacccaagagcaaattgaggccctggagaaagagtttgagagaacccattatccagatgtgtttgcccgagaaagactagcagccaaaatagatctacctgaagcaagaatacaggtatggttttctaatcgaagggccaaatggagaagagaagaaaaactgaggaatcagagaagacaggccagcaacacacctagtcatattcctatcagcagtagtttcagcaccagtgtctaccaaccaattccacaacccaccacaccggtttcctccttcacatctggctccatgttgggccgaacagacacagccctcacaaacacctacagcgctctgccgcctatgcccagcttcaccatggcaaataacctgcctatgcaacccccagtccccagccagacctcctcatactcctgcatgctgcccaccagcccttcggtgaatgggcggagttatgatacctacacccccccacatatgcagacacacatgaacagtcagccaatgggcacctcgggcaccacttcaacaggactcatttcccctggtgtgtcagttccagttcaagttcccggaagtgaacctgatatgtctcaatactggccaagattacagtaaaaaaaaaaaaaaaaaaaaaaa

SEQ ID NO: 14796 - DNA, 4392 bp, Homo sapiens
  source 1..4392: mol_type = unassigned DNA
gcatttgcatgttgcggagtgattagtgggtttgaaaagggaaccgtggctcggcctcatttcccgctctggttcaggcgcaggaggaagtgttttgctggaggatgatgacagaggtcaggcttcgctaatgggccagtgaggagcggtggaggcgaggccgggcgccggcacacacacattaacacacttgagccatcaccaatcagcataggaatctgagaattgctctcacacaccaacccagcaacatccgtggagaaaactctcaccagcaactcctttaaaacaccgtcatttcaaaccattgtggtcttcaagcaacaacagcagcacaaaaaaccccaaccaaacaaaactcttgacagaagctgtgacaaccagaaaggatgcctcataaagggggaagactttaactaggggcgcgcagatgtgtgaggccttttattgtgagagtggacagacatccgagatttcagagccccatattcgagccccgtggaatcccgcggcccccagccagagccagcatgcagaacagtcacagcggagtgaatcagctcggtggtgtctttgtcaacgggcggccactgccggactccacccggcagaagattgtagagctagctcacagcggggcccggccgtgcgacatttcccgaattctgcaggtgtccaacggatgtgtgagtaaaattctgggcaggtattacgagactggctccatcagacccagggcaatcggtggtagtaaaccgagagtagcgactccagaagttgtaagcaaaatagcccagtataagcgggagtgcccgtccatctttgcttgggaaatccgagacagattactgtccgagggggtctgtaccaacgataacataccaagcgtgtcatcaataaacagagttcttcgcaacctggctagcgaaaagcaacagatgggcgcagacggcatgtatgataaactaaggatgttgaacgggcagaccggaagctggggcacccgccctggttggtatccggggacttcggtgccagggcaacctacgcaagatggctgccagcaacaggaaggagggggagagaataccaactccatcagttccaacggagaagattcagatgaggctcaaatgcgacttcagctgaagcggaagctgcaaagaaatagaacatcctttacccaagagcaaattgaggccctggagaaagagtttgagagaacccattatccagatgtgtttgcccgagaaagactagcagccaaaatagatctacctgaagcaagaatacaggtatggttttctaatcgaagggccaaatggagaagagaagaaaaactgaggaatcagagaagacaggccagcaacacacctagtcatattcctatcagcagtagtttcagcaccagtgtctaccaaccaattccacaacccaccacaccggtttcctccttcacatctggctccatgttgggccgaacagacacagccctcacaaacacctacagcgctctgccgcctatgcccagcttcaccatggcaaataacctgcctatgcaagtaagtgcggctggtggtggcctgcataacccaggccccagagaagtgaggagtggctcagggcctgcggacctcattggctgtgtctgcacccttgagagcttttcgcactacagtgattggcttgaccagtcaagtcggagacagtcaatcccatcacttttaagtgattgactcattaattcatgccctaaaaaaatgagtaataaaaatctgtccagttttgtcaggttgatctgccttttattatactgttaccttgataatgttgggtggtggtggggcatgttttgggtaccagggagccttgcaccagaaagtggaaataatgctggcacattatcagatagcagattagtagtttaaaatttgggtttatattaatgtgtttgtatgctaaatatagaatctgtgcacgcatttggggcattactttgggtatatgtgataaactagtgagaaagaaaaaaggatcagaaatgggattcatatttacatggtgagatatacataatataatgagaatgctagttttctgtctgtatctacaataagaaaaggcatagcaggtatttgctggaaatttagtgtgtctttgctgtgaatggtgtgacgagtttgtggccctcctagctgcctgggaagcttgatgctattcacttggtatgacagcctgcctctcctcttagttctgtcccaaatatctattagcccctacatttagaggtcctgcactaggttcaccctttatgatgtaagttggataaggcagatggtttgtactagacctttgttgctggatggattcttgataggaaaaatgtctgtcttctggtaggcctttcccagtggttttcctagaactcctgtttgtgcaacaattagagatattagatggtacgatattggccagcatgagcctctgctggaaacagttctggggctacactgattgtttattctccattgaacattttttgctggatttcaaatccaaataacagcaaaataaatgtttcacagtcttcagactaatataggagcagctagataagcaacttcagaggaattattcacatgtttatttttattgcatctggatattgttggccatagtgcaattgatgtaaattaagggattaacagcccattagttggtgttgctataactgcgttggaattttccagaagtcaggttgcctagaggaactcattgcaggaattagaaacaaatgcaagctgaaattctggcaggccctcaaggcctgtttgcctctttgaacttgatgttagcattcatcatctgactttaataaggccacagagtgtctcgttcagtttcatgtattataacaacatccaggtttctgtgaagatagcaaaatgtgtatgtgagaaaataataagacgaacaagtagatgctgcaattatattagggctgtttccacatacagagcggtatggggaatcaatctatttcaaacactgacttttaaaaattacataatttgtataattcaaaaagtacatgcattcattaagcataaagaaaatcaaaatgatcaataactttactcttcagagaaaactactctttgaattttggagtgggtgagcccgattgtctatccatttattcattctcttgaccaaaatcatcattttacaaatggtgggtgtcttcctctggaccttctctgatatgcttccctctctgagcatatggattttggaaattaaacatttctccagtttgcagagaagagaaatgatagtatactgtactatcatctgacctgcttgttcccgacacacttcttttaattcatcccaagtttgctgccatggcatagtaccatgagagctcatgaggcgttttgttaggagaaaggtttacctcctcagtgctgccattccgaacagttcgagggtagcaacagttttctagttataagtcagtctgggcttttgggtctgttaggaagtcatggttaattctcaggatggaggtcgttatatttactaacacttctgatcactttaacttggggtcattacagatctgcttcttcaaagaatctttaatcccatcagtgaaaggttcccaaggtccctgaaccatactttactgagagctcctcccactgctctctgtcccaaagcttgagatatgggctctgggggtcatagggttcccaaataaatccagatttgcagggagaggggatgtgttttgatgaaggtcctcatgctataggttcttcaaagatgctagcagaggttagagacaaaaatcctattaatttatggatagtggcaaccatctagctggacagttgtcagaacctaaagtgctttagaggcttgatacataggcagctttcttctagctgtggccagtggaaggactagctcgaggcccaatcttagatttatcatatggaattccagtacttcacgtgaaggcatctttaatgatcagacttgttggcagagttcctcgggaggagggagcctggggctgtggctgtgtgatgtgttcctcagtaaccacaggtttgcctctctcctcacagcccccagtccccagccagacctcctcatactcctgcatgctgcccaccagcccttcggtgaatgggcggagttatgatacctacacccccccacatatgcagacacacatgaacagtcagccaatgggcacctcgggcaccacttcaacaggactcatttcccctggtgtgtcagttccagttcaagttcccggaagtgaacctgatatgtctcaatactggccaagattacagtaaaaaaaaaaaaaaaaaa

SEQ ID NO: 14797 - DNA, 2844 bp, Homo sapiens
  source 1..2844: mol_type = unassigned DNA
agtaggctccaaggagaagagaggagaggagaggagagctgaacagggagccacgtcttttcctgggagggctgctatctaagtcggggctgcaggttggagatttttaaggaagtggaaattggcaattggctttgtgtgtctgtggtttttggggagggggactacaaagaggggctaactccctctccctattctctaaggttggaccacagggatgaggttgtgagatacaaagataaaggagggatggggaacactatgatgtggtatttttcttttctgttttttctttttgataatatctatccttggctaaggggagggcggagttcagcggcggaaataaagcgagcagtggctggtgcgaaccgactcccggctctaagccttacttgcggtggccggacttgtctgtggctgaagccgagcccgggctctgactctcacgtctgcactggaggtgcggaaacctggactggggttcaccagccacatactggctgctctggttgttctctcctcttccttcttctattctaaccaaacaaaacccaactcgatgcttgtgccaggccttggccagtttggacggtgatggaaacatttctggattttagcgtctaagggagcactcaagggctgtaaggtttgctatcactgtcccaacactgcagagaccttgaaggttcagtgtgggatctgtagaacccatggtttgcggtgacactcagaggggatctttgggagatttatagagccggttcttagcgctttgtgggttcagaggctggctgcagtgtttatgaagaggggcagtgggctggggacactgctggggttatggctgtagtgaggtccatgtgtacttgttccttggcatgtgtctgactctgtgttgctgctgcagtacagtgggcaggggcacggttgcttggactgggctgcccgatgtctggcatggctggtggtcctgttgtcctttatttgatcgatagcagggaactgaccgccgaggttggcacaggttggcagggggatgaggatgcattgtggttgtctcctcctcctctccttcttcctcttccccttcctcctctcctttctgttcttgttctccctcatcttcctcttccttcttctccctcttcttcctcttcactctgctctcttctcttcttttcccctttcctctcctctccctttcctcaggtcacagcggagtgaatcagctcggtggtgtctttgtcaacgggcggccactgccggactccacccggcagaagattgtagagctagctcacagcggggcccggccgtgcgacatttcccgaattctgcagacccatgcagatgcaaaagtccaagtgctggacaatcaaaacgtgtccaacggatgtgtgagtaaaattctgggcaggtattacgagactggctccatcagacccagggcaatcggtggtagtaaaccgagagtagcgactccagaagttgtaagcaaaatagcccagtataagcgggagtgcccgtccatctttgcttgggaaatccgagacagattactgtccgagggggtctgtaccaacgataacataccaagcgtaagttcattgagaacatctgccctccctgccctaagcccaatgctctctcctctttacctcctcccaccctctctctccactgtctcttagtctgtgtcctctccctgctccacatttgtctcctttgtacctgggggaacagagaggaatgccctgacttttctttgactgtctggaaaatgggagtcaagtgtggggagtcattcacttcatttgcatgctgcaaaacagagggcggaggcaccagggaaaggcacttgaatgaagaaggaaaatgagaaccagattgtaacttcgtcctaatccacctgccagaactttccttcaggtgtcatcaataaacagagttcttcgcaacctggctagcgaaaagcaacagatgggcgcagacggcatgtatgataaactaaggatgttgaacgggcagaccggaagctggggcacccgccctggttggtatccggggacttcggtgccagggcaacctacgcaagatggctgccagcaacaggaaggagggggagagaataccaactccatcagttccaacggagaagattcagatgaggctcaaatgcgacttcagctgaagcggaagctgcaaagaaatagaacatcctttacccaagagcaaattgaggccctggagaaagagtttgagagaacccattatccagatgtgtttgcccgagaaagactagcagccaaaatagatctacctgaagcaagaatacaggtatggttttctaatcgaagggccaaatggagaagagaagaaaaactgaggaatcagagaagacaggccagcaacacacctagtcatattcctatcagcagtagtttcagcaccagtgtctaccaaccaattccacaacccaccacaccggtttcctccttcacatctggctccatgttgggccgaacagacacagccctcacaaacacctacagcgctctgccgcctatgcccagcttcaccatggcaaataacctgcctatgcaacccccagtccccagccagacctcctcatactcctgcatgctgcccaccagcccttcggtgaatgggcggagttatgatacctacacccccccacatatgcagacacacatgaacagtcagccaatgggcacctcgggcaccacttcaacaggactcatttcccctggtgtgtcagttccagttcaagttcccggaagtgaacctgatatgtctcaatactggccaagattacagtaa

SEQ ID NO: 14798 - DNA, 1417 bp, Homo sapiens
  source 1..1417: mol_type = unassigned DNA
tcaaacttgacgtgcagctagttttattttaaagacaaatgtcagagaggctcatcatattttcccccctcttctatatttggagcttatttattgctaagaagctcaggctcctggcgtcaatttatcagtaggctccaaggagaagagaggagaggagaggagagctgaacagggagccacgtcttttcctgggagggctgctatctaagtcggggctgcaggtcacagcggagtgaatcagctcggtggtgtctttgtcaacgggcggccactgccggactccacccggcagaagattgtagagctagctcacagcggggcccggccgtgcgacatttcccgaattctgcagacccatgcagatgcaaaagtccaagtgctggacaatcaaaacgtgtccaacggatgtgtgagtaaaattctgggcaggtattacgagactggctccatcagacccagggcaatcggtggtagtaaaccgagagtagcgactccagaagttgtgtcatcaataaacagagttcttcgcaacctggctagcgaaaagcaacagatgggcgcagacggcatgtatgataaactaaggatgttgaacgggcagaccggaagctggggcacccgccctggttggtatccggggacttcggtgccagggcaacctacgcaagatggctgccagcaacaggaaggagggggagagaataccaactccatcagttccaacggagaagattcagatgaggctcaaatgcgacttcagctgaagcggaagctgcaaagaaatagaacatcctttacccaagagcaaattgaggccctggagaaagagtttgagagaacccattatccagatgtgtttgcccgagaaagactagcagccaaaatagatctacctgaagcaagaatacaggtatggttttctaatcgaagggccaaatggagaagagaagaaaaactgaggaatcagagaagacaggccagcaacacacctagtcatattcctatcagcagtagtttcagcaccagtgtctaccaaccaattccacaacccaccacaccggtttcctccttcacatctggctccatgttgggccgaacagacacagccctcacaaacacctacagcgctctgccgcctatgcccagcttcaccatggcaaataacctgcctatgcaacccccagtccccagccagacctcctcatactcctgcatgctgcccaccagcccttcggtgaatgggcggagttatgatacctacacccccccacatatgcagacacacatgaacagtcagccaatgggcacctcgggcaccacttcaacaggactcatttcccctggtgtgtcagttccagttcaagttcccggaagtgaacctgatatgtctcaatactggccaagattacagtaa

SEQ ID NO: 14799 - DNA, 1375 bp, Homo sapiens
  source 1..1375: mol_type = unassigned DNA
tcaaacttgacgtgcagctagttttattttaaagacaaatgtcagagaggctcatcatattttcccccctcttctatatttggagcttatttattgctaagaagctcaggctcctggcgtcaatttatcagtaggctccaaggagaagagaggagaggagaggagagctgaacagggagccacgtcttttcctgggagggctgctatctaagtcggggctgcaggtcacagcggagtgaatcagctcggtggtgtctttgtcaacgggcggccactgccggactccacccggcagaagattgtagagctagctcacagcggggcccggccgtgcgacatttcccgaattctgcaggtgtccaacggatgtgtgagtaaaattctgggcaggtattacgagactggctccatcagacccagggcaatcggtggtagtaaaccgagagtagcgactccagaagttgtgtcatcaataaacagagttcttcgcaacctggctagcgaaaagcaacagatgggcgcagacggcatgtatgataaactaaggatgttgaacgggcagaccggaagctggggcacccgccctggttggtatccggggacttcggtgccagggcaacctacgcaagatggctgccagcaacaggaaggagggggagagaataccaactccatcagttccaacggagaagattcagatgaggctcaaatgcgacttcagctgaagcggaagctgcaaagaaatagaacatcctttacccaagagcaaattgaggccctggagaaagagtttgagagaacccattatccagatgtgtttgcccgagaaagactagcagccaaaatagatctacctgaagcaagaatacaggtatggttttctaatcgaagggccaaatggagaagagaagaaaaactgaggaatcagagaagacaggccagcaacacacctagtcatattcctatcagcagtagtttcagcaccagtgtctaccaaccaattccacaacccaccacaccggtttcctccttcacatctggctccatgttgggccgaacagacacagccctcacaaacacctacagcgctctgccgcctatgcccagcttcaccatggcaaataacctgcctatgcaacccccagtccccagccagacctcctcatactcctgcatgctgcccaccagcccttcggtgaatgggcggagttatgatacctacacccccccacatatgcagacacacatgaacagtcagccaatgggcacctcgggcaccacttcaacaggactcatttcccctggtgtgtcagttccagttcaagttcccggaagtgaacctgatatgtctcaatactggccaagattacagtaa

SEQ ID NO: 14800 - DNA, 1587 bp, Homo sapiens
  source 1..1587: mol_type = unassigned DNA
cttttcaattagccttccatgcatgatccggagcgacttccgcctatttccagaaattaagctcaaacttgacgtgcagctagttttattttaaagacaaatgtcagagaggctcatcatattttcccccctcttctatatttggagcttatttattgctaagaagctcaggctcctggcgtcaatttatcagtaggctccaaggagaagagaggagaggagaggagagctgaacagggagccacgtcttttcctgggagggctgctatctaagtcggggctgcaggtcacagcggagtgaatcagctcggtggtgtctttgtcaacgggcggccactgccggactccacccggcagaagattgtagagctagctcacagcggggcccggccgtgcgacatttcccgaattctgcagacccatgcagatgcaaaagtccaagtgctggacaatcaaaacgtgtccaacggatgtgtgagtaaaattctgggcaggtattacgagactggctccatcagacccagggcaatcggtggtagtaaaccgagagtagcgactccagaagttgtaagcaaaatagcccagtataagcgggagtgcccgtccatctttgcttgggaaatccgagacagattactgtccgagggggtctgtaccaacgataacataccaagcgtgtcatcaataaacagagttcttcgcaacctggctagcgaaaagcaacagatgggcgcagacggcatgtatgataaactaaggatgttgaacgggcagaccggaagctggggcacccgccctggttggtatccggggacttcggtgccagggcaacctacgcaagatggctgccagcaacaggaaggagggggagagaataccaactccatcagttccaacggagaagattcagatgaggctcaaatgcgacttcagctgaagcggaagctgcaaagaaatagaacatcctttacccaagagcaaattgaggccctggagaaagagtttgagagaacccattatccagatgtgtttgcccgagaaagactagcagccaaaatagatctacctgaagcaagaatacaggtatggttttctaatcgaagggccaaatggagaagagaagaaaaactgaggaatcagagaagacaggccagcaacacacctagtcatattcctatcagcagtagtttcagcaccagtgtctaccaaccaattccacaacccaccacaccggtttcctccttcacatctggctccatgttgggccgaacagacacagccctcacaaacacctacagcgctctgccgcctatgcccagcttcaccatggcaaataacctgcctatgcaacccccagtccccagccagacctcctcatactcctgcatgctgcccaccagcccttcggtgaatgggcggagttatgatacctacacccccccacatatgcagacacacatgaacagtcagccaatgggcacctcgggcaccacttcaacaggactcatttcccctggtgtgtcagttccagttcaagttcccggaagtgaacctgatatgtctcaatactggccaagattacagtaa

SEQ ID NO: 14801 - DNA, 1723 bp, Homo sapiens
  source 1..1723: mol_type = unassigned DNA
cctgaaaacgcggctcccctcgaaggggaaacaagtgcagttcaatctcgtctgagtgatctacaaataaggacggaaagggtcgttttatcacggtcccgtttgtcgtgacgatgcaatttcccggagcggagcactgtcacaaagtgacaaggctgccacaagcgccccgactgatcttttcaattagccttccatgcatgatccggagcgacttccgcctatttccagaaattaagctcaaacttgacgtgcagctagttttattttaaagacaaatgtcagagaggctcatcatattttcccccctcttctatatttggagcttatttattgctaagaagctcaggctcctggcgtcaatttatcagtaggctccaaggagaagagaggagaggagaggagagctgaacagggagccacgtcttttcctgggagggctgctatctaagtcggggctgcaggtcacagcggagtgaatcagctcggtggtgtctttgtcaacgggcggccactgccggactccacccggcagaagattgtagagctagctcacagcggggcccggccgtgcgacatttcccgaattctgcaggtgtccaacggatgtgtgagtaaaattctgggcaggtattacgagactggctccatcagacccagggcaatcggtggtagtaaaccgagagtagcgactccagaagttgtaagcaaaatagcccagtataagcgggagtgcccgtccatctttgcttgggaaatccgagacagattactgtccgagggggtctgtaccaacgataacataccaagcgtgtcatcaataaacagagttcttcgcaacctggctagcgaaaagcaacagatgggcgcagacggcatgtatgataaactaaggatgttgaacgggcagaccggaagctggggcacccgccctggttggtatccggggacttcggtgccagggcaacctacgcaagatggctgccagcaacaggaaggagggggagagaataccaactccatcagttccaacggagaagattcagatgaggctcaaatgcgacttcagctgaagcggaagctgcaaagaaatagaacatcctttacccaagagcaaattgaggccctggagaaagagtttgagagaacccattatccagatgtgtttgcccgagaaagactagcagccaaaatagatctacctgaagcaagaatacaggtatggttttctaatcgaagggccaaatggagaagagaagaaaaactgaggaatcagagaagacaggccagcaacacacctagtcatattcctatcagcagtagtttcagcaccagtgtctaccaaccaattccacaacccaccacaccggtttcctccttcacatctggctccatgttgggccgaacagacacagccctcacaaacacctacagcgctctgccgcctatgcccagcttcaccatggcaaataacctgcctatgcaacccccagtccccagccagacctcctcatactcctgcatgctgcccaccagcccttcggtgaatgggcggagttatgatacctacacccccccacatatgcagacacacatgaacagtcagccaatgggcacctcgggcaccacttcaacaggactcatttcccctggtgtgtcagttccagttcaagttcccggaagtgaacctgatatgtctcaatactggccaagattacagtaa

SEQ ID NO: 14802 - DNA, 1203 bp, Homo sapiens
  source 1..1203: mol_type = unassigned DNA
atgcagaacagtcacagcggagtgaatcagctcggtggtgtctttgtcaacgggcggccactgccggactccacccggcagaagattgtagagctagctcacagcggggcccggccgtgcgacatttcccgaattctgcagacccatgcagatgcaaaagtccaagtgctggacaatcaaaacgtgtccaacggatgtgtgagtaaaattctgggcaggtattacgagactggctccatcagacccagggcaatcggtggtagtaaaccgagagtagcgactccagaagttgtgtcatcaataaacagagttcttcgcaacctggctagcgaaaagcaacagatgggcgcagacggcatgtatgataaactaaggatgttgaacgggcagaccggaagctggggcacccgccctggttggtatccggggacttcggtgccagggcaacctacgcaagatggctgccagcaacaggaaggagggggagagaataccaactccatcagttccaacggagaagattcagatgaggctcaaatgcgacttcagctgaagcggaagctgcaaagaaatagaacatcctttacccaagagcaaattgaggccctggagaaagagtttgagagaacccattatccagatgtgtttgcccgagaaagactagcagccaaaatagatctacctgaagcaagaatacaggtatggttttctaatcgaagggccaaatggagaagagaagaaaaactgaggaatcagagaagacaggccagcaacacacctagtcatattcctatcagcagtagtttcagcaccagtgtctaccaaccaattccacaacccaccacaccggtttcctccttcacatctggctccatgttgggccgaacagacacagccctcacaaacacctacagcgctctgccgcctatgcccagcttcaccatggcaaataacctgcctatgcaacccccagtccccagccagacctcctcatactcctgcatgctgcccaccagcccttcggtgaatgggcggagttatgatacctacacccccccacatatgcagacacacatgaacagtcagccaatgggcacctcgggcaccacttcaacaggactcatttcccctggtgtgtcagttccagttcaagttcccggaagtgaacctgatatgtctcaatactggccaagattacagtaa

SEQ ID NO: 14803 - DNA, 1161 bp, Homo sapiens
  source 1..1161: mol_type = unassigned DNA
atgcagaacagtcacagcggagtgaatcagctcggtggtgtctttgtcaacgggcggccactgccggactccacccggcagaagattgtagagctagctcacagcggggcccggccgtgcgacatttcccgaattctgcaggtgtccaacggatgtgtgagtaaaattctgggcaggtattacgagactggctccatcagacccagggcaatcggtggtagtaaaccgagagtagcgactccagaagttgtgtcatcaataaacagagttcttcgcaacctggctagcgaaaagcaacagatgggcgcagacggcatgtatgataaactaaggatgttgaacgggcagaccggaagctggggcacccgccctggttggtatccggggacttcggtgccagggcaacctacgcaagatggctgccagcaacaggaaggagggggagagaataccaactccatcagttccaacggagaagattcagatgaggctcaaatgcgacttcagctgaagcggaagctgcaaagaaatagaacatcctttacccaagagcaaattgaggccctggagaaagagtttgagagaacccattatccagatgtgtttgcccgagaaagactagcagccaaaatagatctacctgaagcaagaatacaggtatggttttctaatcgaagggccaaatggagaagagaagaaaaactgaggaatcagagaagacaggccagcaacacacctagtcatattcctatcagcagtagtttcagcaccagtgtctaccaaccaattccacaacccaccacaccggtttcctccttcacatctggctccatgttgggccgaacagacacagccctcacaaacacctacagcgctctgccgcctatgcccagcttcaccatggcaaataacctgcctatgcaacccccagtccccagccagacctcctcatactcctgcatgctgcccaccagcccttcggtgaatgggcggagttatgatacctacacccccccacatatgcagacacacatgaacagtcagccaatgggcacctcgggcaccacttcaacaggactcatttcccctggtgtgtcagttccagttcaagttcccggaagtgaacctgatatgtctcaatactggccaagattacagtaa

SEQ ID NO: 14804 - DNA, 3587 bp, Homo sapiens
  source 1..3587: mol_type = unassigned DNA
cgcgccttggtgagggccccccctcagccccaagccttcggctaccctgaaaacgcggctcccctcgaaggggaaacaagtgcagttcaatctcgtctgagtgatctacaaataaggacggaaagggtcgttttatcacggtcccgtttgtcgtgacgatgcaatttcccggagcggagcactgtcacaaagtgacaaggctgccacaagcgccccgactgatcttttcaattagccttccatgcatgatccggagcgacttccgcctatttccagaaattaagctcaaacttgacgtgcagctagttttattttaaagacaaatgtcagagaggctcatcatattttcccccctcttctatatttggagcttatttattgctaagaagctcaggctcctggcgtcaatttatcagtaggctccaaggagaagagaggagaggagaggagagctgaacagggagccacgtcttttcctgggagggctgctatctaagtcggggctgcaggttggagatttttaaggaagtggaaattggcaattggctttgtgtgtctgtggtttttggggagggggactacaaagaggggctaactccctctccctattctctaaggttggaccacagggatgaggttgtgagatacaaagataaaggagggatggggaacactatgatgtggtatttttcttttctgttttttctttttgataatatctatccttggctaaggggagggcggagttcagcggcggaaataaagcgagcagtggctggtgcgaaccgactcccggctctaagccttacttgcggtggccggacttgtctgtggctgaagccgagcccgggctctgactctcacgtctgcactggaggtgcggaaacctggactggggttcaccagccacatactggctgctctggttgttctctcctcttccttcttctattctaaccaaacaaaacccaactcgatgcttgtgccaggccttggccagtttggacggtgatggaaacatttctggattttagcgtctaagggagcactcaagggctgtaaggtttgctatcactgtcccaacactgcagagaccttgaaggttcagtgtgggatctgtagaacccatggtttgcggtgacactcagaggggatctttgggagatttatagagccggttcttagcgctttgtgggttcagaggctggctgcagtgtttatgaagaggggcagtgggctggggacactgctggggttatggctgtagtgaggtccatgtgtacttgttccttggcatgtgtctgactctgtgttgctgctgcagtacagtgggcaggggcacggttgcttggactgggctgcccgatgtctggcatggctggtggtcctgttgtcctttatttgatcgatagcagggaactgaccgccgaggttggcacaggttggcagggggatgaggatgcattgtggttgtctcctcctcctctccttcttcctcttccccttcctcctctcctttctgttcttgttctccctcatcttcctcttccttcttctccctcttcttcctcttcactctgctctcttctcttcttttcccctttcctctcctctccctttcctcaggtcacagcggagtgaatcagctcggtggtgtctttgtcaacgggcggccactgccggactccacccggcagaagattgtagagctagctcacagcggggcccggccgtgcgacatttcccgaattctgcaggtgtccaacggatgtgtgagtaaaattctgggcaggtattacgagactggctccatcagacccagggcaatcggtggtagtaaaccgagagtagcgactccagaagttgtaagcaaaatagcccagtataagcgggagtgcccgtccatctttgcttgggaaatccgagacagattactgtccgagggggtctgtaccaacgataacataccaagcgtaagttcattgagaacatctgccctccctgccctaagcccaatgctctctcctctttacctcctcccaccctctctctccactgtctcttagtctgtgtcctctccctgctccacatttgtctcctttgtacctgggggaacagagaggaatgccctgacttttctttgactgtctggaaaatgggagtcaagtgtggggagtcattcacttcatttgcatgctgcaaaacagagggcggaggcaccagggaaaggcacttgaatgaagaaggaaaatgagaaccagattgtaacttcgtcctaatccacctgccagaactttccttcaggtgtcacacatccatttccatcctaatattaaacaatataatgaaagaaagctttacaacaagtctaaatagtttttattttcgggcagtcttttaacaaagcaaagcaaccgtgtgagttaggtcaccagagacaccaagcaatggtgaaggaccccctccgcccaattctctatccaactaaatttccatgcccaaagtgatagctatcattttttccacggtgtatctgcaaatccacccactgtcccggggtggctgggagctttttaacgggttgagagttgctttttaaggttgtgggtgagctgagatgggtgactgtgtcttcaggagacactaccatttggtttgattttggtttgatttgcaggtgtcatcaataaacagagttcttcgcaacctggctagcgaaaagcaacagatgggcgcagacggcatgtatgataaactaaggatgttgaacgggcagaccggaagctggggcacccgccctggttggtatccggggacttcggtgccagggcaacctacgcaagatggctgccagcaacaggaaggagggggagagaataccaactccatcagttccaacggagaagattcagatgaggctcaaatgcgacttcagctgaagcggaagctgcaaagaaatagaacatcctttacccaagagcaaattgaggccctggagaaagagtttgagagaacccattatccagatgtgtttgcccgagaaagactagcagccaaaatagatctacctgaagcaagaatacaggtatggttttctaatcgaagggccaaatggagaagagaagaaaaactgaggaatcagagaagacaggccagcaacacacctagtcatattcctatcagcagtagtttcagcaccagtgtctaccaaccaattccacaacccaccacaccggtttcctccttcacatctggctccatgttgggccgaacagacacagccctcacaaacacctacagcgctctgccgcctatgcccagcttcaccatggcaaataacctgcctatgcaacccccagtccccagccagacctcctcatactcctgcatgctgcccaccagcccttcggtgaatgggcggagttatgatacctacacccccccacatatgcagacacacatgaacagtcagccaatgggcacctcgggcaccacttcaacaggactcatttcccctggtgtgtcagttccagttcaagttcccggaagtgaacctgatatgtctcaatactggccaagattacagt

SEQ ID NO: 14805 - DNA, 1485 bp, Homo sapiens
  source 1..1485: mol_type = unassigned DNA
actgcagggcagagctgagtgaccctcagatcgccccaagaggttgagtggatcaattcctaaagaacggagattctcctgtcctagccccaggtccacctcggttgggagttcaggcctacctgatgcagctgcccgaggattaactcctattttcttgctaacagagccccatattcgagccccgtggaatcccgcggcccccagccagagccagcatgcagaacagtcacagcggagtgaatcagctcggtggtgtctttgtcaacgggcggccactgccggactccacccggcagaagattgtagagctagctcacagcggggcccggccgtgcgacatttcccgaattctgcaggtgtccaacggatgtgtgagtaaaattctgggcaggtattacgagactggctccatcagacccagggcaatcggtggtagtaaaccgagagtagcgactccagaagttgtaagcaaaatagcccagtataagcgggagtgcccgtccatctttgcttgggaaatccgagacagattactgtccgagggggtctgtaccaacgataacataccaagcgtgtcatcaataaacagagttcttcgcaacctggctagcgaaaagcaacagatgggcgcagacggcatgtatgataaactaaggatgttgaacgggcagaccggaagctggggcacccgccctggttggtatccggggacttcggtgccagggcaacctacgcaagatggctgccagcaacaggaaggagggggagagaataccaactccatcagttccaacggagaagattcagatgaggctcaaatgcgacttcagctgaagcggaagctgcaaagaaatagaacatcctttacccaagagcaaattgaggccctggagaaagagtttgagagaacccattatccagatgtgtttgcccgagaaagactagcagccaaaatagatctacctgaagcaagaatacaggtatggttttctaatcgaagggccaaatggagaagagaagaaaaactgaggaatcagagaagacaggccagcaacacacctagtcatattcctatcagcagtagtttcagcaccagtgtctaccaaccaattccacaacccaccacaccggtttcctccttcacatctggctccatgttgggccgaacagacacagccctcacaaacacctacagcgctctgccgcctatgcccagcttcaccatggcaaataacctgcctatgcaacccccagtccccagccagacctcctcatactcctgcatgctgcccaccagcccttcggtgaatgggcggagttatgatacctacacccccccacatatgcagacacacatgaacagtcagccaatgggcacctcgggcaccacttcaacaggactcatttcccctggtgtgtcagttccagttcaagttcccggaagtgaacctgatatgtctcaatactggccaagattacagt

SEQ ID NO: 14806 - DNA, 6173 bp, Homo sapiens
  source 1..6173: mol_type = unassigned DNA
gattagtgggtttgaaaagggaaccgtggctcggcctcatttcccgctctggttcaggcgcaggaggaagtgttttgctggaggatgatgacagaggaatctgagaattgctctcacacaccaacccagcaacatccgtggagaaaactctcaccagcaactcctttaaaacaccgtcatttcaaaccattgtggtcttcaagcaacaacagcagcacaaaaaaccccaaccaaacaaaactcttgacagaagctgtgacaaccagaaaggatgcctcataaagggggaagactttaactaggggcgcgcagatgtgtgaggccttttattgtgagagtggacagacatccgagatttcagagccccatattcgagccccgtggaatcccgcggcccccagccagagccagcatgcagaacagtaagtgcctctggtctttctgggacttcgggctcggggtgcgcggacccgagggtcaggggaggacacagggactcgcgacgcccgcgctggcccggccgccgaccgactgaggcccggggacctgcggcggctgctccccgctccgcgcccggcagcccgggaggggagggcgtttgcttggctcttctcgatactggagaagcaggggctgggcccttaagaacagcccgcccgagttttcgaagctgcggtagagaaaccccatcccccccaaatcctgtaactcacaccccctctcgcccctgcccgggctctgaccccggagagaggggctgggctgatcagggcggggcgaagtcttctcctagttgagcgagaaggaggcccctttgggcttagccaagactgaaagtctccaccaacccggcggggttgggggcttctctccccaagtcactctcagggcagctcctcccctcctcaccccactacgggcctagaagggatggggagaggagcccccaggcctgcagcagggtaggggtggtaaactcgctgttacagggcgcgggagagagcacggtttactgggtctggtaaggaggtgcccaggaattggaaaatccctgccctggcaactgcaattgcttgggtcctgatagtcccaggcccagagcgcttttgatacttatggcccttgtacctccctgctttcctctgcccagaccccgtggggtcccacccaccttcctgttcgtggtgggtgctggtacgcggcagggctagtctagagctccgacctgggagcctggaggcccagcgaaaccaggcccggtttgaggttacggttgaggcacacggcgtcggggctcaactgaactcaaagtgtggaaaggcccgggtcttccagcagcctgccctggccgaaccacacaggcttaaggagggtccccagcaccttatccatctgttttggaaacgccggtcgccccctggtgcttccggggctggtaagcgcgtagctgaggaaagggcacaaaggtggcgagctttgcgggagtagttgtgcagaacctgccggaccccagggcttggccggtaggctcgccttcggcggctgggctctccccttggagctcagactccccagccgcaggctgtctctcgggcgggccccagccagggcgcgcagccctgagcgtttgtcgctgcggcccggctggcaggccccgaggggcgcggggtcgcgggccggccggcagggctttgtgccgctcgttcccgggtgtgcgcgaggcgcggagcatccaaattgacaccatatgttttcctattagttgcttcgcggtcgagttctaggcgcataatcatcgccagtgggcgagagcgccagcagtccctagggaagggacacaatgattgaggcttaacctctgaaggggaatttggagctgcgctttctctctgccatttcgatgctgggagtggcgctctggccctggcgtctcctgggcaagcaccagccggcggtatctgcggaggtggctggcacgttgttattttttgaaatgagtgaggagggaggtctagatttaggcggccttacgcgcccgccttggcattagcagactgggaattgccgtggctatgcccgaagtttggaaagtctctctcggtctctttctgggacagcctttctttttccgggaagcttcctgtgcctagaggtggggctctgtagctggaggggtagatggaacttgcgaagcaaaggaaggcaataaaaggaagttaggagaaaccggaaacgtgggccaggccttgctctgttggagaagcggtgtccccgcaaagtccctgcttgcgctggtcccggccggagcccagatcccccaaacgcctgtcacttctcatcgagttgaggctccggcccccacccgcgccttggtgagggccccccctcagccccaagccttcggctaccctgaaaacgcggctcccctcgaaggggaaacaagtgcagttcaatctcgtctgagtgatctacaaataaggacggaaagggtcgttttatcacggtcccgtttgtcgtgacgatgcaatttcccggagcggagcactgtcacaaagtgacaaggctgccacaagcgccccgactgatcttttcaattagccttccatgcatgatccggagcgacttccgcctatttccagaaattaagctcaaacttgacgtgcagctagttttattttaaagacaaatgtcagagaggctcatcatattttcccccctcttctatatttggagcttatttattgctaagaagctcaggctcctggcgtcaatttatcagtaggctccaaggagaagagaggagaggagaggagagctgaacagggagccacgtcttttcctgggagggctgctatctaagtcggggctgcaggttggagatttttaaggaagtggaaattggcaattggctttgtgtgtctgtggtttttggggagggggactacaaagaggggctaactccctctccctattctctaaggttggaccacagggatgaggttgtgagatacaaagataaaggagggatggggaacactatgatgtggtatttttcttttctgttttttctttttgataatatctatccttggctaaggggagggcggagttcagcggcggaaataaagcgagcagtggctggtgcgaaccgactcccggctctaagccttacttgcggtggccggacttgtctgtggctgaagccgagcccgggctctgactctcacgtctgcactggaggtgcggaaacctggactggggttcaccagccacatactggctgctctggttgttctctcctcttccttcttctattctaaccaaacaaaacccaactcgatgcttgtgccaggccttggccagtttggacggtgatggaaacatttctggattttagcgtctaagggagcactcaagggctgtaaggtttgctatcactgtcccaacactgcagagaccttgaaggttcagtgtgggatctgtagaacccatggtttgcggtgacactcagaggggatctttgggagatttatagagccggttcttagcgctttgtgggttcagaggctggctgcagtgtttatgaagaggggcagtgggctggggacactgctggggttatggctgtagtgaggtccatgtgtacttgttccttggcatgtgtctgactctgtgttgctgctgcagtacagtgggcaggggcacggttgcttggactgggctgcccgatgtctggcatggctggtggtcctgttgtcctttatttgatcgatagcagggaactgaccgccgaggttggcacaggttggcagggggatgaggatgcattgtggttgtctcctcctcctctccttcttcctcttccccttcctcctctcctttctgttcttgttctccctcatcttcctcttccttcttctccctcttcttcctcttcactctgctctcttctcttcttttcccctttcctctcctctccctttcctcaggtcacagcggagtgaatcagctcggtggtgtctttgtcaacgggcggccactgccggactccacccggcagaagattgtagagctagctcacagcggggcccggccgtgcgacatttcccgaattctgcaggtgatcctcccggcgccgccccactcgccgcccccgcggccctccactctcaacgccctctcttcatttcttactgtaaacgatgctaattatggacccccccaccctcacccaccccagtccccagtccccccacccactcccctgccttcccactttcccctctccttccaccatccttccctatctctttcaacctgggtcagttacataagataactcatctgcttcagaaaaatattgtgtgcggatttttttaaaaaaatctttctctttttatttggtaaagacattcattgtgggaacagtttatgaaccgtaataagctgagttatataaaccggcataatttcattctgctctccccagcccatgcttacctcagcttttgaggtatttgtttattcttcatgtttatgaataatatatattgattttaaaaggcaaatgctatttactcctccctaactcacatttactcaattgagtattttttaaagaagaagaagtaaaaaaatcagtttattttttacctttgttctttaaaacataacgccactttaagcaaggtcagcacaaaaataaatttatctacttcgttttgatgcatcttcaggcagtgtttaagaaaagttttttttttaaaaaaagcttttaaattcgttttttagttcaaattgtttgaaagtatcatcatatttgtagtttttagggctacaaatgtaattttaagaaaaaaagctctctacagtaagttctcataccattgaaggtatatttttgtgttatagacccatgcagatgcaaaagtccaagtgctggacaatcaaaacgtaagcttgtcattgtttaatgcatacttaaacaattttatttttgtcttgaaattattaataatgtggttttctgtccacttcccctatgcaggtgtccaacggatgtgtgagtaaaattctgggcaggtattacgagactggctccatcagacccagggcaatcggtggtagtaaaccgagagtagcgactccagaagttgtaagcaaaatagcccagtataagcgggagtgcccgtccatctttgcttgggaaatccgagacagattactgtccgagggggtctgtaccaacgataacataccaagcgtgtcatcaataaacagagttcttcgcaacctggctagcgaaaagcaacagatgggcgcagacggcatgtatgataaactaaggatgttgaacgggcagaccggaagctggggcacccgccctggttggtatccggggacttcggtgccagggcaacctacgcaagatggctgccagcaacaggaaggagggggagagaataccaactccatcagttccaacggagaagattcagatgaggctcaaatgcgacttcagctgaagcggaagctgcaaagaaatagaacatcctttacccaagagcaaattgaggccctggagaaagagtttgagagaacccattatccagatgtgtttgcccgagaaagactagcagccaaaatagatctacctgaagcaagaatacaggtatggttttctaatcgaagggccaaatggagaagagaagaaaaactgaggaatcagagaagacaggccagcaacacacctagtcatattcctatcagcagtagtttcagcaccagtgtctaccaaccaattccacaacccaccacaccggtttcctccttcacatctggctccatgttgggccgaacagacacagccctcacaaacacctacagcgctctgccgcctatgcccagcttcaccatggcaaataacctgcctatgcaacccccagtccccagccagacctcctcatactcctgcatgctgcccaccagcccttcggtgaatgggcggagttatgatacctacacccccccacatatgcagacacacatgaacagtcagccaatgggcacctcgggcaccacttcaacaggactcatttcccctggtgtgtcagttccagttcaagttcccggaagtgaacctgatatgtctcaatactggccaagattacagt

SEQ ID NO: 14807 - DNA, 1525 bp, Homo sapiens
  source 1..1525: mol_type = unassigned DNA
ataggtgtgctggctgcagccacttccctcacccacactctttatctctcactctccagccgctgacagcccattttattgtcaatctctgtctccttcccaggaatctgagaattgctctcacacaccaacccagcaacatccgtggagaaaactctcaccagcaactcctttaaaacaccgtcatttcaaaccattgtggtcttcaagcaacaacagcagcacaaaaaaccccaaccaaacaaaactcttgacagaagctgtgacaaccagaaaggatgcctcataaagggggaagactttaactaggggcgcgcagatgtgtgaggccttttattgtgagagtggacagacatccgagatttcagagccccatattcgagccccgtggaatcccgcggcccccagccagagccagcatgcagaacagtcacagcggagtgaatcagctcggtggtgtctttgtcaacgggcggccactgccggactccacccggcagaagattgtagagctagctcacagcggggcccggccgtgcgacatttcccgaattctgcagacccatgcagatgcaaaagtccaagtgctggacaatcaaaacgtgtccaacggatgtgtgtcatcaataaacagagttcttcgcaacctggctagcgaaaagcaacagatgggcgcagacggcatgtatgataaactaaggatgttgaacgggcagaccggaagctggggcacccgccctggttggtatccggggacttcggtgccagggcaacctacgcaagatggctgccagcaacaggaaggagggggagagaataccaactccatcagttccaacggagaagattcagatgaggctcaaatgcgacttcagctgaagcggaagctgcaaagaaatagaacatcctttacccaagagcaaattgaggccctggagaaagagtttgagagaacccattatccagatgtgtttgcccgagaaagactagcagccaaaatagatctacctgaagcaagaatacaggtatggttttctaatcgaagggccaaatggagaagagaagaaaaactgaggaatcagagaagacaggccagcaacacacctagtcatattcctatcagcagtagtttcagcaccagtgtctaccaaccaattccacaacccaccacaccggtttcctccttcacatctggctccatgttgggccgaacagacacagccctcacaaacacctacagcgctctgccgcctatgcccagcttcaccatggcaaataacctgcctatgcaacccccagtccccagccagacctcctcatactcctgcatgctgcccaccagcccttcggtgaatgggcggagttatgatacctacacccccccacatatgcagacacacatgaacagtcagccaatgggcacctcgggcaccacttcaacaggactcatttcccctggtgtgtcagttccagttcaagttcccggaagtgaacctgatatgtctcaatactggccaagattaca

SEQ ID NO: 14808 - DNA, 1521 bp, Homo sapiens
  source 1..1521: mol_type = unassigned DNA
gaacgcggctgtcagatctgccacttcccctgccgagcggcggtgagaagtgtgggaaccggcgctgccaggctcacctgcctccccgccctccgctcccaggaatctgagaattgctctcacacaccaacccagcaacatccgtggagaaaactctcaccagcaactcctttaaaacaccgtcatttcaaaccattgtggtcttcaagcaacaacagcagcacaaaaaaccccaaccaaacaaaactcttgacagaagctgtgacaaccagaaaggatgcctcataaagggggaagactttaactaggggcgcgcagatgtgtgaggccttttattgtgagagtggacagacatccgagatttcagagccccatattcgagccccgtggaatcccgcggcccccagccagagccagcatgcagaacagtcacagcggagtgaatcagctcggtggtgtctttgtcaacgggcggccactgccggactccacccggcagaagattgtagagctagctcacagcggggcccggccgtgcgacatttcccgaattctgcagacccatgcagatgcaaaagtccaagtgctggacaatcaaaacgtgtccaacggatgtgtgtcatcaataaacagagttcttcgcaacctggctagcgaaaagcaacagatgggcgcagacggcatgtatgataaactaaggatgttgaacgggcagaccggaagctggggcacccgccctggttggtatccggggacttcggtgccagggcaacctacgcaagatggctgccagcaacaggaaggagggggagagaataccaactccatcagttccaacggagaagattcagatgaggctcaaatgcgacttcagctgaagcggaagctgcaaagaaatagaacatcctttacccaagagcaaattgaggccctggagaaagagtttgagagaacccattatccagatgtgtttgcccgagaaagactagcagccaaaatagatctacctgaagcaagaatacaggtatggttttctaatcgaagggccaaatggagaagagaagaaaaactgaggaatcagagaagacaggccagcaacacacctagtcatattcctatcagcagtagtttcagcaccagtgtctaccaaccaattccacaacccaccacaccggtttcctccttcacatctggctccatgttgggccgaacagacacagccctcacaaacacctacagcgctctgccgcctatgcccagcttcaccatggcaaataacctgcctatgcaacccccagtccccagccagacctcctcatactcctgcatgctgcccaccagcccttcggtgaatgggcggagttatgatacctacacccccccacatatgcagacacacatgaacagtcagccaatgggcacctcgggcaccacttcaacaggactcatttcccctggtgtgtcagttccagttcaagttcccggaagtgaacctgatatgtctcaatactggccaagatt

SEQ ID NO: 14809 - DNA, 1473 bp, Homo sapiens
  source 1..1473: mol_type = unassigned DNA
gtttatgaagaggggcagtgggctggggacactgctggggttatggctgtagtgaggtccatgtgtacttgttccttggcatgtgtctgactctgtgttgctgctgcagtacagtgggcaggggcacggttgcttggactgggctgcccgatgtctggcatggctggtggtcctgttgtcctttatttgatcgatagcagggaactgaccgccgaggttggcacaggtcacagcggagtgaatcagctcggtggtgtctttgtcaacgggcggccactgccggactccacccggcagaagattgtagagctagctcacagcggggcccggccgtgcgacatttcccgaattctgcaggtgtccaacggatgtgtgagtaaaattctgggcaggtattacgagactggctccatcagacccagggcaatcggtggtagtaaaccgagagtagcgactccagaagttgtaagcaaaatagcccagtataagcgggagtgcccgtccatctttgcttgggaaatccgagacagattactgtccgagggggtctgtaccaacgataacataccaagcgtgtcatcaataaacagagttcttcgcaacctggctagcgaaaagcaacagatgggcgcagacggcatgtatgataaactaaggatgttgaacgggcagaccggaagctggggcacccgccctggttggtatccggggacttcggtgccagggcaacctacgcaagatggctgccagcaacaggaaggagggggagagaataccaactccatcagttccaacggagaagattcagatgaggctcaaatgcgacttcagctgaagcggaagctgcaaagaaatagaacatcctttacccaagagcaaattgaggccctggagaaagagtttgagagaacccattatccagatgtgtttgcccgagaaagactagcagccaaaatagatctacctgaagcaagaatacaggtatggttttctaatcgaagggccaaatggagaagagaagaaaaactgaggaatcagagaagacaggccagcaacacacctagtcatattcctatcagcagtagtttcagcaccagtgtctaccaaccaattccacaacccaccacaccggtttcctccttcacatctggctccatgttgggccgaacagacacagccctcacaaacacctacagcgctctgccgcctatgcccagcttcaccatggcaaataacctgcctatgcaacccccagtccccagccagacctcctcatactcctgcatgctgcccaccagcccttcggtgaatgggcggagttatgatacctacacccccccacatatgcagacacacatgaacagtcagccaatgggcacctcgggcaccacttcaacaggactcatttcccctggtgtgtcagttccagttcaagttcccggaagtgaacctgatatgtctcaatactggcca

SEQ ID NO: 14810 - DNA, 1797 bp, Homo sapiens
  source 1..1797: mol_type = unassigned DNA
ggtgcccaggaattggaaaatccctgccctggcaactgcaattgcttgggtcctgatagtcccaggcccagagcgcttttgatacttatggcccttgtacctccctgctttcctctgcccagaccccgtggggtcccacccaccttcctgttcgtggtgggtgctggtacgcggcagggctagtctagagctccgacctgggagcctggaggcccagcgaaaccaggcccggtttgaggttacggttgaggcacacggcgtcggggctcaactgaactcaaagtgtggaaaggcccgggtcttccagcagcctgccctggccgaaccacacaggcttaaggagggtccccagcaccttatccatctgttttggaaacgccggtcgccccctggtgcttccggggctggggagggcggagttcagcggcggaaataaagcgagcagtggctggtgcgaaccgactcccggctctaagccttacttgcggtggccggacttgtctgtggctgaagccgagcccgggctctgactctcacgtctgcactggaggtcacagcggagtgaatcagctcggtggtgtctttgtcaacgggcggccactgccggactccacccggcagaagattgtagagctagctcacagcggggcccggccgtgcgacatttcccgaattctgcaggtgtccaacggatgtgtgagtaaaattctgggcaggtattacgagactggctccatcagacccagggcaatcggtggtagtaaaccgagagtagcgactccagaagttgtaagcaaaatagcccagtataagcgggagtgcccgtccatctttgcttgggaaatccgagacagattactgtccgagggggtctgtaccaacgataacataccaagcgtgtcatcaataaacagagttcttcgcaacctggctagcgaaaagcaacagatgggcgcagacggcatgtatgataaactaaggatgttgaacgggcagaccggaagctggggcacccgccctggttggtatccggggacttcggtgccagggcaacctacgcaagatggctgccagcaacaggaaggagggggagagaataccaactccatcagttccaacggagaagattcagatgaggctcaaatgcgacttcagctgaagcggaagctgcaaagaaatagaacatcctttacccaagagcaaattgaggccctggagaaagagtttgagagaacccattatccagatgtgtttgcccgagaaagactagcagccaaaatagatctacctgaagcaagaatacaggtatggttttctaatcgaagggccaaatggagaagagaagaaaaactgaggaatcagagaagacaggccagcaacacacctagtcatattcctatcagcagtagtttcagcaccagtgtctaccaaccaattccacaacccaccacaccggtttcctccttcacatctggctccatgttgggccgaacagacacagccctcacaaacacctacagcgctctgccgcctatgcccagcttcaccatggcaaataacctgcctatgcaacccccagtccccagccagacctcctcatactcctgcatgctgcccaccagcccttcggtgaatgggcggagttatgatacctacacccccccacatatgcagacacacatgaacagtcagccaatgggcacctcgggcaccacttcaacaggactcatttcccctggtgtgtcagttccagttcaagttcccggaagtgaacctgatatgtctcaatactggcca

SEQ ID NO: 14811 - DNA, 1267 bp, Homo sapiens
  source 1..1267: mol_type = unassigned DNA
tttaactaggggcgcgcagatgtgtgaggccttttattgtgagagtggacagacatccgagatttcagagccccatattcgagccccgtggaatcccgcggcccccagccagagccagcatgcagaacagtcacagcggagtgaatcagctcggtggtgtctttgtcaacgggcggccactgccggactccacccggcagaagattgtagagctagctcacagcggggcccggccgtgcgacatttcccgaattctgcagacccatgcagatgcaaaagtccaagtgctggacaatcaaaacgtgtccaacggatgtgtgagtaaaattctgggcaggtattacgagactggctccatcagacccagggcaatcggtggtagtaaaccgagagtagcgactccagaagttgtaagcaaaatagcccagtataagcgggagtgcccgtccatctttgcttgggaaatccgagacagattactgtccgagggggtctgtaccaacgataacataccaagcgtgtcatcaataaacagagttcttcgcaacctggctagcgaaaagcaacagatgggcgcagacggcatgtatgataaactaaggatgttgaacgggcagaccggaagctggggcacccgccctggttggtatccggggacttcggtgccagggcaacctacgcaagatggctgccagcaacaggaaggagggggagagaataccaactccatcagttccaacggagaagattcagatgaggctcaaatgcgacttcagctgaagcggaagctgcaaagaaatagaacatcctttacccaagagcaaattgaggccctggagaaagagtttgagagaacccattatccagatgtgtttgcccgagaaagactagcagccaaaatagatctacctgaagcaagaatacaggtatggttttctaatcgaagggccaaatggagaagagaagaaaaactgaggaatcagagaagacaggccagcaacacacctagtcatattcctatcagcagtagtttcagcaccagtgtctaccaaccaattccacaacccaccacaccggtttcctccttcacatctggctccatgttgggccgaacagacacagccctcacaaacacctacagcgctctgccgcctatgcccagcttcaccatggcaaataacctgcctatgcaagactcatttcccctggtgtgtcagttccagttcaagttcccggaagtgaacctgatatgtctcaatactggcca

SEQ ID NO: 14812 - DNA, 2423 bp, Homo sapiens
  source 1..2423: mol_type = unassigned DNA
agcataggtgtgctggctgcagccacttccctcacccacactctttatctctcactctccagccgctgacagcccattttattgtcaatctctgtctccttcccaggaatctgagaattgctctcacacaccaacccagcaacatccgtggagaaaactctcaccagcaactcctttaaaacaccgtcatttcaaaccattgtggtcttcaagcaacaacagcagcacaaaaaaccccaaccaaacaaaactcttgacagaagctgtgacaaccagaaaggatgcctcataaagggggaagactttaactaggggcgcgcagatgtgtgaggccttttattgtgagagtggacagacatccgagatttcagagccccatattcgagccccgtggaatcccgcggcccccagccagagccagcatgcagaacagtcacagcggagtgaatcagctcggtggtgtctttgtcaacgggcggccactgccggactccacccggcagaagattgtagagctagctcacagcggggcccggccgtgcgacatttcccgaattctgcaggtgtccaacggatgtgtgagtaaaattctgggcaggtattacgagactggctccatcagacccagggcaatcggtggtagtaaaccgagagtagcgactccagaagttgtaagcaaaatagcccagtataagcgggagtgcccgtccatctttgcttgggaaatccgagacagattactgtccgagggggtctgtaccaacgataacataccaagcgtgtcatcaataaacagagttcttcgcaacctggctagcgaaaagcaacagatgggcgcagacggcatgtatgataaactaaggatgttgaacgggcagaccggaagctggggcacccgccctggttggtatccggggacttcggtgccagggcaacctacgcaagatggctgccagcaacaggaaggagggggagagaataccaactccatcagttccaacggagaagattcagatgaggctcaaatgcgacttcagctgaagcggaagctgcaaagaaatagaacatcctttacccaagagcaaattgaggccctggagaaaggtgatagagtttttcaaagtagagaagcagtaaatcaaagtaaatgccacatcttcagtacaaagagctaaatttagccagggccctttgcatagaagaatgaaaagatttccttttttctgtctttttatttctctgggcatcttttcagtgtgtgtgtgtgtgtgtgtgtgtgtgtgtgtgtgtgtgtgtgtgtgtgtgtgtgtgtggtgtgtgtgtgtgtgtttcttcttttcatctaccagtaattcaaagactaaatgtctgacttataaggaaaaatgatgatttggctatttcaggccacagaaaggtcactgaatgccattccaaagaaaatttaacttggttctggtgggaaagttcttccaagtacagtcaacactagaagcattttaaagggaattggttggaggtaatgggagtggggaggtgggaaccagtttgatgcacagtttggtcaacatattttgtgtagttctggcacaatatggaaaatcaacttactctttcagagtttgagagaacccattatccagatgtgtttgcccgagaaagactagcagccaaaatagatctacctgaagcaagaatacaggtaccgagagactgtgcagtttcacactttgtgattcataccatttgtctttcctagagacagaggtgcttgtacagagtactatttatttataggactaatataataaaaaggttcagtctgctaaatgctctgctgccatgggcgtggggagggcagcagtggaggtgccaaggtggggctgggctcgacgtagacacagtgctaacctgtcccacctgatttccaggtatggttttctaatcgaagggccaaatggagaagagaagaaaaactgaggaatcagagaagacaggccagcaacacacctagtcatattcctatcagcagtagtttcagcaccagtgtctaccaaccaattccacaacccaccacaccggtttcctccttcacatctggctccatgttgggccgaacagacacagccctcacaaacacctacagcgctctgccgcctatgcccagcttcaccatggcaaataacctgcctatgcaacccccagtccccagccagacctcctcatactcctgcatgctgcccaccagcccttcggtgaatgggcggagttatgatacctacacccccccacatatgcagacacacatgaacagtcagccaatgggcacctcgggcaccacttcaacaggactcatttcccctggtgtgtcagttccagttcaagttcccggaagtgaacctgatatgtctcaatactggcca

SEQ ID NO: 14813 - DNA, 1718 bp, Homo sapiens
  source 1..1718: mol_type = unassigned DNA
gggctggggaggcctctggcctcgtttagttctcggcccggcaacctcctctcggcctaggcttcgccgcggcctccgcagctggaatggagctgccaggacccagtgacgctcccgcccctttcctcttcttccaaggggccaggaatctgagaattgctctcacacaccaacccagcaacatccgtggagaaaactctcaccagcaactcctttaaaacaccgtcatttcaaaccattgtggtcttcaagcaacaacagcagcacaaaaaaccccaaccaaacaaaactcttgacagaagctgtgacaaccagaaaggatgcctcataaagggggaagactttaactaggggcgcgcagatgtgtgaggccttttattgtgagagtggacagacatccgagatttcagagccccatattcgagccccgtggaatcccgcggcccccagccagagccagcatgcagaacagtcacagcggagtgaatcagctcggtggtgtctttgtcaacgggcggccactgccggactccacccggcagaagattgtagagctagctcacagcggggcccggccgtgcgacatttcccgaattctgcaggtgtccaacggatgtgtgagtaaaattctgggcaggtattacgagactggctccatcagacccagggcaatcggtggtagtaaaccgagagtagcgactccagaagttgtaagcaaaatagcccagtataagcgggagtgcccgtccatctttgcttgggaaatccgagacagattactgtccgagggggtctgtaccaacgataacataccaagcgtgtcatcaataaacagagttcttcgcaacctggctagcgaaaagcaacagatgggcgcagacggcatgtatgataaactaaggatgttgaacgggcagaccggaagctggggcacccgccctggttggtatccggggacttcggtgccagggcaacctacgcaagatggctgccagcaacaggaaggagggggagagaataccaactccatcagttccaacggagaagattcagatgaggctcaaatgcgacttcagctgaagcggaagctgcaaagaaatagaacatcctttacccaagagcaaattgaggccctggagaaagagtttgagagaacccattatccagatgtgtttgcccgagaaagactagcagccaaaatagatctacctgaagcaagaatacaggtatggttttctaatcgaagggccaaatggagaagagaagaaaaactgaggaatcagagaagacaggccagcaacacacctagtcatattcctatcagcagtagtttcagcaccagtgtctaccaaccaattccacaacccaccacaccggtttcctccttcacatctggctccatgttgggccgaacagacacagccctcacaaacacctacagcgctctgccgcctatgcccagcttcaccatggcaaataacctgcctatgcaacccccagtccccagccagacctcctcatactcctgcatgctgcccaccagcccttcggtgaatgggcggagttatgatacctacacccccccacatatgcagacacacatgaacagtcagccaatgggcacctcgggcaccacttcaacaggactcatttcccctggtgtgtcagttccagttcaagttcccggaagtgaacctgatatgtctcaatactggcca

SEQ ID NO: 14814 - DNA, 2133 bp, Homo sapiens
  source 1..2133: mol_type = unassigned DNA
gcgagctcccggggaagggttagagccggcagccctccccagcccggggaggggagagggttatgcgaccccacctctggctagggccggggaggcctttgcttcccgggagccctgcccgggctccttggtcgcagggctgctgggtcccaggcaggaacgagagggtgaggcccacatgtggcccggcggcccagggcggcttgcagcgtcctcactgtcccggctgccaggggctgcggcgacgcggccagtcagcagcgagttcaggtcgcgcagattttattgatgagctctgactttcagcactttccctaagtcaagaagagtctagcgtacccttcggctgcttcatttcagcctccctgcctcagctcttcagccctattccccctcgccctgtcctggggtgtgtacagcagcccaggccttccttctccttcccggctccgtggcccgaagccgccgagagagctcgggacagcgcaggaccaggcagccgctcgctctcctgtcaccttaactgcaggctccgaggggcgcctttggagtgtactgaggaatctgagaattgctctcacacaccaacccagcaacatccgtggagaaaactctcaccagcaactcctttaaaacaccgtcatttcaaaccattgtggtcttcaagcaacaacagcagcacaaaaaaccccaaccaaacaaaactcttgacagaagctgtgacaaccagaaaggatgcctcataaagggggaagactttaactaggggcgcgcagatgtgtgaggccttttattgtgagagtggacagacatccgagatttcagagccccatattcgagccccgtggaatcccgcggcccccagccagagccagcatgcagaacagtcacagcggagtgaatcagctcggtggtgtctttgtcaacgggcggccactgccggactccacccggcagaagattgtagagctagctcacagcggggcccggccgtgcgacatttcccgaattctgcaggtgtccaacggatgtgtgagtaaaattctgggcaggtattacgagactggctccatcagacccagggcaatcggtggtagtaaaccgagagtagcgactccagaagttgtaagcaaaatagcccagtataagcgggagtgcccgtccatctttgcttgggaaatccgagacagattactgtccgagggggtctgtaccaacgataacataccaagcgtgtcatcaataaacagagttcttcgcaacctggctagcgaaaagcaacagatgggcgcagacggcatgtatgataaactaaggatgttgaacgggcagaccggaagctggggcacccgccctggttggtatccggggacttcggtgccagggcaacctacgcaagatggctgccagcaacaggaaggagggggagagaataccaactccatcagttccaacggagaagattcagatgaggctcaaatgcgacttcagctgaagcggaagctgcaaagaaatagaacatcctttacccaagagcaaattgaggccctggagaaagagtttgagagaacccattatccagatgtgtttgcccgagaaagactagcagccaaaatagatctacctgaagcaagaatacaggtatggttttctaatcgaagggccaaatggagaagagaagaaaaactgaggaatcagagaagacaggccagcaacacacctagtcatattcctatcagcagtagtttcagcaccagtgtctaccaaccaattccacaacccaccacaccggtttcctccttcacatctggctccatgttgggccgaacagacacagccctcacaaacacctacagcgctctgccgcctatgcccagcttcaccatggcaaataacctgcctatgcaacccccagtccccagccagacctcctcatactcctgcatgctgcccaccagcccttcggtgaatgggcggagttatgatacctacacccccccacatatgcagacacacatgaacagtcagccaatgggcacctcgggcaccacttcaacaggactcatttcccctggtgtgtcagttccagttcaagttcccggaagtgaacctgatatgtctcaatactggcca

SEQ ID NO: 14815 - DNA, 846 bp, Homo sapiens
  source 1..846: mol_type = unassigned DNA
gcatccctttgcctgtcccctactctcccaaccatttcctctcagggcttccatgcttggggaatgtcatgggtgagactgcatttgaaggcctgggacacatcgaccacattatggctgccagcaacaggaaggagggggagagaataccaactccatcagttccaacggagaagattcagatgaggctcaaatgcgacttcagctgaagcggaagctgcaaagaaatagaacatcctttacccaagagcaaattgaggccctggagaaagagtttgagagaacccattatccagatgtgtttgcccgagaaagactagcagccaaaatagatctacctgaagcaagaatacaggtatggttttctaatcgaagggccaaatggagaagagaagaaaaactgaggaatcagagaagacaggccagcaacacacctagtcatattcctatcagcagtagtttcagcaccagtgtctaccaaccaattccacaacccaccacaccggtttcctccttcacatctggctccatgttgggccgaacagacacagccctcacaaacacctacagcgctctgccgcctatgcccagcttcaccatggcaaataacctgcctatgcaacccccagtccccagccagacctcctcatactcctgcatgctgcccaccagcccttcggtgaatgggcggagttatgatacctacacccccccacatatgcagacacacatgaacagtcagccaatgggcacctcgggcaccacttcaacaggactcatttcccctggtgtgtcagttccagttcaagttcccggaagtgaacctgatatgtctcaatactggcc

SEQ ID NO: 14816 - DNA, 1911 bp, Homo sapiens
  source 1..1911: mol_type = unassigned DNA
cctttctgttcttgttctccctcatcttcctcttccttcttctccctcttcttcctcttcactctgctctcttctcttcttttcccctttcctctcctctccctttcctcaggtcacagcggagtgaatcagctcggtggtgtctttgtcaacgggcggccactgccggactccacccggcagaagattgtagagctagctcacagcggggcccggccgtgcgacatttcccgaattctgcaggtgtccaacggatgtgtgagtaaaattctgggcaggtattacgagactggctccatcagacccagggcaatcggtggtagtaaaccgagagtagcgactccagaagttgtaagcaaaatagcccagtataagcgggagtgcccgtccatctttgcttgggaaatccgagacagattactgtccgagggggtctgtaccaacgataacataccaagcgtaagttcattgagaacatctgccctccctgccctaagcccaatgctctctcctctttacctcctcccaccctctctctccactgtctcttagtctgtgtcctctccctgctccacatttgtctcctttgtacctgggggaacagagaggaatgccctgacttttctttgactgtctggaaaatgggagtcaagtgtggggagtcattcacttcatttgcatgctgcaaaacagagggcggaggcaccagggaaaggcacttgaatgaagaaggaaaatgagaaccagattgtaacttcgtcctaatccacctgccagaactttccttcaggtgtcacacatccatttccatcctaatattaaacaatataatgaaagaaagctttacaacaagtctaaatagtttttattttcgggcagtcttttaacaaagcaaagcaaccgtgtgagttaggtcaccagagacaccaagcaatggtgaaggaccccctccgcccaattctctatccaactaaatttccatgcccaaagtgatagctatcattttttccacggtgtatctgcaaatccacccactgtcccggggtggctgggagctttttaacgggttgagagttgctttttaaggttgtgggtgagctgagatgggtgactgtgtcttcaggagacactaccatttggtttgattttggtttgatttgcaggtgtcatcaataaacagagttcttcgcaacctggctagcgaaaagcaacagatgggcgcagacggcatgtatgataaactaaggatgttgaacgggcagaccggaagctggggcacccgccctggttggtatccggggacttcggtgccagggcaacctacgcaagatggctgccagcaacaggaaggagggggagagaataccaactccatcagttccaacggagaagattcagatgaggctcaaatgcgacttcagctgaagcggaagctgcaaagaaatagaacatcctttacccaagagcaaattgaggccctggagaaagagtttgagagaacccattatccagatgtgtttgcccgagaaagactagcagccaaaatagatctacctgaagcaagaatacaggtatggttttctaatcgaagggccaaatggagaagagaagaaaaactgaggaatcagagaagacaggccagcaacacacctagtcatattcctatcagcagtagtttcagcaccagtgtctaccaaccaattccacaacccaccacaccggtttcctccttcacatctggctccatgttgggccgaacagacacagccctcacaaacacctacagcgctctgccgcctatgcccagcttcaccatggcaaataacctgcctatgcaagactcatttcccctggtgtgtcagttccagttcaagttcccggaagtgaacctgatatgtctcaatactggcc

SEQ ID NO: 14817 - DNA, 1483 bp, Homo sapiens
  source 1..1483: mol_type = unassigned DNA
gctgacagcccattttattgtcaatctctgtctccttcccaggaatctgagaattgctctcacacaccaacccagcaacatccgtggagaaaactctcaccagcaactcctttaaaacaccgtcatttcaaaccattgtggtcttcaagcaacaacagcagcacaaaaaaccccaaccaaacaaaactcttgacagaagctgtgacaaccagaaaggatgcctcataaagggggaagactttaactaggggcgcgcagatgtgtgaggccttttattgtgagagtggacagacatccgagatttcagagccccatattcgagccccgtggaatcccgcggcccccagccagagccagcatgcagaacagtgtccaacggatgtgtgagtaaaattctgggcaggtattacgagactggctccatcagacccagggcaatcggtggtagtaaaccgagagtagcgactccagaagttgtaagcaaaatagcccagtataagcgggagtgcccgtccatctttgcttgggaaatccgagacagattactgtccgagggggtctgtaccaacgataacataccaagcgtgtcatcaataaacagagttcttcgcaacctggctagcgaaaagcaacagatgggcgcagacggcatgtatgataaactaaggatgttgaacgggcagaccggaagctggggcacccgccctggttggtatccggggacttcggtgccagggcaacctacgcaagatggctgccagcaacaggaaggagggggagagaataccaactccatcagttccaacggagaagattcagatgaggctcaaatgcgacttcagctgaagcggaagctgcaaagaaatagaacatcctttacccaagagcaaattgaggccctggagaaagagtttgagagaacccattatccagatgtgtttgcccgagaaagactagcagccaaaatagatctacctgaagcaagaatacaggtatggttttctaatcgaagggccaaatggagaagagaagaaaaactgaggaatcagagaagacaggccagcaacacacctagtcatattcctatcagcagtagtttcagcaccagtgtctaccaaccaattccacaacccaccacaccggtttcctccttcacatctggctccatgttgggccgaacagacacagccctcacaaacacctacagcgctctgccgcctatgcccagcttcaccatggcaaataacctgcctatgcaacccccagtccccagccagacctcctcatactcctgcatgctgcccaccagcccttcggtgaatgggcggagttatgatacctacacccccccacatatgcagacacacatgaacagtcagccaatgggcacctcgggcaccacttcaacaggactcatttcccctggtgtgtcagttccagttcaagttcccggaagtgaacctgatatgtctcaatactggcc

SEQ ID NO: 14818 - DNA, 1923 bp, Homo sapiens
  source 1..1923: mol_type = unassigned DNA
gcatgttgcggagtgattagtgggtttgaaaagggaaccgtggctcggcctcatttcccgctctggttcaggcgcaggaggaagtgttttgctggaggatgatgacagaggtcaggcttcgctaatgggccagtgaggagcggtggaggcgaggccgggcgccggcacacacacattaacacacttgagccatcaccaatcagcataggaatctgagaattgctctcacacaccaacccagcaacatccgtggagaaaactctcaccagcaactcctttaaaacaccgtcatttcaaaccattgtggtcttcaagcaacaacagcagcacaaaaaaccccaaccaaacaaaactcttgacagaagctgtgacaaccagaaaggatgcctcataaagggggaagactttaactaggggcgcgcagatgtgtgaggccttttattgtgagagtggacagacatccgagatttcagagccccatattcgagccccgtggaatcccgcggcccccagccagagccagcatgcagaacagggagggcggagttcagcggcggaaataaagcgagcagtggctggtgcgaaccgactcccggctctaagccttacttgcggtggccggacttgtctgtggctgaagccgagcccgggctctgactctcacgtctgcactggaggtcacagcggagtgaatcagctcggtggtgtctttgtcaacgggcggccactgccggactccacccggcagaagattgtagagctagctcacagcggggcccggccgtgcgacatttcccgaattctgcaggtgtccaacggatgtgtgagtaaaattctgggcaggtattacgagactggctccatcagacccagggcaatcggtggtagtaaaccgagagtagcgactccagaagttgtaagcaaaatagcccagtataagcgggagtgcccgtccatctttgcttgggaaatccgagacagattactgtccgagggggtctgtaccaacgataacataccaagcgtgtcatcaataaacagagttcttcgcaacctggctagcgaaaagcaacagatgggcgcagacggcatgtatgataaactaaggatgttgaacgggcagaccggaagctggggcacccgccctggttggtatccggggacttcggtgccagggcaacctacgcaagatggctgccagcaacaggaaggagggggagagaataccaactccatcagttccaacggagaagattcagatgaggctcaaatgcgacttcagctgaagcggaagctgcaaagaaatagaacatcctttacccaagagcaaattgaggccctggagaaagagtttgagagaacccattatccagatgtgtttgcccgagaaagactagcagccaaaatagatctacctgaagcaagaatacaggtatggttttctaatcgaagggccaaatggagaagagaagaaaaactgaggaatcagagaagacaggccagcaacacacctagtcatattcctatcagcagtagtttcagcaccagtgtctaccaaccaattccacaacccaccacaccggtttcctccttcacatctggctccatgttgggccgaacagacacagccctcacaaacacctacagcgctctgccgcctatgcccagcttcaccatggcaaataacctgcctatgcaacccccagtccccagccagacctcctcatactcctgcatgctgcccaccagcccttcggtgaatgggcggagttatgatacctacacccccccacatatgcagacacacatgaacagtcagccaatgggcacctcgggcaccacttcaacaggactcatttcccctggtgtgtcagttccagttcaagttcccggaagtgaacctgatatgtctcaatactggcc

SEQ ID NO: 14819 - DNA, 781 bp, Homo sapiens
  source 1..781: mol_type = unassigned DNA
cagaaaggtcactgaatgccattccaaagaaaatttaacttggttctggtgggaaagttcttccaagtacagtcaacactagaagcattttaaagggaattggttggaggtaatgggagtggggaggtgggaaccagtttgatgcacagtttggtcaacatattttgtgtagttctggcacaatatggaaaatcaacttactctttcagagtttgagagaacccattatccagatgtgtttgcccgagaaagactagcagccaaaatagatctacctgaagcaagaatacaggtatggttttctaatcgaagggccaaatggagaagagaagaaaaactgaggaatcagagaagacaggccagcaacacacctagtcatattcctatcagcagtagtttcagcaccagtgtctaccaaccaattccacaacccaccacaccggtttcctccttcacatctggctccatgttgggccgaacagacacagccctcacaaacacctacagcgctctgccgcctatgcccagcttcaccatggcaaataacctgcctatgcaacccccagtccccagccagacctcctcatactcctgcatgctgcccaccagcccttcggtgaatgggcggagttatgatacctacacccccccacatatgcagacacacatgaacagtcagccaatgggcacctcgggcaccacttcaacaggactcatttcccctggtgtgtcagttccagttcaagttcccggaagtgaacctgatatgtctcaatactgg

SEQ ID NO: 14820 - DNA, 2221 bp, Homo sapiens
  source 1..2221: mol_type = unassigned DNA
attccccctcgccctgtcctggggtgtgtacagcagcccaggccttccttctccttcccggctccgtggcccgaagccgccgagagagctcgggacagcgcaggaccaggcagccgctcgctctcctgtcaccttaactgcaggctccgaggggcgcctttggagtgtactgaggtgtgtcctaatcgtgcggcattcaacaaatggacttctggtgtgtggtcagaagagaaaagccatttacttactttcctccccggttttctggcaacagctgaaggggagctgcctccgtggactgagcagacccaggagagggagtcgtggtgcggagacacacgcaccacacacagatgaccggtggcacacacgacacacgctgacataccgacatcgccagtgggacacacacacacacacacacacacacacacacacacacagagagagagagagaatccctcccagcattggtcatccgcccccccacccaggcttccactccccctcccctcttatctcccctggcttcccctcctctcgggcgctgcgaaaagcagccgcacttagtcaacaaatggcacgtgggagaagttggtgagtgtttggtgaggactcttcagggcttttcacaagaaccctctgtacacaaagaatctgagaattgctctcacacaccaacccagcaacatccgtggagaaaactctcaccagcaactcctttaaaacaccgtcatttcaaaccattgtggtcttcaagcaacaacagcagcacaaaaaaccccaaccaaacaaaactcttgacagaagctgtgacaaccagaaaggatgcctcataaagggggaagactttaactaggggcgcgcagatgtgtgaggccttttattgtgagagtggacagacatccgagatttcagagccccatattcgagccccgtggaatcccgcggcccccagccagagccagcatgcagaacagtcacagcggagtgaatcagctcggtggtgtctttgtcaacgggcggccactgccggactccacccggcagaagattgtagagctagctcacagcggggcccggccgtgcgacatttcccgaattctgcaggtgtccaacggatgtgtgagtaaaattctgggcaggtattacgagactggctccatcagacccagggcaatcggtggtagtaaaccgagagtagcgactccagaagttgtaagcaaaatagcccagtataagcgggagtgcccgtccatctttgcttgggaaatccgagacagattactgtccgagggggtctgtaccaacgataacataccaagcgtgtcatcaataaacagagttcttcgcaacctggctagcgaaaagcaacagatgggcgcagacggcatgtatgataaactaaggatgttgaacgggcagaccggaagctggggcacccgccctggttggtatccggggacttcggtgccagggcaacctacgcaagatggctgccagcaacaggaaggagggggagagaataccaactccatcagttccaacggagaagattcagatgaggctcaaatgcgacttcagctgaagcggaagctgcaaagaaatagaacatcctttacccaagagcaaattgaggccctggagaaagagtttgagagaacccattatccagatgtgtttgcccgagaaagactagcagccaaaatagatctacctgaagcaagaatacaggtatggttttctaatcgaagggccaaatggagaagagaagaaaaactgaggaatcagagaagacaggccagcaacacacctagtcatattcctatcagcagtagtttcagcaccagtgtctaccaaccaattccacaacccaccacaccggtttcctccttcacatctggctccatgttgggccgaacagacacagccctcacaaacacctacagcgctctgccgcctatgcccagcttcaccatggcaaataacctgcctatgcaacccccagtccccagccagacctcctcatactcctgcatgctgcccaccagcccttcggtgaatgggcggagttatgatacctacacccccccacatatgcagacacacatgaacagtcagccaatgggcacctcgggcaccacttcaacaggactcatttcccctggtgtgtcagttccagttcaagttcccggaagtgaacctgatatgtctcaatact

SEQ ID NO: 14821 - DNA, 2367 bp, Homo sapiens
  source 1..2367: mol_type = unassigned DNA
gggctgcaggttggagatttttaaggaagtggaaattggcaattggctttgtgtgtctgtggtttttggggagggggactacaaagaggggctaactccctctccctattctctaaggttggaccacagggatgaggttgtgagatacaaagataaaggagggatggggaacactatgatgtggtatttttcttttctgttttttctttttgataatatctatccttggctaaggggagggcggagttcagcggcggaaataaagcgagcagtggctggtgcgaaccgactcccggctctaagccttacttgcggtggccggacttgtctgtggctgaagccgagcccgggctctgactctcacgtctgcactggaggtgcggaaacctggactggggttcaccagccacatactggctgctctggttgttctctcctcttccttcttctattctaaccaaacaaaacccaactcgatgcttgtgccaggccttggccagtttggacggtgatggaaacatttctggattttagcgtctaagggagcactcaagggctgtaaggtttgctatcactgtcccaacactgcagagaccttgaaggttcagtgtgggatctgtagaacccatggtttgcggtgacactcagaggggatctttgggagatttatagagccggttcttagcgctttgtgggttcagaggctggctgcagtgtttatgaagaggggcagtgggctggggacactgctggggttatggctgtagtgaggtccatgtgtacttgttccttggcatgtgtctgactctgtgttgctgctgcagtacagtgggcaggggcacggttgcttggactgggctgcccgatgtctggcatggctggtggtcctgttgtcctttatttgatcgatagcagggaactgaccgccgaggttggcacaggttggcagggggatgaggatgcattgtggttgtctcctcctcctctccttcttcctcttccccttcctcctctcctttctgttcttgttctccctcatcttcctcttccttcttctccctcttcttcctcttcactctgctctcttctcttcttttcccctttcctctcctctccctttcctcaggtcacagcggagtgaatcagctcggtggtgtctttgtcaacgggcggccactgccggactccacccggcagaagattgtagagctagctcacagcggggcccggccgtgcgacatttcccgaattctgcaggtgtccaacggatgtgtgagtaaaattctgggcaggtattacgagactggctccatcagacccagggcaatcggtggtagtaaaccgagagtagcgactccagaagttgtaagcaaaatagcccagtataagcgggagtgcccgtccatctttgcttgggaaatccgagacagattactgtccgagggggtctgtaccaacgataacataccaagcgtgtcatcaataaacagagttcttcgcaacctggctagcgaaaagcaacagatgggcgcagacggcatgtatgataaactaaggatgttgaacgggcagaccggaagctggggcacccgccctggttggtatccggggacttcggtgccagggcaacctacgcaagatggctgccagcaacaggaaggagggggagagaataccaactccatcagttccaacggagaagattcagatgaggctcaaatgcgacttcagctgaagcggaagctgcaaagaaatagaacatcctttacccaagagcaaattgaggccctggagaaagagtttgagagaacccattatccagatgtgtttgcccgagaaagactagcagccaaaatagatctacctgaagcaagaatacaggtatggttttctaatcgaagggccaaatggagaagagaagaaaaactgaggaatcagagaagacaggccagcaacacacctagtcatattcctatcagcagtagtttcagcaccagtgtctaccaaccaattccacaacccaccacaccggtttcctccttcacatctggctccatgttgggccgaacagacacagccctcacaaacacctacagcgctctgccgcctatgcccagcttcaccatggcaaataacctgcctatgcaacccccagtccccagccagacctcctcatactcctgcatgctgcccaccagcccttcggtgaatgggcggagttatgatacctacacccccccacatatgcagacacacatgaacagtcagccaatgggcacctcgggcaccacttcaacaggactcatttcccctggtgtgtcagttccagttcaagttcccggaagtgaacctgatatgtctcaatac

SEQ ID NO: 14822 - DNA, 1988 bp, Homo sapiens
  source 1..1988: mol_type = unassigned DNA
actctccagccgctgacagcccattttattgtcaatctctgtctccttcccaggaatctgagaattgctctcacacaccaacccagcaacatccgtggagaaaactctcaccagcaactcctttaaaacaccgtcatttcaaaccattgtggtcttcaagcaacaacagcagcacaaaaaaccccaaccaaacaaaactcttgacagaagctgtgacaaccagaaaggatgcctcataaagggggaagactttaactaggggcgcgcagatgtgtgaggccttttattgtgagagtggacagacatccgagatttcagagccccatattcgagccccgtggaatcccgcggcccccagccagagccagcatgcagaacagtcacagcggagtgaatcagctcggtggtgtctttgtcaacgggcggccactgccggactccacccggcagaagattgtagagctagctcacagcggggcccggccgtgcgacatttcccgaattctgcagacccatgcagatgcaaaagtccaagtgctggacaatcaaaacgtgtccaacggatgtgtgagtaaaattctgggcaggtattacgagactggctccatcagacccagggcaatcggtggtagtaaaccgagagtagcgactccagaagttgtaagcaaaatagcccagtataagcgggagtgcccgtccatctttgcttgggaaatccgagacagattactgtccgagggggtctgtaccaacgataacataccaagcgtaagttcattgagaacatctgccctccctgccctaagcccaatgctctctcctctttacctcctcccaccctctctctccactgtctcttagtctgtgtcctctccctgctccacatttgtctcctttgtacctgggggaacagagaggaatgccctgacttttctttgactgtctggaaaatgggagtcaagtgtggggagtcattcacttcatttgcatgctgcaaaacagagggcggaggcaccagggaaaggcacttgaatgaagaaggaaaatgagaaccagattgtaacttcgtcctaatccacctgccagaactttccttcaggtgtcatcaataaacagagttcttcgcaacctggctagcgaaaagcaacagatgggcgcagacggcatgtatgataaactaaggatgttgaacgggcagaccggaagctggggcacccgccctggttggtatccggggacttcggtgccagggcaacctacgcaagatggctgccagcaacaggaaggagggggagagaataccaactccatcagttccaacggagaagattcagatgaggctcaaatgcgacttcagctgaagcggaagctgcaaagaaatagaacatcctttacccaagagcaaattgaggccctggagaaagagtttgagagaacccattatccagatgtgtttgcccgagaaagactagcagccaaaatagatctacctgaagcaagaatacaggtatggttttctaatcgaagggccaaatggagaagagaagaaaaactgaggaatcagagaagacaggccagcaacacacctagtcatattcctatcagcagtagtttcagcaccagtgtctaccaaccaattccacaacccaccacaccggtttcctccttcacatctggctccatgttgggccgaacagacacagccctcacaaacacctacagcgctctgccgcctatgcccagcttcaccatggcaaataacctgcctatgcaacccccagtccccagccagacctcctcatactcctgcatgctgcccaccagcccttcggtgaatgggcggagttatgatacctacacccccccacatatgcagacacacatgaacagtcagccaatgggcacctcgggcaccacttcaacaggactcatttcccctggtgtgtcagttccagttcaagttcccggaagtgaacctgatatgtctc

SEQ ID NO: 14823 - DNA, 2060 bp, Homo sapiens
  source 1..2060: mol_type = unassigned DNA
gggctacaaatgtaattttaagaaaaaaagctctctacagtaagttctcataccattgaaggtatatttttgtgttatagacccatgcagatgcaaaagtccaagtgctggacaatcaaaacgtaagcttgtcattgtttaatgcatacttaaacaattttatttttgtcttgaaattattaataatgtggttttctgtccacttcccctatgcaggtgtccaacggatgtgtgagtaaaattctgggcaggtattacgagactggctccatcagacccagggcaatcggtggtagtaaaccgagagtagcgactccagaagttgtaagcaaaatagcccagtataagcgggagtgcccgtccatctttgcttgggaaatccgagacagattactgtccgagggggtctgtaccaacgataacataccaagcgtgtcatcaataaacagagttcttcgcaacctggctagcgaaaagcaacagatgggcgcagacggcatgtatgataaactaaggatgttgaacgggcagaccggaagctggggcacccgccctggttggtatccggggacttcggtgccagggcaacctacgcaagatggctgccagcaacaggaaggagggggagagaataccaactccatcagttccaacggagaagattcagatgaggctcaaatgcgacttcagctgaagcggaagctgcaaagaaatagaacatcctttacccaagagcaaattgaggccctggagaaaggtgatagagtttttcaaagtagagaagcagtaaatcaaagtaaatgccacatcttcagtacaaagagctaaatttagccagggccctttgcatagaagaatgaaaagatttccttttttctgtctttttatttctctgggcatcttttcagtgtgtgtgtgtgtgtgtgtgtgtgtgtgtgtgtgtgtgtgtgtgtgtgtgtgtgtgtggtgtgtgtgtgtgtgtttcttcttttcatctaccagtaattcaaagactaaatgtctgacttataaggaaaaatgatgatttggctatttcaggccacagaaaggtcactgaatgccattccaaagaaaatttaacttggttctggtgggaaagttcttccaagtacagtcaacactagaagcattttaaagggaattggttggaggtaatgggagtggggaggtgggaaccagtttgatgcacagtttggtcaacatattttgtgtagttctggcacaatatggaaaatcaacttactctttcagagtttgagagaacccattatccagatgtgtttgcccgagaaagactagcagccaaaatagatctacctgaagcaagaatacaggtaccgagagactgtgcagtttcacactttgtgattcataccatttgtctttcctagagacagaggtgcttgtacagagtactatttatttataggactaatataataaaaaggttcagtctgctaaatgctctgctgccatgggcgtggggagggcagcagtggaggtgccaaggtggggctgggctcgacgtagacacagtgctaacctgtcccacctgatttccaggtatggttttctaatcgaagggccaaatggagaagagaagaaaaactgaggaatcagagaagacaggccagcaacacacctagtcatattcctatcagcagtagtttcagcaccagtgtctaccaaccaattccacaacccaccacaccggtttcctccttcacatctggctccatgttgggccgaacagacacagccctcacaaacacctacagcgctctgccgcctatgcccagcttcaccatggcaaataacctgcctatgcaacccccagtccccagccagacctcctcatactcctgcatgctgcccaccagcccttcggtgaatgggcggagttatgatacctacacccccccacatatgcagacacacatgaacagtcagccaatgggcacctcgggcaccacttcaacaggactcatttcccctggtgtgtcagttccagttcaagttcccggaagtgaacctgatat

SEQ ID NO: 14824 - DNA, 2734 bp, Homo sapiens
  source 1..2734: mol_type = unassigned DNA
gaacagggagccacgtcttttcctgggagggctgctatctaagtcggggctgcaggttggagatttttaaggaagtggaaattggcaattggctttgtgtgtctgtggtttttggggagggggactacaaagaggggctaactccctctccctattctctaaggttggaccacagggatgaggttgtgagatacaaagataaaggagggatggggaacactatgatgtggtatttttcttttctgttttttctttttgataatatctatccttggctaaggggagggcggagttcagcggcggaaataaagcgagcagtggctggtgcgaaccgactcccggctctaagccttacttgcggtggccggacttgtctgtggctgaagccgagcccgggctctgactctcacgtctgcactggaggtgcggaaacctggactggggttcaccagccacatactggctgctctggttgttctctcctcttccttcttctattctaaccaaacaaaacccaactcgatgcttgtgccaggccttggccagtttggacggtgatggaaacatttctggattttagcgtctaagggagcactcaagggctgtaaggtttgctatcactgtcccaacactgcagagaccttgaaggttcagtgtgggatctgtagaacccatggtttgcggtgacactcagaggggatctttgggagatttatagagccggttcttagcgctttgtgggttcagaggctggctgcagtgtttatgaagaggggcagtgggctggggacactgctggggttatggctgtagtgaggtccatgtgtacttgttccttggcatgtgtctgactctgtgttgctgctgcagtacagtgggcaggggcacggttgcttggactgggctgcccgatgtctggcatggctggtggtcctgttgtcctttatttgatcgatagcagggaactgaccgccgaggttggcacaggttggcagggggatgaggatgcattgtggttgtctcctcctcctctccttcttcctcttccccttcctcctctcctttctgttcttgttctccctcatcttcctcttccttcttctccctcttcttcctcttcactctgctctcttctcttcttttcccctttcctctcctctccctttcctcaggtcacagcggagtgaatcagctcggtggtgtctttgtcaacgggcggccactgccggactccacccggcagaagattgtagagctagctcacagcggggcccggccgtgcgacatttcccgaattctgcaggtgtccaacggatgtgtgagtaaaattctgggcaggtattacgagactggctccatcagacccagggcaatcggtggtagtaaaccgagagtagcgactccagaagttgtaagcaaaatagcccagtataagcgggagtgcccgtccatctttgcttgggaaatccgagacagattactgtccgagggggtctgtaccaacgataacataccaagcgtaagttcattgagaacatctgccctccctgccctaagcccaatgctctctcctctttacctcctcccaccctctctctccactgtctcttagtctgtgtcctctccctgctccacatttgtctcctttgtacctgggggaacagagaggaatgccctgacttttctttgactgtctggaaaatgggagtcaagtgtggggagtcattcacttcatttgcatgctgcaaaacagagggcggaggcaccagggaaaggcacttgaatgaagaaggaaaatgagaaccagattgtaacttcgtcctaatccacctgccagaactttccttcaggtgtcatcaataaacagagttcttcgcaacctggctagcgaaaagcaacagatgggcgcagacggcatgtatgataaactaaggatgttgaacgggcagaccggaagctggggcacccgccctggttggtatccggggacttcggtgccagggcaacctacgcaagatggctgccagcaacaggaaggagggggagagaataccaactccatcagttccaacggagaagattcagatgaggctcaaatgcgacttcagctgaagcggaagctgcaaagaaatagaacatcctttacccaagagcaaattgaggccctggagaaagagtttgagagaacccattatccagatgtgtttgcccgagaaagactagcagccaaaatagatctacctgaagcaagaatacaggtatggttttctaatcgaagggccaaatggagaagagaagaaaaactgaggaatcagagaagacaggccagcaacacacctagtcatattcctatcagcagtagtttcagcaccagtgtctaccaaccaattccacaacccaccacaccggtttcctccttcacatctggctccatgttgggccgaacagacacagccctcacaaacacctacagcgctctgccgcctatgcccagcttcaccatggcaaataacctgcctatgcaacccccagtccccagccagacctcctcatactcctgcatgctgcccaccagcccttcggtgaatgggcggagttatgatacctacacccccccacatatgcagacacacatgaacagtcagccaatgggcacctcgggcaccacttcaacaggactcatttcccctggtgtgtcagttccagttcaagttcccggaagtgaacctgatat

SEQ ID NO: 14825 - DNA, 1248 bp, Homo sapiens
  source 1..1248: mol_type = unassigned DNA
cacaggcttaaggagggtccccagcaccttatccatctgttttggaaacgccggtcgccccctggtgcttccggggctggtcacagcggagtgaatcagctcggtggtgtctttgtcaacgggcggccactgccggactccacccggcagaagattgtagagctagctcacagcggggcccggccgtgcgacatttcccgaattctgcagacccatgcagatgcaaaagtccaagtgctggacaatcaaaacgtgtccaacggatgtagggcggaggcaccagggaaaggcacttgaatgaagaaggaaaatgagaaccagattgtaacttcgtcctaatccacctgccagaactttccttcaggtgtcatcaataaacagagttcttcgcaacctggctagcgaaaagcaacagatgggcgcagacggcatgtatgataaactaaggatgttgaacgggcagaccggaagctggggcacccgccctggttggtatccggggacttcggtgccagggcaacctacgcaagatggctgccagcaacaggaaggagggggagagaataccaactccatcagttccaacggagaagattcagatgaggctcaaatgcgacttcagctgaagcggaagctgcaaagaaatagaacatcctttacccaagagcaaattgaggccctggagaaagagtttgagagaacccattatccagatgtgtttgcccgagaaagactagcagccaaaatagatctacctgaagcaagaatacaggtatggttttctaatcgaagggccaaatggagaagagaagaaaaactgaggaatcagagaagacaggccagcaacacacctagtcatattcctatcagcagtagtttcagcaccagtgtctaccaaccaattccacaacccaccacaccggtttcctccttcacatctggctccatgttgggccgaacagacacagccctcacaaacacctacagcgctctgccgcctatgcccagcttcaccatggcaaataacctgcctatgcaacccccagtccccagccagacctcctcatactcctgcatgctgcccaccagcccttcggtgaatgggcggagttatgatacctacacccccccacatatgcagacacacatgaacagtcagccaatgggcacctcgggcaccacttcaacaggactcatttcccctggtgtgtcagttccagttcaagttcccggaagtgaacctgatat

SEQ ID NO: 14826 - DNA, 1736 bp, Homo sapiens
  source 1..1736: mol_type = unassigned DNA
gtactttttaaagcagtgaggcgaggtagacagggtgtgtcacagtacagttaaaggggtgaagatctaaacgccaaaagagaagttaatcacaataagtgaggtttgggataaaaagttgggcttgcccctttcaaagtcccagaaagctgggaggtagatggagagggggccattgggaagtttttttggtgtagggagaggagtagaagataaagggtaagcagagtgttgggttctgggggtcttgtgaagttccttaaggaaggagggagtgtggccctgcagccctcccaaactgctccagcctatgctctccggcaccaggaagttccaaggttcccttcccctggtctccaaacttcagggggaagactttaactaggggcgcgcagatgtgtgaggccttttattgtgagagtggacagacatccgagatttcagagccccatattcgagccccgtggaatcccgcggcccccagccagagccagcatgcagaacagtcacagcggagtgaatcagctcggtggtgtctttgtcaacgggcggccactgccggactccacccggcagaagattgtagagctagctcacagcggggcccggccgtgcgacatttcccgaattctgcaggtgtccaacggatgtgtgagtaaaattctgggcaggtattacgagactggctccatcagacccagggcaatcggtggtagtaaaccgagagtagcgactccagaagttgtaagcaaaatagcccagtataagcgggagtgcccgtccatctttgcttgggaaatccgagacagattactgtccgagggggtctgtaccaacgataacataccaagcgtgtcatcaataaacagagttcttcgcaacctggctagcgaaaagcaacagatgggcgcagacggcatgtatgataaactaaggatgttgaacgggcagaccggaagctggggcacccgccctggttggtatccggggacttcggtgccagggcaacctacgcaagatggctgccagcaacaggaaggagggggagagaataccaactccatcagttccaacggagaagattcagatgaggctcaaatgcgacttcagctgaagcggaagctgcaaagaaatagaacatcctttacccaagagcaaattgaggccctggagaaagagtttgagagaacccattatccagatgtgtttgcccgagaaagactagcagccaaaatagatctacctgaagcaagaatacaggtatggttttctaatcgaagggccaaatggagaagagaagaaaaactgaggaatcagagaagacaggccagcaacacacctagtcatattcctatcagcagtagtttcagcaccagtgtctaccaaccaattccacaacccaccacaccggtttcctccttcacatctggctccatgttgggccgaacagacacagccctcacaaacacctacagcgctctgccgcctatgcccagcttcaccatggcaaataacctgcctatgcaacccccagtccccagccagacctcctcatactcctgcatgctgcccaccagcccttcggtgaatgggcggagttatgatacctacacccccccacatatgcagacacacatgaacagtcagccaatgggcacctcgggcaccacttcaacaggactcatttcccctggtgtgtcagttccagttcaagttcccggaagtgaacctgatat

SEQ ID NO: 14827 - DNA, 2390 bp, Homo sapiens
  source 1..2390: mol_type = unassigned DNA
gagagcgagcggtgcatttgcatgttgcggagtgattagtgggtttgaaaagggaaccgtggctcggcctcatttcccgctctggttcaggcgcaggaggaagtgttttgctggaggatgatgacagaggaatctgagaattgctctcacacaccaacccagcaacatccgtggagaaaactctcaccagcaactcctttaaaacaccgtcatttcaaaccattgtggtcttcaagcaacaacagcagcacaaaaaaccccaaccaaacaaaactcttgacagaagctgtgacaaccagaaaggatgcctcataaagggggaagactttaactaggggcgcgcagatgtgtgaggccttttattgtgagagtggacagacatccgagatttcagagccccatattcgagccccgtggaatcccgcggcccccagccagagccagcatgcagaacagtcacagcggagtgaatcagctcggtggtgtctttgtcaacgggcggccactgccggactccacccggcagaagattgtagagctagctcacagcggggcccggccgtgcgacatttcccgaattctgcaggtgtccaacggatgtgtgagtaaaattctgggcaggtattacgagactggctccatcagacccagggcaatcggtggtagtaaaccgagagtagcgactccagaagttgtaagcaaaatagcccagtataagcgggagtgcccgtccatctttgcttgggaaatccgagacagattactgtccgagggggtctgtaccaacgataacataccaagcgtaagttcattgagaacatctgccctccctgccctaagcccaatgctctctcctctttacctcctcccaccctctctctccactgtctcttagtctgtgtcctctccctgctccacatttgtctcctttgtacctgggggaacagagaggaatgccctgacttttctttgactgtctggaaaatgggagtcaagtgtggggagtcattcacttcatttgcatgctgcaaaacagagggcggaggcaccagggaaaggcacttgaatgaagaaggaaaatgagaaccagattgtaacttcgtcctaatccacctgccagaactttccttcaggtgtcacacatccatttccatcctaatattaaacaatataatgaaagaaagctttacaacaagtctaaatagtttttattttcgggcagtcttttaacaaagcaaagcaaccgtgtgagttaggtcaccagagacaccaagcaatggtgaaggaccccctccgcccaattctctatccaactaaatttccatgcccaaagtgatagctatcattttttccacggtgtatctgcaaatccacccactgtcccggggtggctgggagctttttaacgggttgagagttgctttttaaggttgtgggtgagctgagatgggtgactgtgtcttcaggagacactaccatttggtttgattttggtttgatttgcaggtgtcatcaataaacagagttcttcgcaacctggctagcgaaaagcaacagatgggcgcagacggcatgtatgataaactaaggatgttgaacgggcagaccggaagctggggcacccgccctggttggtatccggggacttcggtgccagggcaacctacgcaagatggctgccagcaacaggaaggagggggagagaataccaactccatcagttccaacggagaagattcagatgaggctcaaatgcgacttcagctgaagcggaagctgcaaagaaatagaacatcctttacccaagagcaaattgaggccctggagaaagagtttgagagaacccattatccagatgtgtttgcccgagaaagactagcagccaaaatagatctacctgaagcaagaatacaggtatggttttctaatcgaagggccaaatggagaagagaagaaaaactgaggaatcagagaagacaggccagcaacacacctagtcatattcctatcagcagtagtttcagcaccagtgtctaccaaccaattccacaacccaccacaccggtttcctccttcacatctggctccatgttgggccgaacagacacagccctcacaaacacctacagcgctctgccgcctatgcccagcttcaccatggcaaataacctgcctatgcaacccccagtccccagccagacctcctcatactcctgcatgctgcccaccagcccttcggtgaatgggcggagttatgatacctacacccccccacatatgcagacacacatgaacagtcagccaatgggcacctcgggcaccacttcaacaggactcatttcccctggtgtgtcagttccagttcaagttcccggaagtgaacctgatat

SEQ ID NO: 14828 - DNA, 1505 bp, Homo sapiens
  source 1..1505: mol_type = unassigned DNA
gactcccggctctaagccttacttgcggtggccggacttgtctgtggctgaagccgagcccgggctctgactctcacgtctgcactggaggtgcggaaacctggactggggttcaccagccacatactggctgctctggttgttctctcctcttccttcttctattctaaccaaacaaaacccaactcgatgcttgtgccaggccttggccagtttggacggtgatggaaacatttctggattttagcgtctaagggagcactcaagggctgtaaggtcacagcggagtgaatcagctcggtggtgtctttgtcaacgggcggccactgccggactccacccggcagaagattgtagagctagctcacagcggggcccggccgtgcgacatttcccgaattctgcagacccatgcagatgcaaaagtccaagtgctggacaatcaaaacgtgtccaacggatgtgtgagtaaaattctgggcaggtattacgagactggctccatcagacccagggcaatcggtggtagtaaaccgagagtagcgactccagaagttgtaagcaaaatagcccagtataagcgggagtgcccgtccatctttgcttgggaaatccgagacagattactgtccgagggggtctgtaccaacgataacataccaagcgtgtcatcaataaacagagttcttcgcaacctggctagcgaaaagcaacagatgggcgcagacggcatgtatgataaactaaggatgttgaacgggcagaccggaagctggggcacccgccctggttggtatccggggacttcggtgccagggcaacctacgcaagatggctgccagcaacaggaaggagggggagagaataccaactccatcagttccaacggagaagattcagatgaggctcaaatgcgacttcagctgaagcggaagctgcaaagaaatagaacatcctttacccaagagcaaattgaggccctggagaaagagtttgagagaacccattatccagatgtgtttgcccgagaaagactagcagccaaaatagatctacctgaagcaagaatacaggtatggttttctaatcgaagggccaaatggagaagagaagaaaaactgaggaatcagagaagacaggccagcaacacacctagtcatattcctatcagcagtagtttcagcaccagtgtctaccaaccaattccacaacccaccacaccggtttcctccttcacatctggctccatgttgggccgaacagacacagccctcacaaacacctacagcgctctgccgcctatgcccagcttcaccatggcaaataacctgcctatgcaacccccagtccccagccagacctcctcatactcctgcatgctgcccaccagcccttcggtgaatgggcggagttatgatacctacacccccccacatatgcagacacacatgaacagtcagccaatgggcacctcgggcaccacttcaacaggactcatttcccct

SEQ ID NO: 14829 - DNA, 1863 bp, Homo sapiens
  source 1..1863: mol_type = unassigned DNA
gacaaggctgccacaagcgccccgactgatcttttcaattagccttccatgcatgatccggagcgacttccgcctatttccagaaattaagctcaaacttgacgtgcagctagttttattttaaagacaaatgtcagagaggctcatcatattttcccccctcttctatatttggagcttatttattgctaagaagctcaggctcctggcgtcaatttatcagtaggctccaaggagaagagaggagaggagaggagagctgaacagggagccacgtcttttcctgggagggctgctatctaagtcggggctgcaggttggagatttttaaggaagtggaaattggcaattggctttgtgtgtctgtggtttttggggagggggactacaaagaggggctaactccctctccctattctctaaggttggaccacagggatgaggttgtgagatacaaagataaaggagggatggggaacactatgatgtggtatttttcttttctgttttttctttttgataatatctatccttggctaaggggagggcggagttcagcggcggaaataaagcgagcagtggctggtgcgaaccgactcccggctctaagccttacttgcggtggccggacttgtctgtggctgaagccgagcccgggctctgactctcacgtctgcactggaggtcacagcggagtgaatcagctcggtggtgtctttgtcaacgggcggccactgccggactccacccggcagaagattgtagagctagctcacagcggggcccggccgtgcgacatttcccgaattctgcaggtgtccaacggatgtgtgagtaaaattctgggcaggtattacgagactggctccatcagacccagggcaatcggtggtagtaaaccgagagtagcgactccagaagttgtaagcaaaatagcccagtataagcgggagtgcccgtccatctttgcttgggaaatccgagacagattactgtccgagggggtctgtaccaacgataacataccaagcgtgtcatcaataaacagagttcttcgcaacctggctagcgaaaagcaacagatgggcgcagacggcatgtatgataaactaaggatgttgaacgggcagaccggaagctggggcacccgccctggttggtatccggggacttcggtgccagggcaacctacgcaagatggctgccagcaacaggaaggagggggagagaataccaactccatcagttccaacggagaagattcagatgaggctcaaatgcgacttcagctgaagcggaagctgcaaagaaatagaacatcctttacccaagagcaaattgaggccctggagaaagagtttgagagaacccattatccagatgtgtttgcccgagaaagactagcagccaaaatagatctacctgaagcaagaatacaggtatggttttctaatcgaagggccaaatggagaagagaagaaaaactgaggaatcagagaagacaggccagcaacacacctagtcatattcctatcagcagtagtttcagcaccagtgtctaccaaccaattccacaacccaccacaccggtttcctccttcacatctggctccatgttgggccgaacagacacagccctcacaaacacctacagcgctctgccgcctatgcccagcttcaccatggcaaataacctgcctatgcaacccccagtccccagccagacctcctcatactcctgcatgctgcccaccagcccttcggtgaatgggcggagttatgatacctacacccccccacatatgcagacacacatgaacagtcagccaatgggcacctcgggcaccacttcaacaggactca

SEQ ID NO: 14830 - DNA, 785 bp, Homo sapiens
  source 1..785: mol_type = unassigned DNA
gcagctctccatatgtgcatccctttgcctgtcccctactctcccaaccatttcctctcagggcttccatgcttggggaatgtcatgggtgagactgcatttgaaggcctgggacacatcgaccacattgtatatggctgccagcaacaggaaggagggggagagaataccaactccatcagttccaacggagaagattcagatgaggctcaaatgcgacttcagctgaagcggaagctgcaaagaaatagaacatcctttacccaagagcaaattgaggccctggagaaagagtttgagagaacccattatccagatgtgtttgcccgagaaagactagcagccaaaatagatctacctgaagcaagaatacaggtatggttttctaatcgaagggccaaatggagaagagaagaaaaactgaggaatcagagaagacaggccagcaacacacctagtcatattcctatcagcagtagtttcagcaccagtgtctaccaaccaattccacaacccaccacaccggtttcctccttcacatctggctccatgttgggccgaacagacacagccctcacaaacacctacagcgctctgccgcctatgcccagcttcaccatggcaaataacctgcctatgcaacccccagtccccagccagacctcctcatactcctgcatgctgcccaccagcccttcggtgaatgggcggagttatgatacctacacccccccacatatgcagacacacatgaacagtcagccaatgggcacctcgggcaccac

SEQ ID NO: 14831 - DNA, 1531 bp, Homo sapiens
  source 1..1531: mol_type = unassigned DNA
gcatgttgcggagtgattagtgggtttgaaaagggaaccgtggctcggcctcatttcccgctctggttcaggcgcaggaggaagtgttttgctggaggatgatgacagaggtcaggcttcgctaatgggccagtgaggagcggtggaggcgaggccgggcgccggcacacacacattaacacacttgagccatcaccaatcagcataggaatctgagaattgctctcacacaccaacccagcaacatccgtggagaaaactctcaccagcaactcctttaaaacaccgtcatttcaaaccattgtggtcttcaagcaacaacagcagcacaaaaaaccccaaccaaacaaaactcttgacagaagctgtgacaaccagaaaggatgcctcataaagggggaagactttaactaggggcgcgcagatgtgtgaggccttttattgtgagagtggacagacatccgagatttcagagccccatattcgagccccgtggaatcccgcggcccccagccagagccagcatgcagaacagtcacagcggagtgaatcagctcggtggtgtctttgtcaacgggcggccactgccggactccacccggcagaagattgtagagctagctcacagcggggcccggccgtgcgacatttcccgaattctgcagacccatgcagatgcaaaagtccaagtgctggacaatcaaaacgtgtccaacggatgtgtgtcatcaataaacagagttcttcgcaacctggctagcgaaaagcaacagatgggcgcagacggcatgtatgataaactaaggatgttgaacgggcagaccggaagctggggcacccgccctggttggtatccggggacttcggtgccagggcaacctacgcaagatggctgccagcaacaggaaggagggggagagaataccaactccatcagttccaacggagaagattcagatgaggctcaaatgcgacttcagctgaagcggaagctgcaaagaaatagaacatcctttacccaagagcaaattgaggccctggagaaagagtttgagagaacccattatccagatgtgtttgcccgagaaagactagcagccaaaatagatctacctgaagcaagaatacaggtatggttttctaatcgaagggccaaatggagaagagaagaaaaactgaggaatcagagaagacaggccagcaacacacctagtcatattcctatcagcagtagtttcagcaccagtgtctaccaaccaattccacaacccaccacaccggtttcctccttcacatctggctccatgttgggccgaacagacacagccctcacaaacacctacagcgctctgccgcctatgcccagcttcaccatggcaaataacctgcctatgcaacccccagtccccagccagacctcctcatactcctgcatgctgcccaccagcccttcggtgaatgggcggagttatgatacctacacccccccacatatgcagacacacatgaacagtcagccaatgggcacctc

SEQ ID NO: 14832 - DNA, 1507 bp, Homo sapiens
  source 1..1507: mol_type = unassigned DNA
ccgagcccgggctctgactctcacgtctgcactggaggtgcggaaacctggactggggttcaccagccacatactggctgctctggttgttctctcctcttccttcttctattctaaccaaacaaaacccaactcgatgcttgtgccaggccttggccagtttggacggtgatggaaacatttctggattttagcgtctaagggagcactcaagggctgtaaggtcacagcggagtgaatcagctcggtggtgtctttgtcaacgggcggccactgccggactccacccggcagaagattgtagagctagctcacagcggggcccggccgtgcgacatttcccgaattctgcagacccatgcagatgcaaaagtccaagtgctggacaatcaaaacgtgtccaacggatgtgtgagtaaaattctgggcaggtattacgagactggctccatcagacccagggcaatcggtggtagtaaaccgagagtagcgactccagaagttgtaagcaaaatagcccagtataagcgggagtgcccgtccatctttgcttgggaaatccgagacagattactgtccgagggggtctgtaccaacgataacataccaagcagggcggaggcaccagggaaaggcacttgaatgaagaaggaaaatgagaaccagattgtaacttcgtcctaatccacctgccagaactttccttcaggtgtcatcaataaacagagttcttcgcaacctggctagcgaaaagcaacagatgggcgcagacggcatgtatgataaactaaggatgttgaacgggcagaccggaagctggggcacccgccctggttggtatccggggacttcggtgccagggcaacctacgcaagatggctgccagcaacaggaaggagggggagagaataccaactccatcagttccaacggagaagattcagatgaggctcaaatgcgacttcagctgaagcggaagctgcaaagaaatagaacatcctttacccaagagcaaattgaggccctggagaaagagtttgagagaacccattatccagatgtgtttgcccgagaaagactagcagccaaaatagatctacctgaagcaagaatacaggtatggttttctaatcgaagggccaaatggagaagagaagaaaaactgaggaatcagagaagacaggccagcaacacacctagtcatattcctatcagcagtagtttcagcaccagtgtctaccaaccaattccacaacccaccacaccggtttcctccttcacatctggctccatgttgggccgaacagacacagccctcacaaacacctacagcgctctgccgcctatgcccagcttcaccatggcaaataacctgcctatgcaacccccagtccccagccagacctcctcatactcctgcatgctgcccaccagcccttcggtgaatgggcggagttatgatacctacacccccccacatatgcagacacacatgaacagtcagcca

SEQ ID NO: 14833 - DNA, 2254 bp, Homo sapiens
  source 1..2254: mol_type = unassigned DNA
ataggtgtgctggctgcagccacttccctcacccacactctttatctctcactctccagccgctgacagcccattttattgtcaatctctgtctccttcccaggaatctgagaattgctctcacacaccaacccagcaacatccgtggagaaaactctcaccagcaactcctttaaaacaccgtcatttcaaaccattgtggtcttcaagcaacaacagcagcacaaaaaaccccaaccaaacaaaactcttgacagaagctgtgacaaccagaaaggatgcctcataaagggggaagactttaactaggggcgcgcagatgtgtgaggccttttattgtgagagtggacagacatccgagatttcagagccccatattcgagccccgtggaatcccgcggcccccagccagagccagcatgcagaacagtcacagcggagtgaatcagctcggtggtgtctttgtcaacgggcggccactgccggactccacccggcagaagattgtagagctagctcacagcggggcccggccgtgcgacatttcccgaattctgcaggtgtccaacggatgtgtgagtaaaattctgggcaggtattacgagactggctccatcagacccagggcaatcggtggtagtaaaccgagagtagcgactccagaagttgtaagcaaaatagcccagtataagcgggagtgcccgtccatctttgcttgggaaatccgagacagattactgtccgagggggtctgtaccaacgataacataccaagcgtaagttcattgagaacatctgccctccctgccctaagcccaatgctctctcctctttacctcctcccaccctctctctccactgtctcttagtctgtgtcctctccctgctccacatttgtctcctttgtacctgggggaacagagaggaatgccctgacttttctttgactgtctggaaaatgggagtcaagtgtggggagtcattcacttcatttgcatgctgcaaaacagagggcggaggcaccagggaaaggcacttgaatgaagaaggaaaatgagaaccagattgtaacttcgtcctaatccacctgccagaactttccttcaggtgtcacacatccatttccatcctaatattaaacaatataatgaaagaaagctttacaacaagtctaaatagtttttattttcgggcagtcttttaacaaagcaaagcaaccgtgtgagttaggtcaccagagacaccaagcaatggtgaaggaccccctccgcccaattctctatccaactaaatttccatgcccaaagtgatagctatcattttttccacggtgtatctgcaaatccacccactgtcccggggtggctgggagctttttaacgggttgagagttgctttttaaggttgtgggtgagctgagatgggtgactgtgtcttcaggagacactaccatttggtttgattttggtttgatttgcaggtgtcatcaataaacagagttcttcgcaacctggctagcgaaaagcaacagatgggcgcagacggcatgtatgataaactaaggatgttgaacgggcagaccggaagctggggcacccgccctggttggtatccggggacttcggtgccagggcaacctacgcaagatggctgccagcaacaggaaggagggggagagaataccaactccatcagttccaacggagaagattcagatgaggctcaaatgcgacttcagctgaagcggaagctgcaaagaaatagaacatcctttacccaagagcaaattgaggccctggagaaagagtttgagagaacccattatccagatgtgtttgcccgagaaagactagcagccaaaatagatctacctgaagcaagaatacaggtatggttttctaatcgaagggccaaatggagaagagaagaaaaactgaggaatcagagaagacaggccagcaacacacctagtcatattcctatcagcagtagtttcagcaccagtgtctaccaaccaattccacaacccaccacaccggtttcctccttcacatctggctccatgttgggccgaacagacacagccctcacaaacacctacagcgctctgccgcctatgcccagcttcaccatggcaaataacctgcctatgcaacccccagtccccagccagacctcctcatactcctgcatgctgcccaccagcccttcggtgaatgggcggagttatgatacctacacccccccacatatg

SEQ ID NO: 14834 - DNA, 964 bp, Homo sapiens
  source 1..964: mol_type = unassigned DNA
caccaggccaaggcggtggaacgcgcgctccgagggagctcagagccgagcgggaggactgtcagcttccacccagcccccgggctcttgcccccaactccactggagcgctgagctcggaacttgaaaactctctgctccccaggcttcccccgactctcatctcccttgccttgcggaggctggggctcttccctgttctccggccccctgcgcttgggggaagactttaactaggggcgcgcagatgtgtgaggccttttattgtgagagtggacagacatccgagatttcagagccccatattcgagccccgtggaatcccgcggcccccagccagagccagcatgcagaacaatggctgccagcaacaggaaggagggggagagaataccaactccatcagttccaacggagaagattcagatgaggctcaaatgcgacttcagctgaagcggaagctgcaaagaaatagaacatcctttacccaagagcaaattgaggccctggagaaagagtttgagagaacccattatccagatgtgtttgcccgagaaagactagcagccaaaatagatctacctgaagcaagaatacaggtatggttttctaatcgaagggccaaatggagaagagaagaaaaactgaggaatcagagaagacaggccagcaacacacctagtcatattcctatcagcagtagtttcagcaccagtgtctaccaaccaattccacaacccaccacaccggtttcctccttcacatctggctccatgttgggccgaacagacacagccctcacaaacacctacagcgctctgccgcctatgcccagcttcaccatggcaaataacctgcctatgcaacccccagtccccagccagacctcctcatactcctgcatgctgcccaccagcccttcggtgaatgggcggagttatgatacctacacccccccacatat

SEQ ID NO: 14835 - DNA, 2580 bp, Homo sapiens
  source 1..2580: mol_type = unassigned DNA
gccacaagcgccccgactgatcttttcaattagccttccatgcatgatccggagcgacttccgcctatttccagaaattaagctcaaacttgacgtgcagctagttttattttaaagacaaatgtcagagaggctcatcatattttcccccctcttctatatttggagcttatttattgctaagaagctcaggctcctggcgtcaatttatcagtaggctccaaggagaagagaggagaggagaggagagctgaacagggagccacgtcttttcctgggagggctgctatctaagtcggggctgcaggttggagatttttaaggaagtggaaattggcaattggctttgtgtgtctgtggtttttggggagggggactacaaagaggggctaactccctctccctattctctaaggttggaccacagggatgaggttgtgagatacaaagataaaggagggatggggaacactatgatgtggtatttttcttttctgttttttctttttgataatatctatccttggctaaggggagggcggagttcagcggcggaaataaagcgagcagtggctggtgcgaaccgactcccggctctaagccttacttgcggtggccggacttgtctgtggctgaagccgagcccgggctctgactctcacgtctgcactggaggtgcggaaacctggactggggttcaccagccacatactggctgctctggttgttctctcctcttccttcttctattctaaccaaacaaaacccaactcgatgcttgtgccaggccttggccagtttggacggtgatggaaacatttctggattttagcgtctaagggagcactcaagggctgtaaggtttgctatcactgtcccaacactgcagagaccttgaaggttcagtgtgggatctgtagaacccatggtttgcggtgacactcagaggggatctttgggagatttatagagccggttcttagcgctttgtgggttcagaggctggctgcagtgtttatgaagaggggcagtgggctggggacactgctggggttatggctgtagtgaggtccatgtgtacttgttccttggcatgtgtctgactctgtgttgctgctgcagtacagtgggcaggggcacggttgcttggactgggctgcccgatgtctggcatggctggtggtcctgttgtcctttatttgatcgatagcagggaactgaccgccgaggttggcacaggttggcagggggatgaggatgcattgtggttgtctcctcctcctctccttcttcctcttccccttcctcctctcctttctgttcttgttctccctcatcttcctcttccttcttctccctcttcttcctcttcactctgctctcttctcttcttttcccctttcctctcctctccctttcctcaggtcacagcggagtgaatcagctcggtggtgtctttgtcaacgggcggccactgccggactccacccggcagaagattgtagagctagctcacagcggggcccggccgtgcgacatttcccgaattctgcagacccatgcagatgcaaaagtccaagtgctggacaatcaaaacgtgtccaacggatgtgtgagtaaaattctgggcaggtattacgagactggctccatcagacccagggcaatcggtggtagtaaaccgagagtagcgactccagaagttgtaagcaaaatagcccagtataagcgggagtgcccgtccatctttgcttgggaaatccgagacagattactgtccgagggggtctgtaccaacgataacataccaagcgtgtcatcaataaacagagttcttcgcaacctggctagcgaaaagcaacagatgggcgcagacggcatgtatgataaactaaggatgttgaacgggcagaccggaagctggggcacccgccctggttggtatccggggacttcggtgccagggcaacctacgcaagatggctgccagcaacaggaaggagggggagagaataccaactccatcagttccaacggagaagattcagatgaggctcaaatgcgacttcagctgaagcggaagctgcaaagaaatagaacatcctttacccaagagcaaattgaggccctggagaaagagtttgagagaacccattatccagatgtgtttgcccgagaaagactagcagccaaaatagatctacctgaagcaagaatacaggtatggttttctaatcgaagggccaaatggagaagagaagaaaaactgaggaatcagagaagacaggccagcaacacacctagtcatattcctatcagcagtagtttcagcaccagtgtctaccaaccaattccacaacccaccacaccggtttcctccttcacatctggctccatgttgggccgaacagacacagccctcacaaacacctacagcgctctgccgcctatgcccagcttcaccatggcaaataacctgcctatgcaacccccagtccccagccagacctcctcatactcctgcatgctgcccaccagcccttcggtgaatgggcggagttatgatacctacaccccccc

SEQ ID NO: 14836 - DNA, 1395 bp, Homo sapiens
  source 1..1395: mol_type = unassigned DNA
ctggaggatgatgacagaggtcaggcttcgctaatgggccagtgaggagcggtggaggcgaggccgggcgccggcacacacacattaacacacttgagccatcaccaatcagcataggtgaatctgagaattgctctcacacaccaacccagcaacatccgtggagaaaactctcaccagcaactcctttaaaacaccgtcatttcaaaccattgtggtcttcaagcaacaacagcagcacaaaaaaccccaaccaaacaaaactcttgacagaagctgtgacaaccagaaaggatgcctcataaagggggaagactttaactaggggcgcgcagatgtgtgaggccttttattgtgagagtggacagacatccgagatttcagagccccatattcgagccccgtggaatcccgcggcccccagccagagccagcatgcagaacagtcacagcggagtgaatcagctcggtggtgtctttgtcaacgggcggccactgccggactccacccggcagaagattgtagagctagctcacagcggggcccggccgtgcgacatttcccgaattctgcagacccatgcagatgcaaaagtccaagtgctggacaatcaaaacgtgtccaacggatgtgtgtcatcaataaacagagttcttcgcaacctggctagcgaaaagcaacagatgggcgcagacggcatgtatgataaactaaggatgttgaacgggcagaccggaagctggggcacccgccctggttggtatccggggacttcggtgccagggcaacctacgcaagatggctgccagcaacaggaaggagggggagagaataccaactccatcagttccaacggagaagattcagatgaggctcaaatgcgacttcagctgaagcggaagctgcaaagaaatagaacatcctttacccaagagcaaattgaggccctggagaaagagtttgagagaacccattatccagatgtgtttgcccgagaaagactagcagccaaaatagatctacctgaagcaagaatacaggtatggttttctaatcgaagggccaaatggagaagagaagaaaaactgaggaatcagagaagacaggccagcaacacacctagtcatattcctatcagcagtagtttcagcaccagtgtctaccaaccaattccacaacccaccacaccggtttcctccttcacatctggctccatgttgggccgaacagacacagccctcacaaacacctacagcgctctgccgcctatgcccagcttcaccatggcaaataacctgcctatgcaacccccagtccccagccagacctcctcatactcctgcatgctgcccaccagcccttcggtgaatgggcggagttatgatacctacacc

SEQ ID NO: 14837 - DNA, 1369 bp, Homo sapiens
  source 1..1369: mol_type = unassigned DNA
gactcccggctctaagccttacttgcggtggccggacttgtctgtggctgaagccgagcccgggctctgactctcacgtctgcactggaggtgcggaaacctggactggggttcaccagccacatactggctgctctggttgttctctcctcttccttcttctattctaaccaaacaaaacccaactcgatgcttgtgccaggccttggccagtttggacggtgatggaaacatttctggattttagcgtctaagggagcactcaagggctgtaaggtcacagcggagtgaatcagctcggtggtgtctttgtcaacgggcggccactgccggactccacccggcagaagattgtagagctagctcacagcggggcccggccgtgcgacatttcccgaattctgcaggtgtccaacggatgtgtgagtaaaattctgggcaggtattacgagactggctccatcagacccagggcaatcggtggtagtaaaccgagagtagcgactccagaagttgtaagcaaaatagcccagtataagcgggagtgcccgtccatctttgcttgggaaatccgagacagattactgtccgagggggtctgtaccaacgataacataccaagcgtgtcatcaataaacagagttcttcgcaacctggctagcgaaaagcaacagatgggcgcagacggcatgtatgataaactaaggatgttgaacgggcagaccggaagctggggcacccgccctggttggtatccggggacttcggtgccagggcaacctacgcaagatggctgccagcaacaggaaggagggggagagaataccaactccatcagttccaacggagaagattcagatgaggctcaaatgcgacttcagctgaagcggaagctgcaaagaaatagaacatcctttacccaagagcaaattgaggccctggagaaagagtttgagagaacccattatccagatgtgtttgcccgagaaagactagcagccaaaatagatctacctgaagcaagaatacaggtatggttttctaatcgaagggccaaatggagaagagaagaaaaactgaggaatcagagaagacaggccagcaacacacctagtcatattcctatcagcagtagtttcagcaccagtgtctaccaaccaattccacaacccaccacaccggtttcctccttcacatctggctccatgttgggccgaacagacacagccctcacaaacacctacagcgctctgccgcctatgcccagcttcaccatggcaaataacctgcctatgcaacccccagtccccagccagacctcctcatactcctgcatgctgcccaccagcccttcggtgaatgggcggag

SEQ ID NO: 14838 - DNA, 2584 bp, Homo sapiens
  source 1..2584: mol_type = unassigned DNA
gcacttagtgttcacgtttacttaagtaattagatagcttcttagcgagagggaagtgggaatggagcagaactggaatttgaaatactaccaccttcccagctgcttcgaaaactaatcaacgaggcctctttgtgctcagctactgaatttaaaaaaaaatggtatcaagaagttacaagccaggatgggagcattctgttgtgattgtgcacagcgtgggttacaaagtggagttctggaagttttacccctcctaggggaattccattccccatctccccacctactactcctttgcagcttcagggtcctgcatttgttggggtggggtattttgcattagagttggagattttgcctatccagggcatggctatgggtgccgggactgagagacaggaaggaagcattggagagccaacctagataagggtaactagtaaccctctgctgtggccagtatttacccaatgctgagaaaaagtcctcattttcggtttatttttatggatttaagctgtctaccaagtagttaaaaagtagaccaggaatggccttgtagagtaaaatgtgcttcttgaaattctttgcttgcaggcaggcagatcaataatcaccataggtaaaacagaaaaaataatgcatttaaaaaaaaacagagagaaatgatgctgtgactgttttgttattttacctctttttggggggcagacctcttgaatgggctctttattgtaactctctcttcccaattgagctccccacggtgccgttgtatctttttacagcccctaacaactcacaccagtaacacaattacctccagatatttacaacaagaaattacttttctattttctccactcacccaaaagactttttttttttttcctttgggaaaggtagggaggtgttcgtacgggagcagcctcggggacccctgcactgggtcagggcttatgaagctagaagcgtccctctgttccctttgtgagttggtgggttgttggtacatttggttggaagctgtgttgctggttagggagactcggttttgctccttgggttcgaggaaagctggagaatagaagccattgtttgccgtctgtcggctttgtcgaccacgctcaccccctcctgttcgtactttttaaagcagtgaggcgaggtagacagggtgtgtcacagtacagttaaaggggtgaagatctaaacgccaaaagagaagttaatcacaataagtgaggtttgggataaaaagttgggcttgcccctttcaaagtcccagaaagctgggaggtagatggagagggggccattgggaagtttttttggtgtagggagaggagtagaagataaagggtaagcagagtgttgggttctgggggtcttgtgaagttccttaaggaaggagggagtgtggccctgcagccctcccaaactgctccagcctatgctctccggcaccaggaagttccaaggttcccttcccctggtctccaaacttcagggggaagactttaactaggggcgcgcagatgtgtgaggccttttattgtgagagtggacagacatccgagatttcagagccccatattcgagccccgtggaatcccgcggcccccagccagagccagcatgcagaacagtcacagcggagtgaatcagctcggtggtgtctttgtcaacgggcggccactgccggactccacccggcagaagattgtagagctagctcacagcggggcccggccgtgcgacatttcccgaattctgcagacccatgcagatgcaaaagtccaagtgctggacaatcaaaacgtgtccaacggatgtgtgtcatcaataaacagagttcttcgcaacctggctagcgaaaagcaacagatgggcgcagacggcatgtatgataaactaaggatgttgaacgggcagaccggaagctggggcacccgccctggttggtatccggggacttcggtgccagggcaacctacgcaagatggctgccagcaacaggaaggagggggagagaataccaactccatcagttccaacggagaagattcagatgaggctcaaatgcgacttcagctgaagcggaagctgcaaagaaatagaacatcctttacccaagagcaaattgaggccctggagaaagagtttgagagaacccattatccagatgtgtttgcccgagaaagactagcagccaaaatagatctacctgaagcaagaatacaggtatggttttctaatcgaagggccaaatggagaagagaagaaaaactgaggaatcagagaagacaggccagcaacacacctagtcatattcctatcagcagtagtttcagcaccagtgtctaccaaccaattccacaacccaccacaccggtttcctccttcacatctggctccatgttgggccgaacagacacagccctcacaaacacctacagcgctctgccgcctatgcccagcttcaccatggcaaataacctgcctatgcaacccccagtccccagccagacctcctcatactcctgcatgctgcccaccagcccttcggtgaatgggcgga

SEQ ID NO: 14839 - DNA, 2037 bp, Homo sapiens
  source 1..2037: mol_type = unassigned DNA
agagcgaacggaagaggactgaggactgaacccagggagcccctagcactggccatttggcaggaggcgaggaagggcgagggcaccgcggcttccccccaagccgagcagtggccacagcctgaaggtgccacggggcggctctgggatcttcttggcttttctaggctctgggctcggcgaggctgccgggttagcgggaaccggcaggttgctggagaaaggagagggacaaaggcctggaagtgggggaggcaccagggactgggcggccgggatgggagcctttgcctttagggctcactggacccgtttgccagctccgcggacaagggatcccaccttcccagggtctgcaaaaagagagacgtttggggcactacaaagtgacgcaggtgtctgccaagactttccttctccaaaaaatgccagtcttcaccctttccagcgcgccggcgctgcgcctctgcttgaccggggaaagagagagtttggaggtgtcagaactgtcagaactccggatgggaggctcttggttctgaagctgggagctggaggcacttccccccagaagtgggcacttctttgcctccccgaaggcctgatggggaatctgagaattgctctcacacaccaacccagcaacatccgtggagaaaactctcaccagcaactcctttaaaacaccgtcatttcaaaccattgtggtcttcaagcaacaacagcagcacaaaaaaccccaaccaaacaaaactcttgacagaagctgtgacaaccagaaaggatgcctcataaagggggaagactttaactaggggcgcgcagatgtgtgaggccttttattgtgagagtggacagacatccgagatttcagagccccatattcgagccccgtggaatcccgcggcccccagccagagccagcatgcagaacagtcacagcggagtgaatcagctcggtggtgtctttgtcaacgggcggccactgccggactccacccggcagaagattgtagagctagctcacagcggggcccggccgtgcgacatttcccgaattctgcagacccatgcagatgcaaaagtccaagtgctggacaatcaaaacgtgtccaacggatgtgtgagtaaaattctgggcaggtattacgagactggctccatcagacccagggcaatcggtggtagtaaaccgagagtagcgactccagaagttgtaagcaaaatagcccagtataagcgggagtgcccgtccatctttgcttgggaaatccgagacagattactgtccgagggggtctgtaccaacgataacataccaagcgtgtcatcaataaacagagttcttcgcaacctggctagcgaaaagcaacagatgggcgcagacggcatgtatgataaactaaggatgttgaacgggcagaccggaagctggggcacccgccctggttggtatccggggacttcggtgccagggcaacctacgcaagatggctgccagcaacaggaaggagggggagagaataccaactccatcagttccaacggagaagattcagatgaggctcaaatgcgacttcagctgaagcggaagctgcaaagaaatagaacatcctttacccaagagcaaattgaggccctggagaaagagtttgagagaacccattatccagatgtgtttgcccgagaaagactagcagccaaaatagatctacctgaagcaagaatacaggtatggttttctaatcgaagggccaaatggagaagagaagaaaaactgaggaatcagagaagacaggccagcaacacacctagtcatattcctatcagcagtagtttcagcaccagtgtctaccaaccaattccacaacccaccacaccggtttcctccttcacatctggctccatgttgggccgaacagacacagccctcacaaacacctacagcgctctgccgcctatgcccagcttcaccatggcaaataacctgcctatgcaacccccagtccccagccagacctcctcatactcctgcat

SEQ ID NO: 14840 - DNA, 627 bp, Homo sapiens
  source 1..627: mol_type = unassigned DNA
ttactctttcagagtttgagagaacccattatccagatgtgtttgcccgagaaagactagcagccaaaatagatctacctgaagcaagaatacaggtatggttttctaatcgaagggccaaatggagaagagaagaaaaactgaggaatcagagaagacaggccagcaacacacctagtcatattcctatcagcagtagtttcagcaccagtgtctaccaaccaattccacaacccaccacaccggtttcctccttcacatctggctccatgttgggccgaacagacacagccctcacaaacacctacagcgctctgccgcctatgcccagcttcaccatggcaaataacctgcctatgcaagtaagtgcggctggtggtggcctgcataacccaggccccagagaagtgaggagtggctcagggcctgcggacctcattggctgtgtctgcacccttgagagcttttcgcactacagtgattggcttgaccagtcaagtcggagacagtcaatcccatcacttttaagtgattgactcattaattcatgccctaaaaaaatgagtaataaaaatctgtccagttttgtcaggttgatctgccttttattatactgttaccttgata

SEQ ID NO: 14841 - DNA, 1958 bp, Homo sapiens
  source 1..1958: mol_type = unassigned DNA
atcatcatatttgtagtttttagggctacaaatgtaattttaagaaaaaaagctctctacagtaagttctcataccattgaaggtatatttttgtgttatagacccatgcagatgcaaaagtccaagtgctggacaatcaaaacgtgtccaacggatgtgtgagtaaaattctgggcaggtattacgagactggctccatcagacccagggcaatcggtggtagtaaaccgagagtagcgactccagaagttgtaagcaaaatagcccagtataagcgggagtgcccgtccatctttgcttgggaaatccgagacagattactgtccgagggggtctgtaccaacgataacataccaagcgtaagttcattgagaacatctgccctccctgccctaagcccaatgctctctcctctttacctcctcccaccctctctctccactgtctcttagtctgtgtcctctccctgctccacatttgtctcctttgtacctgggggaacagagaggaatgccctgacttttctttgactgtctggaaaatgggagtcaagtgtggggagtcattcacttcatttgcatgctgcaaaacagagggcggaggcaccagggaaaggcacttgaatgaagaaggaaaatgagaaccagattgtaacttcgtcctaatccacctgccagaactttccttcaggtgtcacacatccatttccatcctaatattaaacaatataatgaaagaaagctttacaacaagtctaaatagtttttattttcgggcagtcttttaacaaagcaaagcaaccgtgtgagttaggtcaccagagacaccaagcaatggtgaaggaccccctccgcccaattctctatccaactaaatttccatgcccaaagtgatagctatcattttttccacggtgtatctgcaaatccacccactgtcccggggtggctgggagctttttaacgggttgagagttgctttttaaggttgtgggtgagctgagatgggtgactgtgtcttcaggagacactaccatttggtttgattttggtttgatttgcaggtgtcatcaataaacagagttcttcgcaacctggctagcgaaaagcaacagatgggcgcagacggcatgtatgataaactaaggatgttgaacgggcagaccggaagctggggcacccgccctggttggtatccggggacttcggtgccagggcaacctacgcaagatggctgccagcaacaggaaggagggggagagaataccaactccatcagttccaacggagaagattcagatgaggctcaaatgcgacttcagctgaagcggaagctgcaaagaaatagaacatcctttacccaagagcaaattgaggccctggagaaagagtttgagagaacccattatccagatgtgtttgcccgagaaagactagcagccaaaatagatctacctgaagcaagaatacaggtatggttttctaatcgaagggccaaatggagaagagaagaaaaactgaggaatcagagaagacaggccagcaacacacctagtcatattcctatcagcagtagtttcagcaccagtgtctaccaaccaattccacaacccaccacaccggtttcctccttcacatctggctccatgttgggccgaacagacacagccctcacaaacacctacagcgctctgccgcctatgcccagcttcaccatggcaaataacctgcctatgcaagtaagtgcggctggtggtggcctgcataacccaggccccagagaagtgaggagtggctcagggcctgcggacctcattggctgtgtctgcacccttgagagcttttcgcactacagtgattggcttgaccagtcaagtcggagacagtcaatcccatcacttttaagtgattgactcattaattcatgccctaaaaaaatgagtaataaaaatctgtcc

SEQ ID NO: 14842 - DNA, 1597 bp, Homo sapiens
  source 1..1597: mol_type = unassigned DNA
aacacacttgagccatcaccaatcagcataggaatctgagaattgctctcacacaccaacccagcaacatccgtggagaaaactctcaccagcaactcctttaaaacaccgtcatttcaaaccattgtggtcttcaagcaacaacagcagcacaaaaaaccccaaccaaacaaaactcttgacagaagctgtgacaaccagaaaggatgcctcataaagggggaagactttaactaggggcgcgcagatgtgtgaggccttttattgtgagagtggacagacatccgagatttcagagccccatattcgagccccgtggaatcccgcggcccccagccagagccagcatgcagaacagtcacagcggagtgaatcagctcggtggtgtctttgtcaacgggcggccactgccggactccacccggcagaagattgtagagctagctcacagcggggcccggccgtgcgacatttcccgaattctgcaggtgtccaacggatgtgtgagtaaaattctgggcaggtattacgagactggctccatcagacccagggcaatcggtggtagtaaaccgagagtagcgactccagaagttgtaagcaaaatagcccagtataagcgggagtgcccgtccatctttgcttgggaaatccgagacagattactgtccgagggggtctgtaccaacgataacataccaagcgtgtcatcaataaacagagttcttcgcaacctggctagcgaaaagcaacagatgggcgcagacggcatgtatgataaactaaggatgttgaacgggcagaccggaagctggggcacccgccctggttggtatccggggacttcggtgccagggcaacctacgcaagatggctgccagcaacaggaaggagggggagagaataccaactccatcagttccaacggagaagattcagatgaggctcaaatgcgacttcagctgaagcggaagctgcaaagaaatagaacatcctttacccaagagcaaattgaggccctggagaaagagtttgagagaacccattatccagatgtgtttgcccgagaaagactagcagccaaaatagatctacctgaagcaagaatacaggtatggttttctaatcgaagggccaaatggagaagagaagaaaaactgaggaatcagagaagacaggccagcaacacacctagtcatattcctatcagcagtagtttcagcaccagtgtctaccaaccaattccacaacccaccacaccggtttcctccttcacatctggctccatgttgggccgaacagacacagccctcacaaacacctacagcgctctgccgcctatgcccagcttcaccatggcaaataacctgcctatgcaagtaagtgcggctggtggtggcctgcataacccaggccccagagaagtgaggagtggctcagggcctgcggacctcattggctgtgtctgcacccttgagagcttttcgcactacagtgattggcttgaccagtcaagtcggagacagtcaatcccatcacttttaagtgattgactcattaattcatgccctaaaaaaatgagtaataaaaatctgtc

SEQ ID NO: 14843 - DNA, 2525 bp, Homo sapiens
  source 1..2525: mol_type = unassigned DNA
ggtgcatttgcatgttgcggagtgattagtgggtttgaaaagggaaccgtggctcggcctcatttcccgctctggttcaggcgcaggaggaagtgttttgctggaggatgatgacagaggtcaggcttcgctaatgggccagtgaggagcggtggaggcgaggccgggcgccggcacacacacattaacacacttgagccatcaccaatcagcataggaatctgagaattgctctcacacaccaacccagcaacatccgtggagaaaactctcaccagcaactcctttaaaacaccgtcatttcaaaccattgtggtcttcaagcaacaacagcagcacaaaaaaccccaaccaaacaaaactcttgacagaagctgtgacaaccagaaaggatgcctcataaagggggaagactttaactaggggcgcgcagatgtgtgaggccttttattgtgagagtggacagacatccgagatttcagagccccatattcgagccccgtggaatcccgcggcccccagccagagccagcatgcagaacagtcacagcggagtgaatcagctcggtggtgtctttgtcaacgggcggccactgccggactccacccggcagaagattgtagagctagctcacagcggggcccggccgtgcgacatttcccgaattctgcagacccatgcagatgcaaaagtccaagtgctggacaatcaaaacgtgtccaacggatgtgtgagtaaaattctgggcaggtattacgagactggctccatcagacccagggcaatcggtggtagtaaaccgagagtagcgactccagaagttgtaagcaaaatagcccagtataagcgggagtgcccgtccatctttgcttgggaaatccgagacagattactgtccgagggggtctgtaccaacgataacataccaagcgtaagttcattgagaacatctgccctccctgccctaagcccaatgctctctcctctttacctcctcccaccctctctctccactgtctcttagtctgtgtcctctccctgctccacatttgtctcctttgtacctgggggaacagagaggaatgccctgacttttctttgactgtctggaaaatgggagtcaagtgtggggagtcattcacttcatttgcatgctgcaaaacagagggcggaggcaccagggaaaggcacttgaatgaagaaggaaaatgagaaccagattgtaacttcgtcctaatccacctgccagaactttccttcaggtgtcacacatccatttccatcctaatattaaacaatataatgaaagaaagctttacaacaagtctaaatagtttttattttcgggcagtcttttaacaaagcaaagcaaccgtgtgagttaggtcaccagagacaccaagcaatggtgaaggaccccctccgcccaattctctatccaactaaatttccatgcccaaagtgatagctatcattttttccacggtgtatctgcaaatccacccactgtcccggggtggctgggagctttttaacgggttgagagttgctttttaaggttgtgggtgagctgagatgggtgactgtgtcttcaggagacactaccatttggtttgattttggtttgatttgcaggtgtcatcaataaacagagttcttcgcaacctggctagcgaaaagcaacagatgggcgcagacggcatgtatgataaactaaggatgttgaacgggcagaccggaagctggggcacccgccctggttggtatccggggacttcggtgccagggcaacctacgcaagatggctgccagcaacaggaaggagggggagagaataccaactccatcagttccaacggagaagattcagatgaggctcaaatgcgacttcagctgaagcggaagctgcaaagaaatagaacatcctttacccaagagcaaattgaggccctggagaaagagtttgagagaacccattatccagatgtgtttgcccgagaaagactagcagccaaaatagatctacctgaagcaagaatacaggtatggttttctaatcgaagggccaaatggagaagagaagaaaaactgaggaatcagagaagacaggccagcaacacacctagtcatattcctatcagcagtagtttcagcaccagtgtctaccaaccaattccacaacccaccacaccggtttcctccttcacatctggctccatgttgggccgaacagacacagccctcacaaacacctacagcgctctgccgcctatgcccagcttcaccatggcaaataacctgcctatgcaagtaagtgcggctggtggtggcctgcataacccaggccccagagaagtgaggagtggctcagggcctgcggacctcattggctgtgtctgcacccttgagagcttttcgcactacagtgattggcttgaccagtcaagtcggagacagtcaatcccatcacttttaagtgattgactcattaattcatgccctaaaaaaatgagtaataaaaatc

SEQ ID NO: 14844 - DNA, 1557 bp, Homo sapiens
  source 1..1557: mol_type = unassigned DNA
ccaacccagcaacatccgtggagaaaactctcaccagcaactcctttaaaacaccgtcatttcaaaccattgtggtcttcaagcaacaacagcagcacaaaaaaccccaaccaaacaaaactcttgacagaagctgtgacaaccagaaaggatgcctcataaagggggaagactttaactaggggcgcgcagatgtgtgaggccttttattgtgagagtggacagacatccgagatttcagagccccatattcgagccccgtggaatcccgcggcccccagccagagccagcatgcagaacagtcacagcggagtgaatcagctcggtggtgtctttgtcaacgggcggccactgccggactccacccggcagaagattgtagagctagctcacagcggggcccggccgtgcgacatttcccgaattctgcagacccatgcagatgcaaaagtccaagtgctggacaatcaaaacgtgtccaacggatgtgtgagtaaaattctgggcaggtattacgagactggctccatcagacccagggcaatcggtggtagtaaaccgagagtagcgactccagaagttgtaagcaaaatagcccagtataagcgggagtgcccgtccatctttgcttgggaaatccgagacagattactgtccgagggggtctgtaccaacgataacataccaagcgtgtcatcaataaacagagttcttcgcaacctggctagcgaaaagcaacagatgggcgcagacggcatgtatgataaactaaggatgttgaacgggcagaccggaagctggggcacccgccctggttggtatccggggacttcggtgccagggcaacctacgcaagatggctgccagcaacaggaaggagggggagagaataccaactccatcagttccaacggagaagattcagatgaggctcaaatgcgacttcagctgaagcggaagctgcaaagaaatagaacatcctttacccaagagcaaattgaggccctggagaaagagtttgagagaacccattatccagatgtgtttgcccgagaaagactagcagccaaaatagatctacctgaagcaagaatacaggtatggttttctaatcgaagggccaaatggagaagagaagaaaaactgaggaatcagagaagacaggccagcaacacacctagtcatattcctatcagcagtagtttcagcaccagtgtctaccaaccaattccacaacccaccacaccggtttcctccttcacatctggctccatgttgggccgaacagacacagccctcacaaacacctacagcgctctgccgcctatgcccagcttcaccatggcaaataacctgcctatgcaagtaagtgcggctggtggtggcctgcataacccaggccccagagaagtgaggagtggctcagggcctgcggacctcattggctgtgtctgcacccttgagagcttttcgcactacagtgattggcttgaccagtcaagtcggagacagtcaatcccatcacttttaagtgattgactcattaattcatgccc

SEQ ID NO: 14845 - DNA, 2608 bp, Homo sapiens
  source 1..2608: mol_type = unassigned DNA
acaagcgccccgactgatcttttcaattagccttccatgcatgatccggagcgacttccgcctatttccagaaattaagctcaaacttgacgtgcagctagttttattttaaagacaaatgtcagagaggctcatcatattttcccccctcttctatatttggagcttatttattgctaagaagctcaggctcctggcgtcaatttatcagtaggctccaaggagaagagaggagaggagaggagagctgaacagggagccacgtcttttcctgggagggctgctatctaagtcggggctgcaggttggagatttttaaggaagtggaaattggcaattggctttgtgtgtctgtggtttttggggagggggactacaaagaggggctaactccctctccctattctctaaggttggaccacagggatgaggttgtgagatacaaagataaaggagggatggggaacactatgatgtggtatttttcttttctgttttttctttttgataatatctatccttggctaaggggagggcggagttcagcggcggaaataaagcgagcagtggctggtgcgaaccgactcccggctctaagccttacttgcggtggccggacttgtctgtggctgaagccgagcccgggctctgactctcacgtctgcactggaggtgcggaaacctggactggggttcaccagccacatactggctgctctggttgttctctcctcttccttcttctattctaaccaaacaaaacccaactcgatgcttgtgccaggccttggccagtttggacggtgatggaaacatttctggattttagcgtctaagggagcactcaagggctgtaaggtttgctatcactgtcccaacactgcagagaccttgaaggttcagtgtgggatctgtagaacccatggtttgcggtgacactcagaggggatctttgggagatttatagagccggttcttagcgctttgtgggttcagaggctggctgcagtgtttatgaagaggggcagtgggctggggacactgctggggttatggctgtagtgaggtccatgtgtacttgttccttggcatgtgtctgactctgtgttgctgctgcagtacagtgggcaggggcacggttgcttggactgggctgcccgatgtctggcatggctggtggtcctgttgtcctttatttgatcgatagcagggaactgaccgccgaggttggcacaggttggcagggggatgaggatgcattgtggttgtctcctcctcctctccttcttcctcttccccttcctcctctcctttctgttcttgttctccctcatcttcctcttccttcttctccctcttcttcctcttcactctgctctcttctcttcttttcccctttcctctcctctccctttcctcaggtcacagcggagtgaatcagctcggtggtgtctttgtcaacgggcggccactgccggactccacccggcagaagattgtagagctagctcacagcggggcccggccgtgcgacatttcccgaattctgcaggtgtccaacggatgtgtgagtaaaattctgggcaggtattacgagactggctccatcagacccagggcaatcggtggtagtaaaccgagagtagcgactccagaagttgtaagcaaaatagcccagtataagcgggagtgcccgtccatctttgcttgggaaatccgagacagattactgtccgagggggtctgtaccaacgataacataccaagcgtgtcatcaataaacagagttcttcgcaacctggctagcgaaaagcaacagatgggcgcagacggcatgtatgataaactaaggatgttgaacgggcagaccggaagctggggcacccgccctggttggtatccggggacttcggtgccagggcaacctacgcaagatggctgccagcaacaggaaggagggggagagaataccaactccatcagttccaacggagaagattcagatgaggctcaaatgcgacttcagctgaagcggaagctgcaaagaaatagaacatcctttacccaagagcaaattgaggccctggagaaagagtttgagagaacccattatccagatgtgtttgcccgagaaagactagcagccaaaatagatctacctgaagcaagaatacaggtatggttttctaatcgaagggccaaatggagaagagaagaaaaactgaggaatcagagaagacaggccagcaacacacctagtcatattcctatcagcagtagtttcagcaccagtgtctaccaaccaattccacaacccaccacaccggtttcctccttcacatctggctccatgttgggccgaacagacacagccctcacaaacacctacagcgctctgccgcctatgcccagcttcaccatggcaaataacctgcctatgcaagtaagtgcggctggtggtggcctgcataacccaggccccagagaagtgaggagtggctcagggcctgcggacctcattggctgtgtctgcacccttgagagcttttcgcactacagtgattggcttgaccagtcaagtcggagacagtcaatcccatcactttta

SEQ ID NO: 14846 - DNA, 1298 bp, Homo sapiens
  source 1..1298: mol_type = unassigned DNA
gtgtgctggctgcagccacttccctcacccacactctttatctctcactctccagccgctgacagcccattttattgtcaatctctgtctccttcccaggaatctgagaattgctctcacacaccaacccagcaacatccgtggagaaaactctcaccagcaactcctttaaaacaccgtcatttcaaaccattgtggtcttcaagcaacaacagcagcacaaaaaaccccaaccaaacaaaactcttgacagaagctgtgacaaccagaaaggatgcctcataaaggtcacagcggagtgaatcagctcggtggtgtctttgtcaacgggcggccactgccggactccacccggcagaagattgtagagctagctcacagcggggcccggccgtgcgacatttcccgaattctgcaggtgtccaacggatgtgtgagtaaaattctgggcaggtattacgagactggctccatcagacccagggcaatcggtggtagtaaaccgagagtagcgactccagaagttgtaagcaaaatagcccagtataagcgggagtgcccgtccatctttgcttgggaaatccgagacagattactgtccgagggggtctgtaccaacgataacataccaagcgtgtcatcaataaacagagttcttcgcaacctggctagcgaaaagcaacagatgggcgcagacggcatgtatgataaactaaggatgttgaacgggcagaccggaagctggggcacccgccctggttggtatccggggacttcggtgccagggcaacctacgcaagatggctgccagcaacaggaaggagggggagagaataccaactccatcagttccaacggagaagattcagatgaggctcaaatgcgacttcagctgaagcggaagctgcaaagaaatagaacatcctttacccaagagcaaattgaggccctggagaaagagtttgagagaacccattatccagatgtgtttgcccgagaaagactagcagccaaaatagatctacctgaagcaagaatacaggtatggttttctaatcgaagggccaaatggagaagagaagaaaaactgaggaatcagagaagacaggccagcaacacacctagtcatattcctatcagcagtagtttcagcaccagtgtctaccaaccaattccacaacccaccacaccggtttcctccttcacatctggctccatgttgggccgaacagacacagccctcacaaacacctacagcgctctgccgcctatgcccagcttcaccatggcaaataacc

SEQ ID NO: 14847 - DNA, 1202 bp, Homo sapiens
  source 1..1202: mol_type = unassigned DNA
agcacagaaacttgcaccctccgaggactgggagtcccgagtccagcttagggggagtgggggcgcgacccccaacccagaaaccttcacttgaccgctcaagttcgcggcagcagggcgggccgcgccgaatctcggcgtgcgcggagcggggagatgcaggaatctgagaattgctctcacacaccaacccagcaacatccgtggagaaaactctcaccagcaactcctttaaaacaccgtcatttcaaaccattgtggtcttcaagcaacaacagcagcacaaaaaaccccaaccaaacaaaactcttgacagaagctgtgacaaccagaaaggatgcctcataaagggggaagactttaactaggggcgcgcagatgtgtgaggccttttattgtgagagtggacagacatccgagatttcagagccccatattcgagccccgtggaatcccgcggcccccagccagagccagcatgcagaacagtcacagcggagtgaatcagctcggtggtgtctttgtcaacgggcggccactgccggactccacccggcagaagattgtagagctagctcacagcggggcccggccgtgcgacatttcccgaattctgcagacccatgcagatgcaaaagtccaagtgctggacaatcaaaacgtgtccaacggatgtgtgagtaaaattctgggcaggtattacgagactggctccatcagacccagggcaatcggtggtagtaaaccgagagtagcgactccagaagttgtaagcaaaatagcccagtataagcgggagtgcccgtccatctttgcttgggaaatccgagacagattactgtccgagggggtctgtaccaacgataacataccaagcgtgtcatcaataaacagagttcttcgcaacctggctagcgaaaagcaacagatgggcgcagacggcatgtatgataaactaaggatgttgaacgggcagaccggaagctggggcacccgccctggttggtatccggggacttcggtgccagggcaacctacgcaagatggctgccagcaacaggaaggagggggagagaataccaactccatcagttccaacggagaagattcagatgaggctcaaatgcgacttcagctgaagcggaagctgcaaagaaatagaacatcctttacccaagagcaaattgaggccctggagaaag

SEQ ID NO: 14848 - DNA, 650 bp, Homo sapiens
  source 1..650: mol_type = unassigned DNA
gactcccggctctaagccttacttgcggtggccggacttgtctgtggctgaagccgagcccgggctctgactctcacgtctgcactggaggccttggccagtttggacggtgatggaaacatttctggattttagcgtctaagggagcactcaagggctgtaaggtcacagcggagtgaatcagctcggtggtgtctttgtcaacgggcggccactgccggactccacccggcagaagattgtagagctagctcacagcggggcccggccgtgcgacatttcccgaattctgcagacccatgcagatgcaaaagtccaagtgctggacaatcaaaacgtgtccaacggatgtgtgagtaaaattctgggcaggtattacgagactggctccatcagacccagggcaatcggtggtagtaaaccgagagtagcgactccagaagttgtaagcaaaatagcccagtataagcgggagtgcccgtccatctttgcttgggaaatccgagacagattactgtccgagggggtctgtaccaacgataacataccaagcgtaagttcattgagaacatctgccctccctgccctaagcccaatgctctctcctctttacctcctcccaccctctctctccactgtctcttagtctg

SEQ ID NO: 14849 - DNA, 540 bp, Homo sapiens
  source 1..540: mol_type = unassigned DNA
aataaaaggaagttaggagaaaccggaaacgtgggccaggccttgctctgttggagaagcggtgtccccgcaaagtccctgcttgcgctggtcccggccggagcccagatcccccaaacgcctgtcacttctcatcgagttgaggctccggcccccacccgcgccttggtcacagcggagtgaatcagctcggtggtgtctttgtcaacgggcggccactgccggactccacccggcagaagattgtagagctagctcacagcggggcccggccgtgcgacatttcccgaattctgcagacccatgcagatgcaaaagtccaagtgctggacaatcaaaacgtgtccaacggatgtgtgagtaaaattctgggcaggtattacgagactggctccatcagacccagggcaatcggtggtagtaaaccgagagtagcgactccagaagttgtaagcaaaatagcccagtataagcgggagtgcccgtccatctttgcttgggaaatccgagacagattactgtccgagggggtctgtacca

SEQ ID NO: 14850 - DNA, 848 bp, Homo sapiens
  source 1..848: mol_type = unassigned DNA
ccctttgggcttagccaagactgaaagtctccaccaacccggcggggttgggggcttctctccccaagtcactctcagggcagctcctcccctcctcaccccactacgggcctagaagggatggggagaggagcccccaggcctgcagcagggtaggggtggtaaactcgctgttacagggcgcgggagagagcacggtttactgggtctggtaaggaggtgcccaggaattggaaaatccctgccctggcaactgcaattgcttgggtcctgatagtcccaggcccagagcgcttttgatacttatggcccttgtacctccctgctttcctctgcccagaccccgtggggtcccacccaccttcctgttcgtggtgggtgctggtacgcggcagggctagtctagagctccgacctgggagcctggaggcccagcgaaaccaggcccggtttgaggttacggttgaggcacacggcgtcggggctcaactgaactcaaagtgtggaaaggcccgggtcttccagcagcctgccctggccgaaccacacaggcttaaggagggtccccagcaccttatccatctgttttggaaacgccggtcgccccctggtgcttccggggctggtcacagcggagtgaatcagctcggtggtgtctttgtcaacgggcggccactgccggactccacccggcagaagattgtagagctagctcacagcggggcccggccgtgcgacatttcccgaattctgcagacccatgcagatgcaaaagtccaagtgctggacaatcaaaacgtgtccaacggatgtgtgagtaaaattctgggcaggtattacgagactgg

SEQ ID NO: 14851 - DNA, 676 bp, Homo sapiens
  source 1..676: mol_type = unassigned DNA
tgtcacagtacagttaaaggggtgaagatctaaacgccaaaagagaagttaatcacaataagtgaggtttgggataaaaagttgggcttgcccctttcaaagtcccagaaagctgggaggtagatggagagggggccattgggaagtttttttggtgtagggagaggagtagaagataaagggtaagcagagtgttgggttctgggggtcttgtgaagttccttaaggaaggagggagtgtggccctgcagccctcccaaactgctccagcctatgctctccggcaccaggaagttccaaggttcccttcccctggtctccaaacttcagggggaagactttaactaggggcgcgcagatgtgtgaggccttttattgtgagagtggacagacatccgagatttcagagccccatattcgagccccgtggaatcccgcggcccccagccagagccagcatgcagaacagtcacagcggagtgaatcagctcggtggtgtctttgtcaacgggcggccactgccggactccacccggcagaagattgtagagctagctcacagcggggcccggccgtgcgacatttcccgaattctgcagacccatgcagatgcaaaagtccaagtgctggacaatcaaaacgtgtccaacggatgtgtgagtaaaattctgggcag

SEQ ID NO: 14852 - DNA, 1084 bp, Homo sapiens
  source 1..1084: mol_type = unassigned DNA
tttattgtgagagtggacagacatccgagatttcagagccccatattcgagccccgtggaatcccgcggcccccagccagagccagcatgcagaacagggagggcggagttcagcggcggaaataaagcgagcagtggctggtgcgaaccgactcccggctctaagccttacttgcggtggccggacttgtctgtggctgaagccgagcccgggctctgactctcacgtctgcactggaggtgcggaaacctggactggggttcaccagccacatactggctgctctggttgttctctcctcttccttcttctattctaaccaaacaaaacccaactcgatgcttgtgccaggccttggccagtttggacggtgatggaaacatttctggattttagcgtctaagggagcactcaagggctgtaaggtttgctatcactgtcccaacactgcagagaccttgaaggttcagtgtgggatctgtagaacccatggtttgcggtgacactcagaggggatctttgggagatttatagagccggttcttagcgctttgtgggttcagaggctggctgcagtgtttatgaagaggggcagtgggctggggacactgctggggttatggctgtagtgaggtccatgtgtacttgttccttggcatgtgtctgactctgtgttgctgctgcagtacagtgggcaggggcacggttgcttggactgggctgcccgatgtctggcatggctggtggtcctgttgtcctttatttgatcgatagcagggaactgaccgccgaggttggcacaggttggcagggggatgaggatgcattgtggttgtctcctcctcctctccttcttcctcttccccttcctcctctcctttctgttcttgttctccctcatcttcctcttccttcttctccctcttcttcctcttcactctgctctcttctcttcttttcccctttcctctcctctccctttcctcaggtcacagcggagtgaatcagctcggtggtgtctttgtcaacgggcggccactgccggactccacccggcagaagattgtagagctagctcacagc

SEQ ID NO: 14853 - DNA, 487 bp, Homo sapiens
  source 1..487: mol_type = unassigned DNA
ataggtgtgctggctgcagccacttccctcacccacactctttatctctcactctccagccgctgacagcccattttattgtcaatctctgtctccttcccaggaatctgagaattgctctcacacaccaacccagcaacatccgtggagaaaactctcaccagcaactcctttaaaacaccgtcatttcaaaccattgtggtcttcaagcaacaacagcagcacaaaaaaccccaaccaaacaaaactcttgacagaagctgtgacaaccagaaaggatgcctcataaagggggaagactttaactaggggcgcgcagatgtgtgaggccttttattgtgagagtggacagacatccgagatttcagagccccatattcgagccccgtggaatcccgcggcccccagccagagccagcatgcagaacagtaagtgcctctggtctttctgggacttcgggctcggggtgcgcggacccgagggtca

SEQ ID NO: 14854 - DNA, 524 bp, Homo sapiens
  source 1..524: mol_type = unassigned DNA
atcattgacatttaaactctggggcaggtcctcgcgtagaacgcggctgtcagatctgccacttcccctgccgagcggcggtgagaagtgtgggaaccggcgctgccaggctcacctgcctccccgccctccgctcccaggaatctgagaattgctctcacacaccaacccagcaacatccgtggagaaaactctcaccagcaactcctttaaaacaccgtcatttcaaaccattgtggtcttcaagcaacaacagcagcacaaaaaaccccaaccaaacaaaactcttgacagaagctgtgacaaccagaaaggatgcctcataaagggggaagactttaactaggggcgcgcagatgtgtgaggccttttattgtgagagtggacagacatccgagatttcagagccccatattcgagccccgtggaatcccgcggcccccagccagagccagcatgcagaacagtaagtgcctctggtctttctgggacttcgggctcggggtgcgcggacccgagggtca

SEQ ID NO: 14855 - DNA, 875 bp, Homo sapiens
  source 1..875: mol_type = unassigned DNA
tcagcactttccctaagtcaagaagagtctagcgtacccttcggctgcttcatttcagcctccctgcctcagctcttcagccctattccccctcgccctgtcctggggtgtgtacagcagcccaggccttccttctccttcccggctccgtggcccgaagccgccgagagagctcgggacagcgcaggaccaggcagccgctcgctctcctgtcaccttaactgcaggctccgaggggcgcctttggagtgtactgaggtgtgtcctaatcgtgcggcattcaacaaatggacttctggtgtgtggtcagaagagaaaagccatttacttactttcctccccggttttctggcaacagctgaaggggagctgcctccgtggactgagcagacccaggagagggagtcgtggtgcggagacacacgcaccacacacagatgaccggtggcacacacgacacacgctgacataccgacatcgccagtgggacacacacacacacacacacacacacacacacacacacagagagagagagagaatccctcccagcattggtcatccgcccccccacccaggcttccactccccctcccctcttatctcccctggcttcccctcctctcgggcgctgcgaaaagcagccgcacttagtcaacaaatggcacgtgggagaagttggtgagtgtttggtgaggactcttcagggcttttcacaagaaccctctgtacacaaaggggaagactttaactaggggcgcgcagatgtgtgaggccttttattgtgagagtggacagacatccgagatttcagagccccatattcgagccccgtggaatcccgcggcccccagccagagccagcatgcagaaca

SEQ ID NO: 14856 - DNA, 649 bp, Homo sapiens
  source 1..649: mol_type = unassigned DNA
atttcccgctctggttcaggcgcaggaggaagtgttttgctggaggatgatgacagaggtcaggcttcgctaatgggccagtgaggagcggtggaggcgaggccgggcgccggcacacacacattaacacacttgagccatcaccaatcagcataggtgtgctggctgcagccacttccctcacccacactctttatctctcactctccagccgctgacagcccattttattgtcaatctctgtctccttcccaggaatctgagaattgctctcacacaccaacccagcaacatccgtggagaaaactctcaccagcaactcctttaaaacaccgtcatttcaaaccattgtggtcttcaagcaacaacagcagcacaaaaaaccccaaccaaacaaaactcttgacagaagctgtgacaaccagaaaggatgcctcataaagctccctaagccattctggacgtttaactcgaacttgggaaggttttagaaggggctgggagcagaaaatgaaatgaaaggcaaagagcttgagcctgggggaagactttaactaggggcgcgcagatgtgtgaggccttttattgtgagagtggacagacatccgagatttcagagccccatattcgagccccgtggaatcccgcg

SEQ ID NO: 14857 - DNA, 417 bp, Homo sapiens
  source 1..417: mol_type = unassigned DNA
agagggaagagcgagctagcgcgagccgggaaggaagccaccaggccaaggcggtggaacgcgcgctccgagggagctcagagccgagcgggaggactgtcagcttccacccagcccccgggctcttgcccccaactccactggagcgctgagctcggaacttgaaaactctctgctccccaggcttcccccgactctcatctcccttgccttgcggaggctggggctcttccctgttctccggccccctgcgcttggtgggtatttttccttgttttcctctgatccagtctcaccaggtgttgggatttcagcaagttttgaggtgcagagttggtttgcttttttgtttgttttactccgaatccccttatgtttttcttggtaaggccttgaaaataaatctgtatgaaagca

SEQ ID NO: 14858 - DNA, 412 bp, Homo sapiens
  source 1..412: mol_type = unassigned DNA
cattgtggtcttcaagcaacaacagcagcacaaaaaaccccaaccaaacaaaactcttgacagaagctgtgacaaccagaaaggatgcctcataaagcgaaagcccgcgtcggagggcgactgccggcgagcgggagcggcgcagggctcggggcgggcggccagctcagccccagcgccagcgccagcgccagcgcgggctgagctcgcgggaagaagggagactccaggcgcgacagcagccgcggctcctagccccagcgtcgcccaatgctcccgacccgcgggaaaagacgaagaggctctgtggtgcccaaggccctggaacggccgcagagagcaaccgctgccggctgctttgtccagcccgaggcccagcgaacgcgcagagagcgggcgctccgaggactcg

SEQ ID NO: 14859 - DNA, 532 bp, Homo sapiens
  source 1..532: mol_type = unassigned DNA
actgggagtcccgagtccagcttagggggagtgggggcgcgacccccaacccagaaaccttcacttgaccgctcaagttcgcggcagcagggcgggccgcgccgaatctcggcgtgcgcggagcggggagatgcaggcgagcgccagagcccgggctcgggggccctgcgccggggagaggagccgggacccaccggcggagccgaaaacaagtgtattcatattcaaacaaacggaccaattgcaccaggcgcaggaggaagtgttttgctggaggatgatgacagaggtcaggcttcgctaatgggccagtgaggagcggtggaggcgaggccgggcgccggcacacacacattaacacacttgagccatcaccaatcagcataggaatctgagaattgctctcacacaccaacccagcaacatccgtggagaaaactctcaccagcaactcctttaaaacaccgtcatttcaaaccattgtggtcttcaagcaacaacagcagcacaaaaaaccccaaccaaacaaaac

SEQ ID NO: 14860 - DNA, 368 bp, Homo sapiens
  source 1..368: mol_type = unassigned DNA
ctctggggcaggtcctcgcgtagaacgcggctgtcagatctgccacttcccctgccgagcggcggtgagaagtgtgggaaccggcgctgccaggctcacctgcctccccgccctccgctcccagcattggtcatccgcccccccacccaggcttccactccccctcccctcttatctcccctggcttcccctcctctcgggcgctgcgaaaagcagccgcacttagtcaacaaatggcacgtgggagaagttggaatctgagaattgctctcacacaccaacccagcaacatccgtggagaaaactctcaccagcaactcctttaaaacaccgtcatttcaaaccattgtggtcttcaagcaacaaca

SEQ ID NO: 14861 - DNA, 3995 bp, Homo sapiens
  source 1..3995: mol_type = unassigned DNA
ctctctctctttctccaagtattgagagcgcgtgggagcataggcgcatgcgcgctcgtggggtgcgcggtagcaacagaggactcgacccggctggagctccggagagcgcgcgtgcgccgtcacgagctcggcgctgccggggccgcggtgtggaagcgagtattcgaccgccgtgcgggccgcggggatgttccgaaaggcccggcgggtgaacgtgcgcaagcggaacgactccgaagaggaagagcgggaacgcgatgaggagcaggagccgccgccgttgttgccgccgccgggcacgggcgaagaggcgggccccggtggcggcgacagggcccctggcggggagtcgctgctgggcccggggccgtcgccgccttccgcgctgaccccgggcctcggggctgaggccgggggcggcttccccggcggcgcggagcccggcaacgggctgaagccgcgcaagaggcctcgcgagaacaaagaggtgccccgggccagcctgctcagcttccaggacgaggaggaagaaaatgaagaagttttcaaagtgaagaaatcaagttatagcaaaaagatagtaaaattgctcaagaaggaatataaagaagatcttgaaaaatcgaagattaagacagaactcaactcatcagctgaaagtgaacaacctttggacaaaacaggacatgttaaggatacaaatcaagaagatggagttatcatcagtgaacatggtgaagatgaaatggatatggaaagtgaaaaagaggaagaaaagccaaagactggtggagctttttcaaatgctttatcttcattgaatgttcttcgtccaggagaaattccagatgcagcttttatacatgctgcaaggaaaaagcgccaaatggcccgagaattgggagatttcactcctcatgataatgagcctggtaaaggccgccttgttagagaagatgagaatgatgccagtgatgatgaagatgacgatgagaaacgccggatagttttttctgtgaaagaaaagtcacaaagacaaaaaattgctgaggaaataggaattgaggggagtgatgatgatgctttagtaactggagaacaggatgaagagctcagccgatgggaacaggagcagataaggaaaggaattaatatccctcaggttcaagccagtcaacccgcagaagtgaatatgtactaccagaacacttaccagacaatgccttacggctcatcctatggcattccttatagttatacggcctatggatcatcagatgccaaatctcaaaaaacagataatacagtccctttcaaaactcccagtaatgagatgactcccgttactattgatttggtaaagaaacagcttaaagacaggttggactccatgaaagaattgcacaaaacaaatcgacagcagcatgagaaacatctgcaaagccgagtggactctaccagggctattgaaagattagaagggtcttctgggggtattggtgaacggtataaatttttgcaagaaatgcgagggtatgtccaagacttgcttgagtgtttcagtgaaaaggtgccactgattaatgaacttgaatcagcaatacatcagctgtacaaacagcgagcttcccgccttgtccaaagacgacaagatgatattaaagatgaatcttcggagttttcaagccattcaaacaaagctctgatggcaccaaatcttgactcctttggacgcgatcgggcactgtatcaagagcatgcaaaacgtcgcattgcagagcgggaggccaggaggactcgtcgtagacaagccagagaacaaaccggtaagatggcagatcaccttgaaggcctttccagtgatgatgaagaaacttctacagatattactaatttcaatctggaaaaagatcgaatttcaaaagaatccggcaaagtttttgaagatgtccttgaaagtttctattcaattgactgtattaaatcacagtttgaagcatggcgttcaaaatactacacatcctacaaagatgcttacattggcctttgtttgccaaaattattcaaccccctcatacgacttcagctcctcacttggactcctcttgaggcaaaatgtcgtgactttgagaatatgctgtggtttgaatctttgctgttttatggttgtgaagaacgagagcaagaaaaagatgatgtagatgttgccctactacctaccattgtggaaaaggtgattcttcctaaactaacagtgatagctgaaaatatgtgggaccctttttctacaacacagacttcaagaatggtgggaattacactaaaattaatcaatggatatccttcagtagtgaatgcagaaaataaaaatacacaggtatacctaaaggcacttttattgagaatgagaagaactttagatgatgatgtatttatgcccttatatcccaaaaatgtcttagaaaataaaaattctgggccttacttgttttttcaacgacagttttggtcttcagttaagctgttaggcaattttcttcagtggtatggcattttctcaaataaaactctgcaagagttatcaatagatggtttattaaatcgatatattctcatggcttttcagaattcagaatatggagatgacagcatcaaaaaagcccaaaatgtaatcaattgtttccccaaacaatggttcatgaatctgaaaggagaaaggactatttctcagttagaaaacttttgccgataccttgtacacttagcggatacaatttatagaaatagtatcgggtgttctgatgtggaaaaaagaaatgcaagggaaaacataaaacagatagtaaaactccttgcaagtgttcgagctttggatcatgctatgtctgttgcaagtgaccacaatgtgaaagaatttaagtctttgatcgaaggaaaatagatctatgagactgaaaaacctatttgcttgattaccattcccaatgtgtaaattttgtatatatgtaaagtttcttaaactgtaaaatagcaattcttgttttaatacaaaaaacattatattcaatactgtgtccttaaatgatatttcttcagaatgaaaggaattcagattatttctaggagtctatgaatgttttctttactgcctgtcatactttgtttactgaagtattttgtatggtcatttaaattaaccctctcagttaattgtcccctgtaaacgatgtgtgcagtgtaaattgtgtaattatgcatatatatatttataccaccatggacttactttcacactggaaatttgtggtgtttttccacagaggaagccttttaacagcagaaaattatccggtagcaaattgtcttagggaaattactacactgttgtaacaaaagggctggcaagtgactaaatgttcattaccttttggttagcgttgctatcactgtagctgtgctgccttaacattgagagttgagttgtggacttagtcattgagtgaatgttgaactttcttccttgaatcagcgttagagtcaaatgtgggtttaatgtgaatgctaaatgaatatgcaacatagtttcaaatggaacatagaaatttcacttttgaaaataataaacccacaacctaattgcatggttttgggctgaccgtcctgtctcattcatgattttactccctgcccagcttgcagatacatgcatttgaattttagtagtctgtcatatttaaaatcccacatatgtgagttaaatatgcaataaagaatacgccttgctgattagccacacccaggcaatttaatatccatggtcttctataatgtttataccacattgtaaatattcagagaacttgttttaaagtttatgctttctgattctgtgattttcaaaagaggaatttttttggaaattaaggactatcgtttgataattatatatgtaattaagatttagccaagcattaaattaatttttaaatata

SEQ ID NO: 14862 - DNA, 3879 bp, Homo sapiens
  source 1..3879: mol_type = unassigned DNA
atattctgtatgatgccagcttaggtgggtagttcctacagtacaggaagcttaacaatctctaggattaaaagataaaagaatgcctcaggctcatttatctttagtacttcatggtttaaaaaaaaaaatgagggcatggggaagtgtaaatggcaatgttgtggcagtaattgctaaaaaaaaatcagattataataaattttaatgatagagtctctggactcagctatcaaggataatcattacagatttggggacattgttgcccatggtgtggcatattaaagaacaaaataactccattagtttgacctttctgtgaacatttgctacttttgcaatggaatcatgcaagtatataaaattgcttttattacagacatctctgtattccacctgcctttttttattttccatttgcagtctgttcagttcaggaagctgctataacacttggtgccagtgttcccaaactctaaataatgtgttttccatttgcactaaccatcaggaaactagaatttctggtttcctcaggtatgtgtagtggtcattagtgttacgtgaaagtctcatagcatttgattataacataaggtatttagaaaaagaaagttttctgttttaagttagctctcatgttcttttgtattctatatgaatcaagtaaatgctttagggatattaacctggaaaaattattgactttgtaagttcacaattcatgtaaagaaatttttataaaatatgggagaatttaaacatttgacaggaagagaacaactttttaaatttgagatatattgagttcagagaggttagtgatagctggaaattttattcgccctagtaattattttgtttacattaaaaaatctgtaataaagctacaaaatagtaaacagattactgtaacgtacttggtacatatgagtggcagagcaactgaaatgtccaaaattggagaattagcagactcttgttcttacctacttatagagccattgcacttttttggtaccacacagtgataatgttttactttgaactacaaaaatcgcaatgcagataatgctgctggaaaattaaaaatagatattaaaaagacttctaagtacttaaatattctctaagggaaaagctctaaaattgttgacatttctttacttgttctatgaatactgaagtgttacatttcttaactaatgtttgctccaataactaggcactggacattatagctctatgcatggattaaaagaagaagtgtcgtttcccaaacataaaacagaatttgctacttgtgtgctgttggggattcatgattattctgtccatagagagggtactttttcagaaatccggaaatagtatggaaccctcaaataaataagcagctgaggagtttggtgttacggagtgtgttgtatttttacaggtgccactgattaatgaacttgaatcagcaatacatcagctgtacaaacagcgagcttcccgccttgtccaaagacgacaagatgatattaaagatgaatcttcggagttttcaagccattcaagtcagtccatcttgaagacaaagctctgatggcaccaaatcttgactcctttggacgcgatcgggcactgtatcaagagcatgcaaaacgtcgcattgcagagcgggaggccaggaggactcgtcgtagacaagccagagaacaaaccggtaagatggcagatcaccttgaaggcctttccagtgatgatgaagaaacttctacagatattactaatttcaatctggaaaaagatcgaatttcaaaagaatccggcaaagtttttgaagatgtccttgaaagtttctattcaattgactgtattaaatcacagtttgaagcatggcgttcaaaatactacacatcctacaaagatgcttacattggcctttgtttgccaaaattattcaaccccctcatacgacttcagctcctcacttggactcctcttgaggcaaaatgtcgtgactttgagaatatgctgtggtttgaatctttgctgttttatggttgtgaagaacgagagcaagaaaaagatgatgtagatgttgccctactacctaccattgtggaaaaggtgattcttcctaaactaacagtgatagctgaaaatatgtgggaccctttttctacaacacagacttcaagaatggtgggaattacactaaaattaatcaatggatatccttcagtagtgaatgcagaaaataaaaatacacaggtatacctaaaggcacttttattgagaatgagaagaactttagatgatgatgtatttatgcccttatatcccaaaaatgtcttagaaaataaaaattctgggccttacttgttttttcaacgacagttttggtcttcagttaagctgttaggcaattttcttcagtggtatggcattttctcaaataaaactctgcaagagttatcaatagatggtttattaaatcgatatattctcatggcttttcagaattcagaatatggagatgacagcatcaaaaaagcccaaaatgtaatcaattgtttccccaaacaatggttcatgaatctgaaaggagaaaggactatttctcagttagaaaacttttgccgataccttgtacacttagcggatacaatttatagaaatagtatcgggtgttctgatgtggaaaaaagaaatgcaagggaaaacataaaacagatagtaaaactccttgcaagtgttcgagctttggatcatgctatgtctgttgcaagtgaccacaatgtgaaagaatttaagtctttgatcgaaggaaaatagatctatgagactgaaaaacctatttgcttgattaccattcccaatgtgtaaattttgtatatatgtaaagtttcttaaactgtaaaatagcaattcttgttttaatacaaaaaacattatattcaatactgtgtccttaaatgatatttcttcagaatgaaaggaattcagattatttctaggagtctatgaatgttttctttactgcctgtcatactttgtttactgaagtattttgtatggtcatttaaattaaccctctcagttaattgtcccctgtaaacgatgtgtgcagtgtaaattgtgtaattatgcatatatatatttataccaccatggacttactttcacactggaaatttgtggtgtttttccacagaggaagccttttaacagcagaaaattatccggtagcaaattgtcttagggaaattactacactgttgtaacaaaagggctggcaagtgactaaatgttcattaccttttggttagcgttgctatcactgtagctgtgctgccttaacattgagagttgagttgtggacttagtcattgagtgaatgttgaactttcttccttgaatcagcgttagagtcaaatgtgggtttaatgtgaatgctaaatgaatatgcaacatagtttcaaatggaacatagaaatttcacttttgaaaataataaacccacaacctaattgcatggttttgggctgaccgtcctgtctcattcatgattttactccctgcccagcttgcagatacatgcatttgaattttagtagtctgtcatatttaaaatcccacatatgtgagttaaatatgcaataaagaatacgccttgctgattagccacacccaggcaatttaatatccatggtcttctataatgtttataccacattgtaaatattcagagaacttgttttaaagtttatgctttctgattctgtgattttcaaaagaggaatttttttggaaattaaggactatcgtttgataattatatatgtaattaagatttagccaagcattaaattaatttttaaatat

SEQ ID NO: 14863 - DNA, 2920 bp, Homo sapiens
  source 1..2920: mol_type = unassigned DNA
cgccgtgcgggccgcggggatgttccgaaaggcccggcgggtgaacgtgcgcaagcggaacgactccgaagaggaagagcgggaacgcgatgaggagcaggagccgccgccgttgttgccgccgccgggcacgggcgaagaggcgggccccggtggcggcgacagggcccctggcggggagtcgctgctgggcccggggccgtcgccgccttccgcgctgaccccgggcctcggggctgaggccgggggcggcttccccggcggcgcggagcccggcaacgggctgaagccgcgcaagaggcctcgcgagaacaaagaggtgccccgggccagcctgctcagcttccaggacgaggaggaagaaaatgaagaagttttcaaagtgaagaaatcaagttatagcaaaaagatagtaaaattgctcaagaaggaatataaagaagatcttgaaaaatcgaagattaagacagaactcaactcatcagctgaaagtgaacaacctttggacaaaacaggacatgttaaggatacaaatcaagaagatggagttatcatcagtgaacatggtgaagatgaaatggatatggaaagtgaaaaagaggaagaaaagccaaagactggtggagctttttcaaatgctttatcttcattgaatgttcttcgtccaggagaaattccagatgcagcttttatacatgctgcaaggaaaaagcgccaaatggcccgagaattgggagatttcactcctcatgataatgagcctggtaaaggccgccttgttagagaagatgagaatgatgccagtgatgatgaagatgacgatgagaaacgccggatagttttttctgtgaaagaaaagtcacaaagacaaaaaattgctgaggaaataggaattgaggggagtgatgatgatgctttagtaactggagaacaggatgaagagctcagccgatgggaacaggagcagataaggaaaggaattaatatccctcaggttcaagccagtcaacccgcagaagtgaatatgtactaccagaacacttaccagacaatgccttacggctcatcctatggcattccttatagttatacggcctatggatcatcagatgccaaatctcaaaaaacagataatacagtccctttcaaaactcccagtaatgagatgactcccgttactattgatttggtaaagaaacagcttaaagacaggttggactccatgaaagaattgcacaaaacaaatcgacagcagcatgagaaacatctgcaaagccgagtggactctaccagggctattgaaagattagaagggtcttctgggggtattggtgaacggtataaatttttgcaagaaatgcgagggtatgtccaagacttgcttgagtgtttcagtgaaaaggtgccactgattaatgaacttgaatcagcaatacatcagctgtacaaacagcgagcttcccgccttgtccaaagacgacaagatgatattaaagatgaatcttcggagttttcaagccattcaagtcagtccatcttgaagacaaagctctgatggcaccaaatcttgactcctttggacgcgatcgggcactgtatcaagagcatgcaaaacgtcgcattgcagagcgggaggccaggaggactcgtcgtagacaagccagagaacaaaccggtaagatggcagatcaccttgaaggcctttccagtgatgatgaagaaacttctacagatattactaatttcaatctggaaaaagatcgaatttcaaaagaatccggcaaagtttttgaagatgtccttgaaagtttctattcaattgactgtattaaatcacagtttgaagcatggcgttcaaaatactacacatcctacaaagatgcttacattggcctttgtttgccaaaattattcaaccccctcatacgacttcagctcctcacttggactcctcttgaggcaaaatgtcgtgactttgagaatatgctgtggtttgaatctttgctgttttatggttgtgaagaacgagagcaagaaaaagatgatgtagatgttgccctactacctaccattgtggaaaaggtgattcttcctaaactaacagtgatagctgaaaatatgtgggaccctttttctacaacacagacttcaagaatggtgggaattacactaaaattaatcaatggatatccttcagtagtgaatgcagaaaataaaaatacacaggtatacctaaaggcacttttattgagaatgagaagaactttagatgatgatgtatttatgcccttatatcccaaaaatgtcttagaaaataaaaattctgggccttacttgttttttcaacgacagttttggtcttcagttaagctgttaggcaattttcttcagtggtatggcattttctcaaataaaactctgcaagagttatcaatagatggtttattaaatcgatatattctcatggcttttcagaattcagaatatggagatgacagcatcaaaaaagcccaaaatgtaatcaattgtttccccaaacaatggttcatgaatctgaaaggagaaaggactatttctcagttagaaaacttttgccgataccttgtacacttagcggatacaatttatagaaatagtatcgggtgttctgatgtggaaaaaagaaatgcaagggaaaacataaaacagatagtaaaactccttgcaagtgttcgagctttggatcatgctatgtctgttgcaagtgaccacaatgtgaaagaatttaagtctttgatcgaaggaaaatagatctatgagactgaaaaacctatttgcttgattaccattcccaatgtgtaaattttgtatatatgtaaagtttcttaaactgtaaaatagcaattcttgttttaatacaaaaaacattatattcaatact

SEQ ID NO: 14864 - DNA, 2277 bp, Homo sapiens
  source 1..2277: mol_type = unassigned DNA
aggaccaacctgagcagcagaaccaaagggactgaggaaacagacagtgctggtacaagtatgcaagttttctgtaaacagattactttcaaacagttgggagccccagggagataatagaaggtatcctactcaacaggagtatatagaatgctgtagaagaggaatattgtaagaacaagaactatctcttgaaaactaaaaatatgataactgaaatataaatttaaataggattggaagctaaagctaggaaattaccctagaatgttttttgagaaatggaaaatacgaagaccaaaaaaataaaataaaactatgctgtgaaagagaaagattagcatttgagaaggcggaagttggtcctgctcagatgcggttttcagatgccttattctaaaaatagtgatagaaaacaaatttctacaaagcaaaattacaataaatttattaaactcttgcaacaaagctgttttcttatgtcttcctatgttttcctgctgtcattcaatgtgatgctgaagttcttcctccttaaaaatgtaatatttttccctttgcacaggtaatttagagttttaatttatttggtcatcatgatagctattcctgatagctgtcctgttacttagacataaaaatagtgagtaagcccaattacatatttgtagggttgttgaactcttaaaaagaaatcacttctttaatttttctactttttaaaatgggaacgcagaataataatgaaatttgttctaaaccaaaaacctacctggtttaccagttattgcagaatcttgccgttgagattagcaagcagtctgtcgtaatggcttattctgtgcaaactctttcctcaagattgttgaaagatggcttttaattttaactgttgttgttttgcagacaaagctctgatggcaccaaatcttgactcctttggacgcgatcgggcactgtatcaagagcatgcaaaacgtcgcattgcagagcgggaggccaggaggactcgtcgtagacaagccagagaacaaaccggtaagatggcagatcaccttgaaggcctttccagtgatgatgaagaaacttctacagatattactaatttcaatctggaaaaagatcgaatttcaaaagaatccggcaaagtttttgaagatgtccttgaaagtttctattcaattgactgtattaaatcacagtttgaagcatggcgttcaaaatactacacatcctacaaagatgcttacattggcctttgtttgccaaaattattcaaccccctcatacgacttcagctcctcacttggactcctcttgaggcaaaatgtcgtgactttgagaatatgctgtggtttgaatctttgctgttttatggttgtgaagaacgagagcaagaaaaagatgatgtagatgttgccctactacctaccattgtggaaaaggtgattcttcctaaactaacagtgatagctgaaaatatgtgggaccctttttctacaacacagacttcaagaatggtgggaattacactaaaattaatcaatggatatccttcagtagtgaatgcagaaaataaaaatacacaggtatacctaaaggcacttttattgagaatgagaagaactttagatgatgatgtatttatgcccttatatcccaaaaatgtcttagaaaataaaaattctgggccttacttgttttttcaacgacagttttggtcttcagttaagctgttaggcaattttcttcagtggtatggcattttctcaaataaaactctgcaagagttatcaatagatggtttattaaatcgatatattctcatggcttttcagaattcagaatatggagatgacagcatcaaaaaagcccaaaatgtaatcaattgtttccccaaacaatggttcatgaatctgaaaggagaaaggactatttctcagttagaaaacttttgccgataccttgtacacttagcggatacaatttatagaaatagtatcgggtgttctgatgtggaaaaaagaaatgcaagggaaaacataaaacagatagtaaaactccttgcaagtgttcgagctttggatcatgctatgtctgttgcaagtgaccacaatgtgaaagaatttaagtctttgatcgaaggaaaatagatctatgagactgaaaaacctatttgcttgattaccattcccaatgtgtaaattttgtatatatgtaaagtttcttaaactgtaaaatagcaattcttgttttaatacaaaaaacattatattc

SEQ ID NO: 14865 - DNA, 2564 bp, Homo sapiens
  source 1..2564: mol_type = unassigned DNA
atgttccgaaaggcccggcgggtgaacgtgcgcaagcggaacgactccgaagaggaagagcgggaacgcgatgaggagcaggagccgccgccgttgttgccgccgccgggcacgggcgaagaggcgggccccggtggcggcgacagggcccctggcggggagtcgctgctgggcccggggccgtcgccgccttccgcgctgaccccgggcctcggggctgaggccgggggcggcttccccggcggcgcggagcccggcaacgggctgaagccgcgcaagaggcctcgcgagaacaaagaggtgccccgggccagcctgctcagcttccaggacgaggaggaagaaaatgaagaagttttcaaagtgaagaaatcaagttatagcaaaaagatagtaaaattgctcaagaaggaatataaagaagatcttgaaaaatcgaagattaagacagaactcaactcatcagctgaaagtgaacaacctttggacaaaacaggacatgttaaggatacaaatcaagaagatggagttatcatcagtgaacatggtgaagatgaaatggatatggaaagtgaaaaagaggaagaaaagccaaagactggtggagctttttcaaatgctttatcttcattgaatgttcttcgtccaggagaaattccagatgcagcttttatacatgctgcaaggaaaaagcgccaaatggcccgagaattgggagatttcactcctcatgataatgagcctggtaaaggccgccttgttagagaagatgagaatgatgccagtgatgatgaagatgacgatgagaaacgccggatagttttttctgtgaaagaaaagtcacaaagacaaaaaattgctgaggaaataggaattgaggggagtgatgatgatgctttagtaactggagaacaggatgaagagctcagccgatgggaacaggagcagataaggaaaggaattaatatccctcaggttcaagccagtcaacccgcagaagtgaatatgtactaccagaacacttaccagacaatgccttacggctcatcctatggcattccttatagttatacggcctatggatcatcagatgccaaatctcaaaaaacagataatacagtccctttcaaaactcccagtaatgagatgactcccgttactattgatttggtaaagaaacagcttaaagacaggttggactccatgaaagaattgcacaaaacaaatcgacagcagcatgagaaacatctgcaaagccgagtggactctaccagggctattgaaagattagaagggtcttctgggggtattggtgaacggtataaatttttgcaagaaatgcgagggtatgtccaagacttgcttgagtgtttcagtgaaaaggtgccactgattaatgaacttgaatcagcaatacatcagctgtacaaacagcgagcttcccgccttgtccaaagacgacaagatgatattaaagatgaatcttcggagttttcaagccattcaaacaaagctctgatggcaccaaatcttgactcctttggacgcgatcgggcactgtatcaagagcatgcaaaacgtcgcattgcagagcgggaggccaggaggactcgtcgtagacaagccagagaacaaaccggtaagatggcagatcaccttgaaggcctttccagtgatgatgaagaaacttctacagatattactaatttcaatctggaaaaagatcgaatttcaaaagaatccggcaaagtttttgaagatgtccttgaaagtttctattcaattgactgtattaaatcacagtttgaagcatggcgttcaaaatactacacatcctacaaagatgcttacattggcctttgtttgccaaaattattcaaccccctcatacgacttcagctcctcacttggactcctcttgaggcaaaatgtcgtgactttgagaatatgctgtggtttgaatctttgctgttttatggttgtgaagaacgagagcaagaaaaagatgatgtagatgttgccctactacctaccattgtggaaaaggtgattcttcctaaactaacagtgatagctgaaaatatgtgggaccctttttctacaacacagacttcaagaatggtgggaattacactaaaattaatcaatggatatccttcagtagtgaatgcagaaaataaaaatacacaggtatacctaaaggcacttttattgagaatgagaagaactttagatgatgatgtatttatgcccttatatcccaaaaatgtcttagaaaataaaaattctgggccttacttgttttttcaacgacagttttggtcttcagttaaggtcataaaacccccattccagagagggtcctgccccatacccagaaggaaagaatgctgctcagagaggccaagaagaatctggacggacaggccttgtgttgtcttctcttgagcagtagatcatacctttttgtccagtcatgtttctgcatgcctgtacatatttcgttaaacctaaacatagtagacaatttctcctccatctttgggtcttcattctgaaggctg

SEQ ID NO: 14866 - DNA, 473 bp, Homo sapiens
  source 1..473: mol_type = unassigned DNA
cagttttggtcttcagttaaggagaaagtgatttctgagttccaaagtaaggtccatcgtactcaacgaaatgcctgactaagccacaattaattttttcagcaagtagactacagtagtcctcccttcccagaagatttccttccaccctgaggaagtgatatttagatcattcgacctggagaaaaaatagaagttagccctgaggtgaaagagagcaggctacactggaggcgctgaagaaagcataggacagctggagtgagcaagtcataaaacccccattccagagagggtcctgccccatacccagaaggaaagaatgctgctcagagaggccaagaagaatctggacggacaggccttgtgttgtcttctcttgagcagtagatcatacctttttgtccagtcatgtttctgcatgcctgtacatatttcgttaaacctaaacatagtagacaatttctcctcca

SEQ ID NO: 14867 - DNA, 339 bp, Homo sapiens
  source 1..339: mol_type = unassigned DNA
tacaaacagcgagcttcccgccttgtccaaagacgacaagatgatattaaagatgaatcttcggagttttcaagccattcaagtcagtccatcttgaagacaaagctctgatggcaccaaatcttgactcctttggacgcgatcgggcactgtatcaagagcatgcaaaacgtcgcattgcagagcgggaggccaggagatcgaatttcaaaagaatccggcaaagtttttgaagatgtccttgaaagtttctattcaattgactgtattaaatcacagtttgaagcatggcgttcaaaatactacacatcctacaaagatgcttacattggcctttgt

SEQ ID NO: 14868 - DNA, 1410 bp, Homo sapiens
  source 1..1410: mol_type = unassigned DNA
atgttccgaaaggcccggcgggtgaacgtgcgcaagcggaacgactccgaagaggaagagcgggaacgcgatgaggagcaggagccgccgccgttgttgccgccgccgggcacgggcgaagaggcgggccccggtggcggcgacagggcccctggcggggagtcgctgctgggcccggggccgtcgccgccttccgcgctgaccccgggcctcggggctgaggccgggggcggcttccccggcggcgcggagcccggcaacgggctgaagccgcgcaagaggcctcgcgagaacaaagaggtgccccgggccagcctgctcagcttccaggacgaggaggaagaaaatgaagaagttttcaaagtgaagaaatcaagttatagcaaaaagatagtaaaattgctcaagaaggaatataaagaagatcttgaaaaatcgaagattaagacagaactcaactcatcagctgaaagtgaacaacctttggacaaaacaggacatgttaaggatacaaatcaagaagatggagttatcatcagtgaacatggtgaagatgaaatggatatggaaagtgaaaaagaggaagaaaagccaaagactggtggagctttttcaaatgctttatcttcattgaatgttcttcgtccaggagaaattccagatgcagcttttatacatgctgcaaggaaaaagcgccaaatggcccgagaattgggagatttcactcctcatgataatgagcctggtaaaggccgccttgttagagaagatgagaatgatgccagtgatgatgaagatgacgatgagaaacgccggatagttttttctgtgaaagaaaagtcacaaagacaaaaaattgctgaggaaataggaattgaggggagtgatgatgatgctttagtaactggagaacaggatgaagagctcagccgatgggaacaggagcagataaggaaaggaattaatatccctcaggttcaagccagtcaacccgcagaagtgaatatgtactaccagaacacttaccagacaatgccttacggctcatcctatggcattccttatagttatacggcctatggatcatcagatgccaaatctcaaaaaacagataatacagtccctttcaaaactcccagtaatgagatgactcccgttactattgatttggtaaagaaacagcttaaagacaggttggactccatgaaagaattgcacaaaacaaatcgacagcagcatgagaaacatctgcaaagccgagtggactctaccagggctattgaaagattagaagggtcttctgggggtattggtgaacggtataaatttttgcaagaaatgcgagggtatgtccaagacttgcttgagtgtttcagtgaaaagtctgttcagttcaggaagctgctataa

SEQ ID NO: 14869 - DNA, 1692 bp, Homo sapiens
  source 1..1692: mol_type = unassigned DNA
gcggtagcaacagaggactcgacccggctggagctccggagagcgcgcgtgcgccgtcacgagctcggcgctgccggggccgcggtgtggaagcgagtattcgaccgccgtgcgggccgcggggatgttccgaaaggcccggcgggtgaacgtgcgcaagcggaacgactccgaagaggaagagcgggaacgcgatgaggagcaggagccgccgccgttgttgccgccgccgggcacgggcgaagaggcgggccccggtggcggcgacagggcccctggcggggagtcgctgctgggcccggggccgtcgccgccttccgcgctgaccccgggcctcggggctgaggccgggggcggcttccccggcggcgcggagcccggcaacgggctgaagccgcgcaagaggcctcgcgagaacaaagaggtgccccgggccagcctgctcagcttccaggacgaggaggaagaaaatgaagaagttttcaaagtgaagaaatcaagttatagcaaaaagatagtaaaattgctcaagaaggaatataaagaagatcttgaaaaatcgaagattaagacagaactcaactcatcagctgaaagtgaacaacctttggacaaaacaggacatgttaaggatacaaatcaagaagatggagttatcatcagtgaacatggtgaagatgaaatggatatggaaagtgaaaaagaggaagaaaagccaaagactggtggagctttttcaaatgctttatcttcattgaatgttcttcgtccaggagaaattccagatgcagcttttatacatgctgcaaggaaaaagcgccaaatggcccgagaattgggagatttcactcctcatgataatgagcctggtaaaggccgccttgttagagaagatgagaatgatgccagtgatgatgaagatgacgatgagaaacgccggatagttttttctgtgaaagaaaagtcacaaagacaaaaaattgctgaggaaataggaattgaggggagtgatgatgatgctttagtaactggagaacaggatgaagagctcagccgatgggaacaggagcagataaggaaaggaattaatatccctcaggttcaagccagtcaacccgcagaagtgaatatgtactaccagaacacttaccagacaatgccttacggctcatcctatggcattccttatagttatacggcctatggatcatcagatgccaaatctcaaaaaacagataatacagtccctttcaaaactcccagtaatgagatgactcccgttactattgatttggtaaagaaacagcttaaagacaggtagggcagatcaacttcttaaagacctgtccgctagctttctgttccctcaggcaacatgtagtctggggtagcagatgcagaatatcagcaaagaagattcactggcccagcttcaaaagctaaacagaagatgacttcatactttgttctgctaccttcttggattacttctgtggaagcctcgaaaaattataaaaaatgccactccatgatcttgttgaagacatttctgagtttgtacctcttggactctgaaaaagtgtagtcacgctatggggggaaaagcaaaacagtgagattttggttagcccacaaaactgtgaaatctgtaaactgccattttttgttttttgagaaaaaaagcagtacaga

SEQ ID NO: 14870 - DNA, 472 bp, Homo sapiens
  source 1..472: mol_type = unassigned DNA
atgttccgaaaggcccggcgggtgaacgtgcgcaagcggaacgactccgaagaggaagagcgggaacgcgatgaggagcaggagccgccgccgttgttgccgccgccgggcacgggcgaagaggcgggccccggtggcggcgacagggcccctggcggggagtcgctgctgggcccggggccgtcgccgccttccgcgctgaccccgggcctcggggctgaggccgggggcggcttccccggcggcgcggagcccggcaacgggctgaagccgcgcaagaggcctcgcgagaacaaagaggtgccccgggccagcctgctcagcttccaggacgaggaggaagaaaatgaagaagttttcaaagtgaagaaatcaagttatagcaaaaagatagtaaaattgctcaagaaggaatataaagaagatcttgaaaaatcgaagattaagacagaactcaactcatcagctgaaa

SEQ ID NO: 14871 - DNA, 472 bp, Homo sapiens; identical to SEQ ID NO: 14870
  source 1..472: mol_type = unassigned DNA

SEQ ID NO: 14872 - DNA, 491 bp, Homo sapiens
  source 1..491: mol_type = unassigned DNA
cgccgtgcgggccgcggggatgttccgaaaggcccggcgggtgaacgtgcgcaagcggaacgactccgaagaggaagagcgggaacgcgatgaggagcaggagccgccgccgttgttgccgccgccgggcacgggcgaagaggcgggccccggtggcggcgacagggcccctggcggggagtcgctgctgggcccggggccgtcgccgccttccgcgctgaccccgggcctcggggctgaggccgggggcggcttccccggcggcgcggagcccggcaacgggctgaagccgcgcaagaggcctcgcgagaacaaagaggtgccccgggccagcctgctcagcttccaggacgaggaggaagaaaatgaagaagttttcaaagtgaagaaatcaagttatagcaaaaagatagtaaaattgctcaagaaggaatataaagaagatcttgaaaaatcgaagattaagacagaactcaactcatcagctgaaa

SEQ ID NO: 14873 - DNA, 596 bp, Homo sapiens
  source 1..596: mol_type = unassigned DNA
gcggtagcaacagaggactcgacccggctggagctccggagagcgcgcgtgcgccgtcacgagctcggcgctgccggggccgcggtgtggaagcgagtattcgaccgccgtgcgggccgcggggatgttccgaaaggcccggcgggtgaacgtgcgcaagcggaacgactccgaagaggaagagcgggaacgcgatgaggagcaggagccgccgccgttgttgccgccgccgggcacgggcgaagaggcgggccccggtggcggcgacagggcccctggcggggagtcgctgctgggcccggggccgtcgccgccttccgcgctgaccccgggcctcggggctgaggccgggggcggcttccccggcggcgcggagcccggcaacgggctgaagccgcgcaagaggcctcgcgagaacaaagaggtgccccgggccagcctgctcagcttccaggacgaggaggaagaaaatgaagaagttttcaaagtgaagaaatcaagttatagcaaaaagatagtaaaattgctcaagaaggaatataaagaagatcttgaaaaatcgaagattaagacagaactcaactcatcagctgaaa

SEQ ID NO: 14874 - DNA, 662 bp, Homo sapiens
  source 1..662: mol_type = unassigned DNA
ctctctctctttctccaagtattgagagcgcgtgggagcataggcgcatgcgcgctcgtggggtgcgcggtagcaacagaggactcgacccggctggagctccggagagcgcgcgtgcgccgtcacgagctcggcgctgccggggccgcggtgtggaagcgagtattcgaccgccgtgcgggccgcggggatgttccgaaaggcccggcgggtgaacgtgcgcaagcggaacgactccgaagaggaagagcgggaacgcgatgaggagcaggagccgccgccgttgttgccgccgccgggcacgggcgaagaggcgggccccggtggcggcgacagggcccctggcggggagtcgctgctgggcccggggccgtcgccgccttccgcgctgaccccgggcctcggggctgaggccgggggcggcttccccggcggcgcggagcccggcaacgggctgaagccgcgcaagaggcctcgcgagaacaaagaggtgccccgggccagcctgctcagcttccaggacgaggaggaagaaaatgaagaagttttcaaagtgaagaaatcaagttatagcaaaaagatagtaaaattgctcaagaaggaatataaagaagatcttgaaaaatcgaagattaagacagaactcaactcatcagctgaaa

SEQ ID NO: 14875 - DNA, 528 bp, Homo sapiens
  source 1..528: mol_type = unassigned DNA
ttgtttcctggagaataagtcaggagcaattacatgtctcagcatcagaggagcccaggaggaggaccctcccgatccccagctaatgagactggacaatatgcttttggcagaaggggtttcaggtcctgagaaaggtgggggatcggcggcagcagctgcagccgcggcagcctctggaggttcttcagataactctattgaacactcagattacagagccaaattgacccagatcagacaaatctatcacacagaactggagaaatatgaacaggcatgtaatgaatttactacacatgtgatgaaccttctccgagaacagagtagaacacgtcccatttctccaaaagagattgaaagaatggtgggcatcatccatcgaaaatttagttccattcagatgcagctcaaacaaagcacttgtgaagcagttatgattttaagatcaaggttccttgatgccagacggaaaaggcgtaacttcagtaaacaggccacagaaatcttgaatgaatatttttactc

SEQ ID NO: 14876 - DNA, 679 bp, Homo sapiens
  source 1..679: mol_type = unassigned DNA
cagcgaggtcataagctgagctcagtgaagggagccagaacatgaaatgatgctgagagaacgtctgggagatgagagttttaagcagtacagggttgaaaaagctttgcatgccagactattgtgaatgagtggagttcataagaattcaaaggacaaaagagatcattatgctttgttacctcagctagttcattaccttaattgctgagtgtaatccagtcttggaagaaaactctggggctttaagaagatcaacaccagcaccttatggcacagaaaatggaaaccctttcctgtaccattgctactccaggaacactaaaccttgatcaaaggctgaacttttcttaaggtcggccatgtgaacatcccctggagctgtaccattcgctgaaccataatgaagtttagtaggttcagcaccatttctctctgactgtgaccgtcctggatcactggctagcaatagcatattatcagcctttcagataggtctcagcatcagaggagcccaggaggaggaccctcccgatccccagctaatgagactggacaatatgcttttggcagaaggggtttcaggtcctgagaaaggtgggggatcggcggcagcagctgcagccgcggcagcctctggaggttcttcagataactctattgaacactcagattacag

SEQ ID NO: 14877 - DNA, 1035 bp, Homo sapiens
  source 1..1035: mol_type = unassigned DNA
agtagtcatttcggccatggtgcagcgaggtcataagctgagctcagtgaagggagccagaacatgaaatgatgctgagagaacgtctgggagatgagaggtctcagcatcagaggagcccaggaggaggaccctcccgatccccagctaatgagactggacaatatgcttttggcagaaggggtttcaggtcctgagaaaggtgggggatcggcggcagcagctgcagccgcggcagcctctggaggttcttcagataactctattgaacactcagattacagagccaaattgacccagatcagacaaatctatcacacagaactggagaaatatgaacaggcatgtaatgaatttactacacatgtgatgaaccttctccgagaacagagtagaacacgtcccatttctccaaaagagattgaaagaatggtgggcatcatccatcgaaaatttagttccattcagatgcagctcaaacaaagcacttgtgaagcagttatgattttaagatcaaggttccttgatgccagacggaaaaggcgtaacttcagtaaacaggccacagaaatcttgaatgaatatttttactcacacctcagcaacccctaccccagtgaagaagccaaagaggagctggccaagaaatgcagcatcacagtgtcacaggtatccaattggtttggcaacaaacgaatcaggtacaagaagaacattggcaagtttcaggaagaagccaacctctatgctgcaaagacggccgtgacagctgcacacgcagtagcagcagctgtgcagaacaaccagaccaattcgcccaccacaccaaattccggtggataccctccgtcatgttatcaatcagacgggaggctacagtgatggccttggaggaaattcactgtacagtccacataatttaaatgctaatggaggctggcaggacgcaacaactccatcttctgtgacttctcctacagaaggcccaggaagtgtgcactcggatacctctaactaatctctggccacactttt

SEQ ID NO: 14878 - DNA, 607 bp, Homo sapiens
  source 1..607: mol_type = unassigned DNA
tgtttgtgtgtcagtttttaaaaggagcaacgggagactggatgccaggaccgagtccccgggagaagcatcgcccgaactttgttttacttagacagtcttaagcttcagctgcacggatagaagaatagatgcaattgaacagaccccagtagcatgcttgaattagtgttttaggtgggaaggctactttagagaatcgaggaagggtaatgatgtgtagacacatacgatgtattacatctgttaatacttgtattattttgtattctgaagtcattacacttgtaactgtgcttaatatataaagtataaaaaggtctacagatgcaggttaaacaattttgaagtgtccaagtcagggaatatataagaagataggttttgcagaagtgctggaatgaaaactacaggtacatatttggcaaatttttggcaattcgtttcagtttaactttcttgtcagactttattaattgaaggtctttcagtcttgacgtgaggtaactgctcaaactgaagcagagatttggatgttttagtttgtatttggcattatcttccctgtatgtggcaaacaagtacattaaacaagctctactgttta

SEQ ID NO: 14879 - DNA, 2789 bp, Homo sapiens
  source 1..2789: mol_type = unassigned DNA
ctctgcacaggagcggacgcgggagcccctccgcacccgtcccctcccccgggtcgccttcgcctgcccccggggcgaggctccccgcgcgggttcgcgtcgcgtctgcagtggccgaggctgctgcctgccgggcagatgggtccgccttgttccggctgcagctttcgccgccggggcttgctggctgtcgggaactagtcaactggagtttttgttgacttcccacggaaacatgccctgaactgtcacagaatgaaaccagcgctcttcagcgtcctgtgtgagatcaaagagaaaacaggtctcagcatcagaggagcccaggaggaggaccctcccgatccccagctaatgagactggacaatatgcttttggcagaaggggtttcaggtcctgagaaaggtgggggatcggcggcagcagctgcagccgcggcagcctctggaggttcttcagataactctattgaacactcagattacagagccaaattgacccagatcagacaaatctatcacacagaactggagaaatatgaacaggcatgtaatgaatttactacacatgtgatgaaccttctccgagaacagagtagaacacgtcccatttctccaaaagagattgaaagaatggtgggcatcatccatcgaaaatttagttccattcagatgcagctcaaacaaagcacttgtgaagcagttatgattttaagatcaaggttccttgatgccagacggaaaaggcgtaacttcagtaaacaggccacagaaatcttgaatgaatatttttactcacacctcagcaacccctaccccagtgaagaagccaaagaggagctggccaagaaatgcagcatcacagtgtcacaggtatccaattggtttggcaacaaacgaatcaggtacaagaagaacattggcaagtttcaggaagaagccaacctctatgctgcaaagacggccgtgacagctgcacacgcagtagcagcagctgtgcagaacaaccagaccaattcgcccaccacaccaaattccggttcttctggttcttttaacctcccaaattctggggacatgttcatgaacatgcagagtctgaatggggattcttaccaagggtcccaagtcggagccaatgtgcaatcacaggtggataccctccgtcatgttatcaatcagacgggaggctacagtgatggccttggaggaaattcactgtacagtccacataatttaaatgctaatggaggctggcaggacgcaacaactccatcttctgtgacttctcctacagaaggcccaggaagtgtgcactcggatacctctaactaatctctggccacacttttccctgagctacatgccttgataagtgcattcagagcaataggaggaaaaggaaagcgtttttgtagcccaccatctacagctttactgtaaaaccttgtcttattcgagaacttggtaaatctgttttttaaggaatcataatcatttgtatttatacttaaaaacacacaatgttaaaaaaaataaagcactttatccaattaggccaagatttaacattgttgacagtcctgtagctattttatcataatttattatcaatattttacattaatggtttcacagttgccaattacttggccttaagggtaaaaagtacaatatacactaaacctcaaccgttaaagcagatgcaaaaattcacctcacctaaattgaacttcttgcatatttccattactgacttggattgtctttctttcatatcactaatggagttggaataaagagctgtttgcctatccctgttaatgatggttgtgtttaagaatcttcctcgtcacgtttgtgttcagatctcttatgttataattagatcagagactggtagcatcgtttctctctctgaaagcaccagtgcccagagtctgctcggtaataaaattatggatccagattgttctgagagacgaagatacttgctgctgatagaggtgaaaacgagattgatccgtctggggttttacggtgtgcactgggtgctgcacagacttgtcaaggtttgctacgtcctctgggcatctgcaaaaggccctgctctctggagtgttgtatatagtgtagcaaaagagtatttatacatcccaccaatcaaaacacagctttattacctcatgcgaactcatacaaaccaatagaatttcaacatgttctgtagcttagagtgctcacttactacctctgaacaatactcacgctgtagtttgtctctttcttatctttttgcatcttgtaattaactctttgtttcccttcataaaatgtaatgtacattgtaatcttttaaaagaaaaatcagggttgcacttgcaacttttaaaaaaccgagtgtggaaacattgggtcttaattcaacacaggatcggtaaaactgttgtaaatactgagaaacattttgaatgttcttcatcttattactaatccatgcaaaaaaaaaaaaaaaagcagcgactaattgtgatgcattcagatttcagtattcagtactgtatatttcaccctgtgtaatggggccccctctcctttctctctttttgtattgtatgcgattctgaaactgattgagtcatgaaaataatttgtggcggtgattctaatgtattaaaaacgtttcgtgttcctttctaactggattacaccctggattgaaaaagtcttcctcgtggtagttatatgtagtttcaaacatgaataaactttttgctttcatgattaaa

SEQ ID NO: 14880 - DNA, 875 bp, Homo sapiens
  source 1..875: mol_type = unassigned DNA
cgcagtcggccggcctcctctgcacaggagcggacgcgggagcccctccgcacccgtcccctcccccgggtcgccttcgcctgcccccggggcgaggctccccgcgcgggttcgcgtcgcgtctgcagtggccgaggctgctgcctgccgggcagatgggtccgccttgttccggctgcagctttcgccgccggggcttgctggctgtcgggaactagtcaactggagtttttgttgacttcccacggttcaaaagggccttccagaatggggggctggaattaaatcttgggtctaacttaaaggaaggcgccatattattccataggtgatgctaatacctttgtgtttcgttatttgttttttaggaaacatgccctgaactgtcacagaatgaaaccagcgctcttcagcgtcctgtgtgagatcaaagagaaaacaggtctcagcatcagaggagcccaggaggaggaccctcccgatccccagctaatgagactggacaatatgcttttggcagaaggggtttcaggtcctgagaaaggtgggggatcggcggcagcagctgcagccgcggcagcctctggaggttcttcagataactctattgaacactcagattacagagccaaattgacccagatcagacaaatctatcacacagaactggagaaatatgaacaggcatgtaatgaatttactacacatgtgatgaaccttctccgagaacagagtagaacacgtcccatttctccaaaagagattgaaagaatggtgggcatcatccatcgaaaatttagttccattcagatgcagctcaaacaaagcacttgtgaagcagttatgattttaagatcaaggttccttgatgccag

SEQ ID NO: 14881 - DNA, 1130 bp, Homo sapiens
  source 1..1130: mol_type = unassigned DNA
atggacgatcaatccaggatgctgcagactctggccggggtgaacctggctggccactcggtgcaggggggcatggccctgccgcctcccccgcacggccacgaaggggcggacggcgacggcaggaagcaggacatcggcgacatcctccaccagatcatgaccatcaccgaccagagcttggacgaggcgcaagcaaagaaacatgccctgaactgtcacagaatgaaaccagcgctcttcagcgtcctgtgtgagatcaaagagaaaacaggcatgtaatgaatttactacacatgtgatgaaccttctccgagaacagagtagaacacgtcccatttctccaaaagagattgaaagaatggtgggcatcatccatcgaaaatttagttccattcagatgcagctcaaacaaagcacttgtgaagcagttatgattttaagatcaaggttccttgatgccagacggaaaaggcgtaacttcagtaaacaggccacagaaatcttgaatgaatatttttactcacacctcagcaacccctaccccagtgaagaagccaaagaggagctggccaagaaatgcagcatcacagtgtcacaggtatccaattggtttggcaacaaacgaatcaggtacaagaagaacattggcaagtttcaggaagaagccaacctctatgctgcaaagacggccgtgacagctgcacacgcagtagcagcagctgtgcagaacaaccagaccaattcgcccaccacaccaaattccggttcttctggttcttttaacctcccaaattctggggacatgttcatgaacatgcagagtctgaatggggattcttaccaagggtcccaagtcggagccaatgtgcaatcacaggtggataccctccgtcatgttatcaatcagacgggaggctacagtgatggccttggaggaaattcactgtacagtccacataatttaaatgctaatggaggctggcaggacgcaacaactccatcttctgtgacttctcctacagaaggcccaggaagtgtgcactcggatacctctaactaatctctggccacacttttccctgagctacatgccttgataagtgcattcagagcaataggaggaaaag

SEQ ID NO: 14882 - DNA, 950 bp, Homo sapiens
  source 1..950: mol_type = unassigned DNA
atggacgatcaatccaggatgctgcagactctggccggggtgaacctggctggccactcggtgcaggggggcatggccctgccgcctcccccgcacggccacgaaggggcggacggcgacggcaggaagcaggacatcggcgacatcctccaccagatcatgaccatcaccgaccagagcttggacgaggcgcaagcaaagaaacatgccctgaactgtcacagaatgaaaccagcgctcttcagcgtcctgtgtgagatcaaagagaaaacaggcatgtaatgaatttactacacatgtgatgaaccttctccgagaacagagtagaacacgtcccatttctccaaaagagattgaaagaatggtgggcatcatccatcgaaaatttagttccattcagatgcagctcaaacaaagcacttgtgaagcagttatgattttaagatcaaggttccttgatgccagacggaaaaggcgtaacttcagtaaacaggccacagaaatcttgaatgaatatttttactcacacctcagcaacccctaccccagtgaagaagccaaagaggagctggccaagaaatgcagcatcacagtgtcacaggtatccaattggtttggcaacaaacgaatcaggtacaagaagaacattggcaagtttcaggaagaagccaacctctatgctgcaaagacggccgtgacagctgcacacgcagtagcagcagctgtgcagaacaaccagaccaattcgcccaccacaccaaattccggtggataccctccgtcatgttatcaatcagacgggaggctacagtgatggccttggaggaaattcactgtacagtccacataatttaaatgctaatggaggctggcaggacgcaacaactccatcttctgtgacttctcctacagaaggcccaggaagtgtgcactcggatacctctaactaa

SEQ ID NO: 14883 - DNA, 2775 bp, Homo sapiens
  source 1..2775: mol_type = unassigned DNA
gcccgcgcgcggcgggatggacgatcaatccaggatgctgcagactctggccggggtgaacctggctggccactcggtgcaggggggcatggccctgccgcctcccccgcacggccacgaaggggcggacggcgacggcaggaagcaggacatcggcgacatcctccaccagatcatgaccatcaccgaccagagcttggacgaggcgcaagcaaagaaacatgccctgaactgtcacagaatgaaaccagcgctcttcagcgtcctgtgtgagatcaaagagaaaacaggtctcagcatcagaggagcccaggaggaggaccctcccgatccccagctaatgagactggacaatatgcttttggcagaaggggtttcaggtcctgagaaaggtgggggatcggcggcagcagctgcagccgcggcagcctctggaggttcttcagataactctattgaacactcagattacagagccaaattgacccagatcagacaaatctatcacacagaactggagaaatatgaacaggcatgtaatgaatttactacacatgtgatgaaccttctccgagaacagagtagaacacgtcccatttctccaaaagagattgaaagaatggtgggcatcatccatcgaaaatttagttccattcagatgcagctcaaacaaagcacttgtgaagcagttatgattttaagatcaaggttccttgatgccagacggaaaaggcgtaacttcagtaaacaggccacagaaatcttgaatgaatatttttactcacacctcagcaacccctaccccagtgaagaagccaaagaggagctggccaagaaatgcagcatcacagtgtcacaggtatccaattggtttggcaacaaacgaatcaggtacaagaagaacattggcaagtttcaggaagaagccaacctctatgctgcaaagacggccgtgacagctgcacacgcagtagcagcagctgtgcagaacaaccagaccaattcgcccaccacaccaaattccggttcttctggttcttttaacctcccaaattctggggacatgttcatgaacatgcagagtctgaatggggattcttaccaagggtcccaagtcggagccaatgtgcaatcacaggtggataccctccgtcatgttatcaatcagacgggaggctacagtgatggccttggaggaaattcactgtacagtccacataatttaaatgctaatggaggctggcaggacgcaacaactccatcttctgtgacttctcctacagaaggcccaggaagtgtgcactcggatacctctaactaatctctggccacacttttccctgagctacatgccttgataagtgcattcagagcaataggaggaaaaggaaagcgtttttgtagcccaccatctacagctttactgtaaaaccttgtcttattcgagaacttggtaaatctgttttttaaggaatcataatcatttgtatttatacttaaaaacacacaatgttaaaaaaaataaagcactttatccaattaggccaagatttaacattgttgacagtcctgtagctattttatcataatttattatcaatattttacattaatggtttcacagttgccaattacttggccttaagggtaaaaagtacaatatacactaaacctcaaccgttaaagcagatgcaaaaattcacctcacctaaattgaacttcttgcatatttccattactgacttggattgtctttctttcatatcactaatggagttggaataaagagctgtttgcctatccctgttaatgatggttgtgtttaagaatcttcctcgtcacgtttgtgttcagatctcttatgttataattagatcagagactggtagcatcgtttctctctctgaaagcaccagtgcccagagtctgctcggtaataaaattatggatccagattgttctgagagacgaagatacttgctgctgatagaggtgaaaacgagattgatccgtctggggttttacggtgtgcactgggtgctgcacagacttgtcaaggtttgctacgtcctctgggcatctgcaaaaggccctgctctctggagtgttgtatatagtgtagcaaaagagtatttatacatcccaccaatcaaaacacagctttattacctcatgcgaactcatacaaaccaatagaatttcaacatgttctgtagcttagagtgctcacttactacctctgaacaatactcacgctgtagtttgtctctttcttatctttttgcatcttgtaattaactctttgtttcccttcataaaatgtaatgtacattgtaatcttttaaaagaaaaatcagggttgcacttgcaacttttaaaaaaccgagtgtggaaacattgggtcttaattcaacacaggatcggtaaaactgttgtaaatactgagaaacattttgaatgttcttcatcttattactaatccatgcaaaaaaaaaaaaaaaagcagcgactaattgtgatgcattcagatttcagtattcagtactgtatatttcaccctgtgtaatggggccccctctcctttctctctttttgtattgtatgcgattctgaaactgattgagtcatgaaaataatttgtggcggtgattctaatgtattaaaaacgtttcgtgttcctttctaactggattacaccctggattgaaaaagtcttcctcgtggtagttatatgtagtttcaaacatgaataaactttttgctttcatgattaaa

SEQ ID NO: 14884 - DNA, 2902 bp, Homo sapiens
  source 1..2902: mol_type = unassigned DNA
tcctccctcgtcgccgccgccgccgccgccgcctcagccttcgcctcagccgccgcccgctcccgcccgcgcgcggcgggatggacgatcaatccaggatgctgcagactctggccggggtgaacctggctggccactcggtgcaggggggcatggccctgccgcctcccccgcacggccacgaaggggcggacggcgacggcaggaagcaggacatcggcgacatcctccaccagatcatgaccatcaccgaccagagcttggacgaggcgcaagcaaagaaacatgccctgaactgtcacagaatgaaaccagcgctcttcagcgtcctgtgtgagatcaaagagaaaacaggtctcagcatcagaggagcccaggaggaggaccctcccgatccccagctaatgagactggacaatatgcttttggcagaaggggtttcaggtcctgagaaaggtgggggatcggcggcagcagctgcagccgcggcagcctctggaggttcttcagataactctattgaacactcagattacagagccaaattgacccagatcagacaaatctatcacacagaactggagaaatatgaacaggcatgtaatgaatttactacacatgtgatgaaccttctccgagaacagagtagaacacgtcccatttctccaaaagagattgaaagaatggtgggcatcatccatcgaaaatttagttccattcagatgcagctcaaacaaagcacttgtgaagcagttatgattttaagatcaaggttccttgatgccagacggaaaaggcgtaacttcagtaaacaggccacagaaatcttgaatgaatatttttactcacacctcagcaacccctaccccagtgaagaagccaaagaggagctggccaagaaatgcagcatcacagtgtcacagagtcttgtaaaggatccaaaagaaagagggagcaaaggttctgacatccagccaactagcgtggtatccaattggtttggcaacaaacgaatcaggtacaagaagaacattggcaagtttcaggaagaagccaacctctatgctgcaaagacggccgtgacagctgcacacgcagtagcagcagctgtgcagaacaaccagaccaattcgcccaccacaccaaattccggttcttctggttcttttaacctcccaaattctggggacatgttcatgaacatgcagagtctgaatggggattcttaccaagggtcccaagtcggagccaatgtgcaatcacaggtggataccctccgtcatgttatcaatcagacgggaggctacagtgatggccttggaggaaattcactgtacagtccacataatttaaatgctaatggaggctggcaggacgcaacaactccatcttctgtgacttctcctacagaaggcccaggaagtgtgcactcggatacctctaactaatctctggccacacttttccctgagctacatgccttgataagtgcattcagagcaataggaggaaaaggaaagcgtttttgtagcccaccatctacagctttactgtaaaaccttgtcttattcgagaacttggtaaatctgttttttaaggaatcataatcatttgtatttatacttaaaaacacacaatgttaaaaaaaataaagcactttatccaattaggccaagatttaacattgttgacagtcctgtagctattttatcataatttattatcaatattttacattaatggtttcacagttgccaattacttggccttaagggtaaaaagtacaatatacactaaacctcaaccgttaaagcagatgcaaaaattcacctcacctaaattgaacttcttgcatatttccattactgacttggattgtctttctttcatatcactaatggagttggaataaagagctgtttgcctatccctgttaatgatggttgtgtttaagaatcttcctcgtcacgtttgtgttcagatctcttatgttataattagatcagagactggtagcatcgtttctctctctgaaagcaccagtgcccagagtctgctcggtaataaaattatggatccagattgttctgagagacgaagatacttgctgctgatagaggtgaaaacgagattgatccgtctggggttttacggtgtgcactgggtgctgcacagacttgtcaaggtttgctacgtcctctgggcatctgcaaaaggccctgctctctggagtgttgtatatagtgtagcaaaagagtatttatacatcccaccaatcaaaacacagctttattacctcatgcgaactcatacaaaccaatagaatttcaacatgttctgtagcttagagtgctcacttactacctctgaacaatactcacgctgtagtttgtctctttcttatctttttgcatcttgtaattaactctttgtttcccttcataaaatgtaatgtacattgtaatcttttaaaagaaaaatcagggttgcacttgcaacttttaaaaaaccgagtgtggaaacattgggtcttaattcaacacaggatcggtaaaactgttgtaaatactgagaaacattttgaatgttcttcatcttattactaatccatgcaaaaaaaaaaaaaaaagcagcgactaattgtgatgcattcagatttcagtattcagtactgtatatttcaccctgtgtaatggggccccctctcctttctctctttttgtattgtatgcgattctgaaactgattgagtcatgaaaataatttgtggcggtgattctaatgtattaaaaacgtttcgtgttcctttctaactggattacaccctggattgaaaaagtcttcctcgtggtagttatatgtagtttcaaacatgaataaactttttgctttcatgattaaa

SEQ ID NO: 14885 - DNA, 425 bp, Homo sapiens
  source 1..425: mol_type = unassigned DNA
tcctccctcgtcgccgccgccgccgccgccgcctcagccttcgcctcagccgccgcccgctcccgcccgcgcgcggcgggatggacgatcaatccaggatgctgcagactctggccggggtgaacctggctggccactcggtgcaggggggcatggccctgccgcctcccccgcacggccacgaaggggcggacggcgacggcaggaagcaggacatcggcgacatcctccaccagatcatgaccatcaccgaccagagcttggacgaggcgcaagcaaagaaacatgccctgaactgtcacagaatgaaaccagcgctcttcagcgtcctgtgtgagatcaaagagaaaacagaatgtcctcatttaaacttttttttaacaactcatggatttggtctctgagttactttacctctactcaag

SEQ ID NO: 14886 - DNA, 2755 bp, Homo sapiens
  source 1..2755: mol_type = unassigned DNA
cctccccctccccctccccctctttcttctcctccctcgtcgccgccgccgccgccgccgcctcagccttcgcctcagccgccgcccgctcccgcccgcgcgcggcgggatggacgatcaatccaggatgctgcagactctggccggggtgaacctggctggccactcggtgcaggggggcatggccctgccgcctcccccgcacggccacgaaggggcggacggcgacggcaggaagcaggacatcggcgacatcctccaccagatcatgaccatcaccgaccagagcttggacgaggcgcaagcaaagaaacatgccctgaactgtcacagaatgaaaccagcgctcttcagcgtcctgtgtgagatcaaagagaaaacaggtctcagcatcagaggagcccaggaggaggaccctcccgatccccagctaatgagactggacaatatgcttttggcagaaggggtttcaggtcctgagaaaggtgggggatcggcggcagcagctgcagccgcggcagcctctggaggttcttcagataactctattgaacactcagattacagagccaaattgacccagatcagacaaatctatcacacagaactggagaaatatgaacaggcatgtaatgaatttactacacatgtgatgaaccttctccgagaacagagtagaacacgtcccatttctccaaaagagattgaaagaatggtgggcatcatccatcgaaaatttagttccattcagatgcagctcaaacaaagcacttgtgaagcagttatgattttaagatcaaggttccttgatgccagacggaaaaggcgtaacttcagtaaacaggccacagaaatcttgaatgaatatttttactcacacctcagcaacccctaccccagtgaagaagccaaagaggagctggccaagaaatgcagcatcacagtgtcacaggtatccaattggtttggcaacaaacgaatcaggtacaagaagaacattggcaagtttcaggaagaagccaacctctatgctgcaaagacggccgtgacagctgcacacgcagtagcagcagctgtgcagaacaaccagaccaattcgcccaccacaccaaattccggtggataccctccgtcatgttatcaatcagacgggaggctacagtgatggccttggaggaaattcactgtacagtccacataatttaaatgctaatggaggctggcaggacgcaacaactccatcttctgtgacttctcctacagaaggcccaggaagtgtgcactcggatacctctaactaatctctggccacacttttccctgagctacatgccttgataagtgcattcagagcaataggaggaaaaggaaagcgtttttgtagcccaccatctacagctttactgtaaaaccttgtcttattcgagaacttggtaaatctgttttttaaggaatcataatcatttgtatttatacttaaaaacacacaatgttaaaaaaaataaagcactttatccaattaggccaagatttaacattgttgacagtcctgtagctattttatcataatttattatcaatattttacattaatggtttcacagttgccaattacttggccttaagggtaaaaagtacaatatacactaaacctcaaccgttaaagcagatgcaaaaattcacctcacctaaattgaacttcttgcatatttccattactgacttggattgtctttctttcatatcactaatggagttggaataaagagctgtttgcctatccctgttaatgatggttgtgtttaagaatcttcctcgtcacgtttgtgttcagatctcttatgttataattagatcagagactggtagcatcgtttctctctctgaaagcaccagtgcccagagtctgctcggtaataaaattatggatccagattgttctgagagacgaagatacttgctgctgatagaggtgaaaacgagattgatccgtctggggttttacggtgtgcactgggtgctgcacagacttgtcaaggtttgctacgtcctctgggcatctgcaaaaggccctgctctctggagtgttgtatatagtgtagcaaaagagtatttatacatcccaccaatcaaaacacagctttattacctcatgcgaactcatacaaaccaatagaatttcaacatgttctgtagcttagagtgctcacttactacctctgaacaatactcacgctgtagtttgtctctttcttatctttttgcatcttgtaattaactctttgtttcccttcataaaatgtaatgtacattgtaatcttttaaaagaaaaatcagggttgcacttgcaacttttaaaaaaccgagtgtggaaacattgggtcttaattcaacacaggatcggtaaaactgttgtaaatactgagaaacattttgaatgttcttcatcttattactaatccatgcaaaaaaaaaaaaaaaagcagcgactaattgtgatgcattcagatttcagtattcagtactgtatatttcaccctgtgtaatggggccccctctcctttctctctttttgtattgtatgcgattctgaaactgattgagtcatgaaaataatttgtggcggtgattctaatgtattaaaaacgtttcgtgttcctttctaactggattacaccctggattgaaaaagtcttcctcgtggtagttatatgtagtttcaaacatgaataaactttttgctttcatgattaaa

SEQ ID NO: 14887 - DNA, 3144 bp, Homo sapiens
  source 1..3144: mol_type = unassigned DNA
aaagggaagcctgcaacaagttaagctgaagaccgaagcaagagctggttcagcctgccagtggagacactgggcccggcatccaggatggacccagaatctgagagagccctgcaggcccctcacagcccctccaagacagatgggaaagaattagctgggaccatggatggagaagggacgctcttccagactgaaagccctcagtctggcagcattctaacagaggagactgaggtcaagggcaccctggaaggtgatgtttgtggtgtggagcctcctggcccaggagacacagtagtccagggagacctgcaggagaccaccgtggtgacaggcctgggaccagacacacaggacctggaaggccagagccctccacagagcctgccttcaacccccaaagcagcttggatcagggaggagggccgctgctccagcagtgacgatgacaccgacgtggacatggagggtctgcggagacggcggggccgggaggccggcccacctcagcccatggtgcccctggctgtggagaaccaggctgggggtgagggtgcaggcggggagctgggcatctccctcaacatgtgcctccttggggccctggttctgcttggcctgggggtcctcctcttctcaggtggcctctcagagtctgagactgggcccatggaggaagtggagcggcaggtcctcccagaccccgaggtgctggaagctgtgggggacaggcaggatgggctaagggaacagctgcaggccccagtgcctcctgacagtgtccccagcctgcaaaacatgggtcttctgctggacaagctggccaaggagaaccaggacatccggctgctgcaggcccagctgcaggcccaaaaggaagagcttcagagcctgatgcaccagcccaaagggctagaggaggagaatgcccagctccggggggctctgcagcagggcgaagccttccagcgggctctggagtcagagctgcagcagctgcgggcccggctccaggggctggaggccgactgtgtccggggcccagatggggtgtgcctcagtgggggtagaggcccacagggtgacaaggccatcagggagcaaggccccagggagcaggagccagaactcagcttcctgaagcagaaggaacagctggaggctgaggcacaggcattaaggcaagagttagagaggcagcgacggctgctggggtctgtacagcaggatctggagaggagcttgcaggatgccagccgcggggacccagctcatgctggcttggctgagctgggccacagattggcccagaaactgcagggcctggagaactggggccaggaccctggggtctctgccaatgcctcaaaggcctggcaccagaagtcccacttccagaattctagggagtggagtggaaaggaaaagtggtgggatgggcagagagaccggaaggctgagcactggaaacataagaaggaagaatctggccgggaaaggaagaagaactggggaggtcaggaggacagggagccagcaggaaggtggaaggagggcaggccaagggtggaggagtcggggagcaagaaggagggcaagcgacagggcccgaaggaacccccaaggaaaagtggtagcttccactcctctggagaaaagcagaagcaacctcggtggagggaagggactaaggacagccatgaccccctgccatcctgggcagagctgttgaggcccaagtaccgggcaccccagggctgctcaggtgtggacgagtgtgcccggcaggagggcctgactttctttggcacagagctagccccagtgcggcaacaggagctggcctctctgctaagaacatacttggcacggctgccctgggctgggcagctgaccaaggagctacccctctcacctgctttctttggtgaggatggcatcttccgtcatgaccgcctccgcttccgggattttgtggatgccctggaggacagcttggaggaggtggctgtgcaacagacaggtgatgatgatgaagtagatgactttgaggacttcatcttcagccacttctttggagacaaagcactgaagaagaggtcagggaagaaggacaagcactcacagagcccaagagctgcggggcccagggaggggcacagccatagccaccaccaccaccaccggggctgacaccctgccccacagggaatggccttggcctggcccagcccaagatcccagcgttatctaactcctggagggtggactctgtcctggcttgtttggtgtcctcagatatctttcacacagtagagcaaaatcaccagccctgcactgatgtcactttatgtagaaaaaggccttagctggacctgcgttgccgtctatgcaaatgcatgcaaatactccaggccctgggatgtgggcttgtgttttgtcactgtgaagggggagatgggagaggagcctgttttggggtggggtctggggaaggcaatctgattctgaagctaaagagctttcatcctcttgagtgtatgtccccatagtgggccccttgacccacatgctgaccggtgccttgggatttgactagagttgctggctcgaggcccagcacgaggacttaccctggggttttgttaggtttggaagcagctgtccctagggggtgaagtcccccccctttttttttttacccctgcttctcccacggcttcacctccctatgtgaactgtagactcagatcccaataaagtgctgttgcagctatgatgctaggtggtttctaagcacaggggacaccccacaccccctgcctgaatggatgggtccatcccaggcactggtacttgcccccttgttctgtatccccctttgcccttgccttgcccttccaacaaaccctaggcccttgagaagctgatacttctccttttgctcacagctgccttggccccacccctgggagatgtagcaaattgagtgtgggttttggagtctgagcctcaggctcaaatccaggccaagtgatcttgggcaagttaatctctgggaactttgggtttcttatcctcaaaaaaggcgatggaagggctggggaagtgattaaataaaagcaacgcaagaaaaatgcc

SEQ ID NO: 14888 - DNA, 3212 bp, Homo sapiens
  source 1..3212: mol_type = unassigned DNA
aagttaagctgaagaccgaagcaagagctggttcaggtggcagccacagcagcctcagggacctcagcaactatggcctcctgcccagactctgataatagctgggtgcttgctggctccgagagcctgccagtggagacactgggcccggcatccaggatggacccagaatctgagagagccctgcaggcccctcacagcccctccaagacagatgggaaagaattagctgggaccatggatggagaagggacgctcttccagactgaaagccctcagtctggcagcattctaacagaggagactgaggtcaagggcaccctggaaggtgatgtttgtggtgtggagcctcctggcccaggagacacagtagtccagggagacctgcaggagaccaccgtggtgacaggcctgggaccagacacacaggacctggaaggccagagccctccacagagcctgccttcaacccccaaagcagcttggatcagggaggagggccgctgctccagcagtgacgatgacaccgacgtggacatggagggtctgcggagacggcggggccgggaggccggcccacctcagcccatggtgcccctggctgtggagaaccaggctgggggtgagggtgcaggcggggagctgggcatctccctcaacatgtgcctccttggggccctggttctgcttggcctgggggtcctcctcttctcaggtggcctctcagagtctgagactgggcccatggaggaagtggagcggcaggtcctcccagaccccgaggtgctggaagctgtgggggacaggcaggatgggctaagggaacagctgcaggccccagtgcctcctgacagtgtccccagcctgcaaaacatgggtcttctgctggacaagctggccaaggagaaccaggacatccggctgctgcaggcccagctgcaggcccaaaaggaagagcttcagagcctgatgcaccagcccaaagggctagaggaggagaatgcccagctccggggggctctgcagcagggcgaagccttccagcgggctctggagtcagagctgcagcagctgcgggcccggctccaggggctggaggccgactgtgtccggggcccagatggggtgtgcctcagtgggggtagaggcccacagggtgacaaggccatcagggagcaaggccccagggagcaggagccagaactcagcttcctgaagcagaaggaacagctggaggctgaggcacaggcattaaggcaagagttagagaggcagcgacggctgctggggtctgtacagcaggatctggagaggagcttgcaggatgccagccgcggggacccagctcatgctggcttggctgagctgggccacagattggcccagaaactgcagggcctggagaactggggccaggaccctggggtctctgccaatgcctcaaaggcctggcaccagaagtcccacttccagaattctagggagtggagtggaaaggaaaagtggtgggatgggcagagagaccggaaggctgagcactggaaacataagaaggaagaatctggccgggaaaggaagaagaactggggaggtcaggaggacagggagccagcaggaaggtggaaggagggcaggccaagggtggaggagtcggggagcaagaaggagggcaagcgacagggcccgaaggaacccccaaggaaaagtggtagcttccactcctctggagaaaagcagaagcaacctcggtggagggaagggactaaggacagccatgaccccctgccatcctgggcagagctgttgaggcccaagtaccgggcaccccagggctgctcaggtgtggacgagtgtgcccggcaggagggcctgactttctttggcacagagctagccccagtgcggcaacaggagctggcctctctgctaagaacatacttggcacggctgccctgggctgggcagctgaccaaggagctacccctctcacctgctttctttggtgaggatggcatcttccgtcatgaccgcctccgcttccgggattttgtggatgccctggaggacagcttggaggaggtggctgtgcaacagacaggtgatgatgatgaagtagatgactttgaggacttcatcttcagccacttctttggagacaaagcactgaagaagaggtcagggaagaaggacaagcactcacagagcccaagagctgcggggcccagggaggggcacagccatagccaccaccaccaccaccggggctgacaccctgccccacagggaatggccttggcctggcccagcccaagatcccagcgttatctaactcctggagggtggactctgtcctggcttgtttggtgtcctcagatatctttcacacagtagagcaaaatcaccagccctgcactgatgtcactttatgtagaaaaaggccttagctggacctgcgttgccgtctatgcaaatgcatgcaaatactccaggccctgggatgtgggcttgtgttttgtcactgtgaagggggagatgggagaggagcctgttttggggtggggtctggggaaggcaatctgattctgaagctaaagagctttcatcctcttgagtgtatgtccccatagtgggccccttgacccacatgctgaccggtgccttgggatttgactagagttgctggctcgaggcccagcacgaggacttaccctggggttttgttaggtttggaagcagctgtccctagggggtgaagtcccccccctttttttttttacccctgcttctcccacggcttcacctccctatgtgaactgtagactcagatcccaataaagtgctgttgcagctatgatgctaggtggtttctaagcacaggggacaccccacaccccctgcctgaatggatgggtccatcccaggcactggtacttgcccccttgttctgtatccccctttgcccttgccttgcccttccaacaaaccctaggcccttgagaagctgatacttctccttttgctcacagctgccttggccccacccctgggagatgtagcaaattgagtgtgggttttggagtctgagcctcaggctcaaatccaggccaagtgatcttgggcaagttaatctctgggaactttgggtttcttatcctcaaaaaaggcgatggaagggctggggaagtgattaaataaaagcaacgcaagaaaaa

SEQ ID NO: 14889 - DNA, 1175 bp, Homo sapiens
  source 1..1175: mol_type = unassigned DNA
ctgcaacaagttaagctgaagaccgaagcaagagctggttcaggtggcagccacagcagcctcagggacctcagcaactatggcctcctgcccagactctgataatagctgggtgcttgctggctccgagagcctgccagtggagacactgggcccggcatccaggatggacccagaatctgagagagccctgcaggcccctcacagcccctccaagacagatgggaaagaattagctgggaccatggatggagaagggacgctcttccagactgaaagccctcagtctggcagcattctaacagaggagactgaggtcaagggcaccctggaaggtgatgtttgtggtgtggagcctcctggcccaggagacacagtagtccagggagacctgcaggagaccaccgtggtgacaggcctgggaccagacacacaggacctggaaggccagagccctccacagagcctgccttcaacccccaaagcagcttggatcagggaggagggccgctgctccagcagtgacgatgacaccgacgtggacatggagggtctgcggagacggcggggccgggaggccggcccacctcagcccatggtgcccctggctgtggagaaccaggctgggggtggcctctcagagtctgagactgggcccatggaggaagtggagcggcaggtcctcccagaccccgaggtgctggaagctgtgggggacaggcaggatgggctaagggaacagctgcaggccccagtgcctcctgacagtgtccccagcctgcaaaacatgggtcttctgctggacaagctggccaaggagaaccaggacatccggctgctgcaggcccagctgcaggtgggcacaggcaggaggggctgggctagggtaacccacctaggccaggcgtctgtcctagcatcctcccccaaaaggaatgtttcctatttacccacacatcctgaccctcccctctcccactatagtcagggcgtcttcccagttcttggttcacatcccttgtgctaaggtttgggccagggctggcatacctgttccacatggtacatgaaacatacatggtatcacctgtgattgattggtgtggtctgcctggagcactgtgtggaaaaggatttaaagaacatgccaggtgccatgatcagttaacactgtt

SEQ ID NO: 14890 - DNA, 777 bp, Homo sapiens
  source 1..777: mol_type = unassigned DNA
gtggcagccacagcagcctcagggacctcagcaactatggcctcctgcccagactctgataatagctgggtgcttgctggctccgagggacgctcttccagactgaaagccctcagtctggcagcattctaacagaggagactgaggtcaagggcaccctggaaggtgatgtttgtggtgtggagcctcctggcccaggagacacagtagtccagggagacctgcaggagaccaccgtggtgacaggcctgggaccagacacacaggacctggaaggccagagccctccacagagcctgccttcaacccccaaagcagcttggatcagggaggagggccgctgctccagcagtgacgatgacaccgacgtggacatggagggtctgcggagacggcggggccgggaggccggcccacctcagcccatggtgcccctggctgtggagaaccaggctgggggtgagggtgcaggcggggagctgggcatctccctcaacatgtgcctccttggggccctggttctgcttggcctgggggtcctcctcttctcaggtggcctctcagagtctgagactgggcccatggaggaagtggagcggcaggtcctcccagaccccgaggtgctggaagctgtgggggacaggcaggatgggctaagggaacagctgcaggccccagtgcctcctgacagtgtccccagcctgcaaaacatgggtcttctgctggacaagctggccaaggagaaccaggacatccggctgctgcaggcccagctgc

SEQ ID NO: 14891 - DNA, 853 bp, Homo sapiens
  source 1..853: mol_type = unassigned DNA
acaaagggaagcctgcaacaagttaagctgaagaccgaagcaagagctggttcaggtggcagccacagcagcctcagggacctcagcaactatggcctcctgcccagactctgataatagctgggtgcttgctggctccgagagcctgccagtggagacactgggcccggcatccaggatggacccagaatctgagagagccctgcaggcccctcacagcccctccaagacagatgggaaagaattagctgggaccatggatggagaagggacgctcttccagactgaaagccctcagtctggcagcattctaacagaggagactgaggtcaagggcaccctggaaggtgatgtttgtggtgtggagcctcctggcccaggagacacagtagtccagggagacctgcaggagaccaccgtggtgacaggcctgggaccagacacacaggacctggaaggccagagccctccacagagcctgccttcaacccccaaagcagtcacctcactgccctgtccctgtcctttcccctagcttggatcagggaggagggccgctgctccagcagtgacgatgacaccgacgtggacatggagggtctgcggagacggcggggccgggaggccggcccacctcagcccatggtgcccctggctgtggagaaccaggctgggggtgagggtgcaggcggggagctgggcatctccctcaacatgtgcctccttggggccctggttctgcttggcctgggggtcctcctcttctcaggtggcctctcagagtctgagactgggcccatggaggaagtggagcggcaggtcctcccagaccccgaggtgctggaagctgtgg

SEQ ID NO: 14892 - DNA, 707 bp, Homo sapiens
  source 1..707: mol_type = unassigned DNA
gtggcagccacagcagcctcagggacctcagcaactatggcctcctgcccagactctgataatagctgggtgcttgctggctccgagagcctgccagtggagacactgggcccggcatccaggatggacccagaatctgagagagccctgcaggcccctcacagcccctccaagacagatgggaaagaattagctgggaccatggatggagaaggtactgggccctgcttaggacatagcttaccggacaaagctattctccatattttggggtttctcagtttcctcagagaaagggaggctggttcgttttagttcctccattaatctcagttgacaaactccttttctcattccatcctggctttttcctgcctcttccaacctggtaggggcccgtgggatggacagagggctgcaaaggaaattcagctggggcagtgggtttttctgcgccttttctcctaccgcagggacgctcttccagactgaaagccctcagtctggcagcattctaacagaggagactgaggtcaagggcaccctggaaggtgatgtttgtggtgtggagcctcctggcccaggagacacagtagtccagggagacctgcaggagaccaccgtggtgacaggcctgggaccagacacacaggacctggaaggccagagccctccacagagcctgccttcaacccccaaagcaggtg

SEQ ID NO: 14893 - DNA, 1607 bp, Homo sapiens
  source 1..1607: mol_type = unassigned DNA
tcccagggggccagtacaccaacctgcacttccaggcccacagcatggggcttggctccaagttcaaggaggtcaagaaggcctatgtggaggccaaccagatgctgggcgatctcatcaaggtgacgccctcctccaagatcgtgggggacctggcccagtttatggtgcagaatggattgagccgggcagaggccgaagctcaggcggaagagctgtcctttccccgctccgtggtggagttcctgcagggctacatcggtgtcccccatggggggttccccgaaccctttcgctctaaggtactgaaggacctgccaagggtggaggggcggcctggagcctccctccctcccctggatctgcaggcactggagaaggagctggtagaccggcatggggaggaggtgacgccggaagatgtgctctcagcagctatgtaccccgatgtgtttgcccacttcaaggacttcactgccacctttggccccctggatagcctgaatactcgcctcttcctgcagggacccaagatcgcagaggagtttgaggtggagctggagcggggcaagacgctgcacatcaaagccctggccgtgagcgacctgaaccgggccggccagaggcaggtcttctttgagctcaatgggcagctgcggtccatcttggtcaaggacacccaggccatgaaggagatgcacttccaccccaaggccctaaaggacgtgaagggccagatcggggcgcccatgcctgggaaggtgatagacatcaaagtggtggcaggggccaaggtggccaagggccagcccctgtgtgtgctcagtgccatgaagatggagactgtggtgacctcacccatggagggtactgtccgcaaggttcatgtgaccaaggacatgacactggaaggtgacgacctcatcctggagatcgagtgatcttgccccagaccggcagcctggccatccccaagccttcaacagaagctgtgctgccacggcaggcccaggccagccagtgcccgaggccaggaaggccgggccgtggaggtcctgtccacagctggacaggagagacaccgcctgcggtggttcattcctttcagccatcgtcctttcctccggcggacagctgcttacatgttcatctcttgccaaataagggtcccctcctcactggagactacaagtggtgggtcaggtggtcctaggacccaggggaggtttaggggtcctatctcctgggggaaggggagatctaagatgtcccaggtcctgggaagtttactcaataaagctggctttcccctgccctccatgctggatcctgtgcagcccccagcctgcaccactcagcagtggggggctgcctttcaagctccccatgggtgggcaggtcagttgtgtcgttctcctcagagggtagtgagaatgaccatcgtggccctgttttaagtcactattgggtgcctactgtgtatactccccaaacaggactagtagtactgaacttgcttgaggggtggggcctgttctaagtatttaacacctattaacacagggaattaaccttcatcctcttatggacacagaaatcaagtcaca

SEQ ID NO: 14894 - DNA, 4004 bp, Homo sapiens
  source 1..4004: mol_type = unassigned DNA
caggcagcaggcctcaggcccagacttgggtgttacaggaacagtgtggcctctctggaactctgcagaccaactgccgtgatgctgaagttccgaacagtccatgggggcctgaggctcctgggaatccgccgaacctccaccgcccccgctgcctccccaaatgtccggcgcctggagtataagcccatcaagaaagtcatggtggccaacagaggtgagattgccatccgtgtgttccgggcctgcacggagctgggcatccgcaccgtagccatctactctgagcaggacacgggccagatgcaccggcagaaagcagatgaagcctatctcatcggccgcggcctggcccccgtgcaggcctacctgcacatcccagacatcatcaaggtggccaaggagaacaacgtagatgcagtgcaccctggctacgggttcctctctgagcgagcggacttcgcccaggcctgccaggatgcaggggtccggtttattgggccaagcccagaagtggtccgcaagatgggagacaaggtggaggcccgggccatcgccattgctgcgggtgttcccgttgtccctggcacagatgcccccatcacgtccctgcatgaggcccacgagttctccaacacctacggcttccccatcatcttcaaggcggcctatgggggtggagggcgtggcatgagggtggtgcacagctacgaggagctggaggagaattacacccgggcctactcagaggctctggccgcctttgggaatggggcgctgtttgtggagaagttcatcgagaagccacggcacatcgaggtgcagatcttgggggaccagtatgggaacatcctgcacctgtacgagcgagactgctccatccagcggcggcaccagaaggtggtcgagattgcccccgccgcccacctggacccgcagcttcggactcggctcaccagcgactctgtgaaactcgctaaacaggtgggctacgagaacgcaggcaccgtggagttcctggtggacaggcacggcaagcactacttcatcgaggtcaactcccgcctgcaggtggagcacacggtcacagaggagatcaccgacgtagacctggtccatgctcagatccacgtggctgagggcaggagcctacccgacctgggcctgcggcaggagaacatccgcatcaacgggtgtgccatccagtgccgggtcaccaccgaggaccccgcgcgcagcttccagccggacaccggccgcattgaggtgttccggagcggagagggcatgggcatccgcctggataatgcttccgccttccaaggagccgtcatctcgccccactacgactccctgctggtcaaagtcattgcccacggcaaagaccaccccacggccgccaccaagatgagcagggcccttgcggagttccgcgtccgaggtgtgaagaccaacatcgccttcctgcagaatgtgctcaacaaccagcagttcctggcaggcactgtggacacccagttcatcgacgagaacccagagctgttccagctgcggcctgcacagaaccgggcccaaaagctgttgcactacctcggccatgtcatggtaaacggtccaaccaccccgattcccgtcaaggccagccccagccccacggaccccgttgtccctgcagtgcccataggcccgcccccggctggtttcagagacatcctgctgcgagaggggcctgagggctttgctcgagctgtgcggaaccacccggggctgctgctgatggacacgaccttcagggacgcccaccagtcactgctggccactcgtgtgcgcacccacgatctcaaaaagatcgccccctatgttgcccacaacttcagcaagctcttcagcatggagaactggggaggagccacgtttgacgtcgccatgcgcttcctgtatgagtgcccctggcggcggctgcaggagctccgggagctcatccccaacatccctttccagatgctgctgcggggggccaatgctgtgggctacaccaactacccagacaacgtggtcttcaagttctgtgaagtggccaaagagaatggcatggatgtcttccgtgtgtttgactccctcaactacttgcccaacatgctgctgggcatggaggcggcaggaagtgccggaggcgtggtggaggctgccatctcatacacgggcgacgtggccgaccccagccgcaccaagtactcactgcagtactacatgggcttggccgaagagctggtgcgagctggcacccacatcctgtgcatcaaggacatggccgggctgctgaagcccacggcctgcaccatgctggtcagctccctccgggaccgcttccccgacctcccactgcacatccacacccacgacacgtcaggggcaggcgtggcagccatgctggcctgtgcccaggctggagctgatgtggtggatgtggcagctgattccatgtctgggatgacttcacagcccagcatgggggccctggtggcctgtaccagagggactcccctggacacagaggtgcccatggagcgcgtgtttgactacagtgagtactgggagggggctcggggactgtacgcggccttcgactgcacggccaccatgaagtctggcaactcggacgtgtatgaaaatgagatcccagggggccagtacaccaacctgcacttccaggcccacagcatggggcttggctccaagttcaaggaggtcaagaaggcctatgtggaggccaaccagatgctgggcgatctcatcaaggtgacgccctcctccaagatcgtgggggacctggcccagtttatggtgcagaatggattgagccgggcagaggccgaagctcaggcggaagagctgtcctttccccgctccgtggtggagttcctgcagggctacatcggtgtcccccatggggggttccccgaaccctttcgctctaaggtactgaaggacctgccaagggtggaggggcggcctggagcctccctccctcccctggatctgcaggcactggagaaggagctggtagaccggcatggggaggaggtgacgccggaagatgtgctctcagcagctatgtaccccgatgtgtttgcccacttcaaggacttcactgccacctttggccccctggatagcctgaatactcgcctcttcctgcagggacccaagatcgcagaggagtttgaggtggagctggagcggggcaagacgctgcacatcaaagccctggccgtgagcgacctgaaccgggccggccagaggcaggtcttctttgagctcaatgggcagctgcggtccatcttggtcaaggacacccaggccatgaaggagatgcacttccaccccaaggccctaaaggacgtgaagggccagatcggggcgcccatgcctgggaaggtgatagacatcaaagtggtggcaggggccaaggtggccaagggccagcccctgtgtgtgctcagtgccatgaagatggagactgtggtgacctcacccatggagggtactgtccgcaaggttcatgtgaccaaggacatgacactggaaggtgacgacctcatcctggagatcgagtgatcttgccccagaccggcagcctggccatccccaagccttcaacagaagctgtgctgccacggcaggcccaggccagccagtgcccgaggccaggaaggccgggccgtggaggtcctgtccacagctggacaggagagacaccgcctgcggtggttcattcctttcagccatcgtcctttcctccggcggacagctgcttacatgttcatctcttgccaaataagggtcccctcctcactggagactacaagtggtgggtcaggtggtcctaggacccaggggaggtttaggggtcctatctcctgggggaaggggagatctaagatgtcccaggtcctgggaagtttactcaataaagctggctttcccctgccctccatgctgga

SEQ ID NO: 14895 - DNA, 4005 bp, Homo sapiens
  source 1..4005: mol_type = unassigned DNA
gtcagtggaggcagcagcggtagaggcggcggcgaggactggcgacggcgaggagatagtgtctgccttctggagagctgaccaaacactaaggatgctgaagttccgaacagtccatgggggcctgaggctcctgggaatccgccgaacctccaccgcccccgctgcctccccaaatgtccggcgcctggagtataagcccatcaagaaagtcatggtggccaacagaggtgagattgccatccgtgtgttccgggcctgcacggagctgggcatccgcaccgtagccatctactctgagcaggacacgggccagatgcaccggcagaaagcagatgaagcctatctcatcggccgcggcctggcccccgtgcaggcctacctgcacatcccagacatcatcaaggtggccaaggagaacaacgtagatgcagtgcaccctggctacgggttcctctctgagcgagcggacttcgcccaggcctgccaggatgcaggggtccggtttattgggccaagcccagaagtggtccgcaagatgggagacaaggtggaggcccgggccatcgccattgctgcgggtgttcccgttgtccctggcacagatgcccccatcacgtccctgcatgaggcccacgagttctccaacacctacggcttccccatcatcttcaaggcggcctatgggggtggagggcgtggcatgagggtggtgcacagctacgaggagctggaggagaattacacccgggcctactcagaggctctggccgcctttgggaatggggcgctgtttgtggagaagttcatcgagaagccacggcacatcgaggtgcagatcttgggggaccagtatgggaacatcctgcacctgtacgagcgagactgctccatccagcggcggcaccagaaggtggtcgagattgcccccgccgcccacctggacccgcagcttcggactcggctcaccagcgactctgtgaaactcgctaaacaggtgggctacgagaacgcaggcaccgtggagttcctggtggacaggcacggcaagcactacttcatcgaggtcaactcccgcctgcaggtggagcacacggtcacagaggagatcaccgacgtagacctggtccatgctcagatccacgtggctgagggcaggagcctacccgacctgggcctgcggcaggagaacatccgcatcaacgggtgtgccatccagtgccgggtcaccaccgaggaccccgcgcgcagcttccagccggacaccggccgcattgaggtgttccggagcggagagggcatgggcatccgcctggataatgcttccgccttccaaggagccgtcatctcgccccactacgactccctgctggtcaaagtcattgcccacggcaaagaccaccccacggccgccaccaagatgagcagggcccttgcggagttccgcgtccgaggtgtgaagaccaacatcgccttcctgcagaatgtgctcaacaaccagcagttcctggcaggcactgtggacacccagttcatcgacgagaacccagagctgttccagctgcggcctgcacagaaccgggcccaaaagctgttgcactacctcggccatgtcatggtaaacggtccaaccaccccgattcccgtcaaggccagccccagccccacggaccccgttgtccctgcagtgcccataggcccgcccccggctggtttcagagacatcctgctgcgagaggggcctgagggctttgctcgagctgtgcggaaccacccggggctgctgctgatggacacgaccttcagggacgcccaccagtcactgctggccactcgtgtgcgcacccacgatctcaaaaagatcgccccctatgttgcccacaacttcagcaagctcttcagcatggagaactggggaggagccacgtttgacgtcgccatgcgcttcctgtatgagtgcccctggcggcggctgcaggagctccgggagctcatccccaacatccctttccagatgctgctgcggggggccaatgctgtgggctacaccaactacccagacaacgtggtcttcaagttctgtgaagtggccaaagagaatggcatggatgtcttccgtgtgtttgactccctcaactacttgcccaacatgctgctgggcatggaggcggcaggaagtgccggaggcgtggtggaggctgccatctcatacacgggcgacgtggccgaccccagccgcaccaagtactcactgcagtactacatgggcttggccgaagagctggtgcgagctggcacccacatcctgtgcatcaaggacatggccgggctgctgaagcccacggcctgcaccatgctggtcagctccctccgggaccgcttccccgacctcccactgcacatccacacccacgacacgtcaggggcaggcgtggcagccatgctggcctgtgcccaggctggagctgatgtggtggatgtggcagctgattccatgtctgggatgacttcacagcccagcatgggggccctggtggcctgtaccagagggactcccctggacacagaggtgcccatggagcgcgtgtttgactacagtgagtactgggagggggctcggggactgtacgcggccttcgactgcacggccaccatgaagtctggcaactcggacgtgtatgaaaatgagatcccagggggccagtacaccaacctgcacttccaggcccacagcatggggcttggctccaagttcaaggaggtcaagaaggcctatgtggaggccaaccagatgctgggcgatctcatcaaggtgacgccctcctccaagatcgtgggggacctggcccagtttatggtgcagaatggattgagccgggcagaggccgaagctcaggcggaagagctgtcctttccccgctccgtggtggagttcctgcagggctacatcggtgtcccccatggggggttccccgaaccctttcgctctaaggtactgaaggacctgccaagggtggaggggcggcctggagcctccctccctcccctggatctgcaggcactggagaaggagctggtagaccggcatggggaggaggtgacgccggaagatgtgctctcagcagctatgtaccccgatgtgtttgcccacttcaaggacttcactgccacctttggccccctggatagcctgaatactcgcctcttcctgcagggacccaagatcgcagaggagtttgaggtggagctggagcggggcaagacgctgcacatcaaagccctggccgtgagcgacctgaaccgggccggccagaggcaggtcttctttgagctcaatgggcagctgcggtccatcttggtcaaggacacccaggccatgaaggagatgcacttccaccccaaggccctaaaggacgtgaagggccagatcggggcgcccatgcctgggaaggtgatagacatcaaagtggtggcaggggccaaggtggccaagggccagcccctgtgtgtgctcagtgccatgaagatggagactgtggtgacctcacccatggagggtactgtccgcaaggttcatgtgaccaaggacatgacactggaaggtgacgacctcatcctggagatcgagtgatcttgccccagaccggcagcctggccatccccaagccttcaacagaagctgtgctgccacggcaggcccaggccagccagtgcccgaggccaggaaggccgggccgtggaggtcctgtccacagctggacaggagagacaccgcctgcggtggttcattcctttcagccatcgtcctttcctccggcggacagctgcttacatgttcatctcttgccaaataagggtcccctcctcactggagactacaagtggtgggtcaggtggtcctaggacccaggggaggtttaggggtcctatctcctgggggaaggggagatctaagatgtcccaggtcctgggaagtttactcaataaagctggctttcccctgcc

SEQ ID NO: 14896 - DNA, 1008 bp, Homo sapiens
  source 1..1008: mol_type = unassigned DNA
gggactgatcctctgctttgctccccaggtactgaaggacctgccaagggtggaggggcggcctggagcctccctccctcccctggatctgcaggcactggagaaggagctggtagaccggcatggggaggaggtgacgccggaagatgtgctctcagcagctatgtaccccgatgtgtttgcccacttcaaggacttcactgccacctttggccccctggatagcctgaatactcgcctcttcctgcagggacccaagatcgcagaggagtttgaggtggagctggagcggggcaagacgctgcacatcaaagccctggccgtgagcgacctgaaccgggccggccagaggcaggtcttctttgagctcaatgggcagctgcggtccatcttggtcaaggacacccaggccatgaaggagatgcacttccaccccaaggccctaaaggacgtgaagggccagatcggggcgcccatgcctgggaaggtgatagacatcaaagtggtggcaggggccaaggtggccaagggccagcccctgtgtgtgctcagtgccatgaagatggagactgtggtgacctcacccatggagggtactgtccgcaaggttcatgtgaccaaggacatgacactggaaggtgacgacctcatcctggagatcgagtgatcttgccccagaccggcagcctggccatccccaagccttcaacagaagctgtgctgccacggcaggcccaggccagccagtgcccgaggccaggaaggccgggccgtggaggtcctgtccacagctggacaggagagacaccgcctgcggtggttcattcctttcagccatcgtcctttcctccggcggacagctgcttacatgttcatctcttgccaaataagggtcccctcctcactggagactacaagtggtgggtcaggtggtcctaggacccaggggaggtttaggggtcctatctcctgggggaaggggagatctaagatgtcccaggtcctggg

SEQ ID NO: 14897 - DNA, 291 bp, Homo sapiens
  source 1..291: mol_type = unassigned DNA
cagctgcggtccatcttggtcaaggacacccaggccatgaaggagatgcacttccaccccaaggccctaaaggacgtgaagggccagatcggggcgcccatgcctgggaaggtgatagacatcaaagtggtggcaggggccaaggtggccaagggccagcccctgtgtgtgctcagtgccatgaagatggagactgtggtgacctcacccatggagggtactgtccgcaaggttcatgtgaccaaggacatgacactggaaggtgacgacctcatcctggagatcgagtga

SEQ ID NO: 14898 - DNA, 906 bp, Homo sapiens
  source 1..906: mol_type = unassigned DNA
ggccagctggaagcccggggatcctggagggatgtgtccctgtccctgagcccagccactctcactgctgccctcgactcagcctctgcccagcccaccctgacccactgcccgctttctccccaggccatgtcatggtaaacggtccaaccaccccgattcccgtcaaggccagccccagccccacggaccccgttgtccctgcagtgcccataggcccgcccccggctggtttcagagacatcctgctgcgagaggggcctgagggctttgctcgagctgtgcggaaccacccggggctgctgctgatggacacgaccttcagggacgcccaccagtcactgctggccactcgtgtgcgcacccacgatctcaaaaagatcgccccctatgttgcccacaacttcagcaagctcttcagcatggagaactggggaggagccacgtttgacgtcgccatgcgcttcctgtatgagtgcccctggcggcggctgcaggagctccgggagctcatccccaacatccctttccagatgctgctgcggggggccaatgctgtgggctacaccaactacccagacaacgtggtcttcaagttctgtgaagtggccaaagagaatggcatggatgtcttccgtgtgtttgactccctcaactacttgcccaacatgctgctgggcatggaggcggcaggaagtgccggaggcgtggtggaggctgccatctcatacacgggcgacgtggccgaccccagccgcaccaagtactcactgcagtactacatgggcttggccgaagagctggtgcgagctggcacccacatcctgtgcatcaaggacatggccgggctgctgaagcccacggcctgcaccatgctggtcagctccctccgggaccgcttccccg

SEQ ID NO: 14899 - DNA, 621 bp, Homo sapiens
  source 1..621: mol_type = unassigned DNA
tgaggtgtccccaacaattttattataaataaaaacaagactcccagtgggtggctgcagcccctgcctcggtggctgtgagcacctgttggaggggcctgcccttaccctggtctggaggccagaaccgaggaaagggctccctgcccctccaagtacacaggggagcctgaggtactgagaataaaaaccagggagggactcccaggccaggcggttggaggtgaggtccaggttgagggtgtgcagggcaggcatggcgccgatgccggcccagggcacctgccggaggttgttgtaggacaggtccaggtcctccaggctctctaggaagtcgtcgaaggctcccggcgcgatgcggcccagctggttgccgctgaggatgaggtgctgcagattgacggggccccggaggctcccggtgcccagctccaccagcctgttgccgtcaaggtggagggaacgcaggctctcgaggtccccaaaggcgcgggccccaatgcgggtgatggcattgcgagacagtgtcaggtccaccagtcccgtcatgttgcggaagtcagggggccccagggcctggatgaagttgtcagccagccgcagctccactgtgcgccggtc

SEQ ID NO: 14900 - DNA, 1714 bp, Homo sapiens
  source 1..1714: mol_type = unassigned DNA
gtcagtggaggcagcagcggtagaggcggcggcgaggactggcgacggcgaggagatagtgtctgccttctggagagctgaccaaacactaaggatgctgaagttccgaacagtccatgggggcctgaggctcctgggaatccgccgaacctccaccgcccccgctgcctccccaaatgtccggcgcctggagtataagcccatcaagaaagtcatggtggccaacagaggtgagattgccatccgtgtgttccgggcctgcacggagctgggcatccgcaccgtagccatctactctgagcaggacacgggccagatgcaccggcagaaagcagatgaagcctatctcatcggccgcggcctggcccccgtgcaggcctacctgcacatcccagacatcatcaaggtggccaaggagaacaacgtagatgcagtgcaccctggctacgggttcctctctgagcgagcggacttcgcccaggcctgccaggatgcaggggtccggtttattgggccaagcccagaagtggtccgcaagatgggagacaaggtggaggcccgggccatcgccattgctgcgggtgttcccgttgtccctggcacagatgcccccatcacgtccctgcatgaggcccacgagttctccaacacctacggcttccccatcatcttcaaggcggcctatgggggtggagggcgtggcatgagggtggtgcacagctacgaggagctggaggagaattacacccgggcctactcagaggctctggccgcctttgggaatggggcgctgtttgtggagaagttcatcgagaagccacggcacatcgaggtgcagatcttgggggaccagtatgggaacatcctgcacctgtacgagcgagactgctccatccagcggcggcaccagaaggtggtcgagattgcccccgccgcccacctggacccgcagcttcggactcggctcaccagcgactctgtgaaactcgctaaacaggtgggctacgagaacgcaggcaccgtggagttcctggtggacaggcacggcaagcactacttcatcgaggtcaactcccgcctgcaggtggagcacacggtcacagaggagatcaccgacgtagacctggtccatgctcagatccacgtggctgagggcaggagcctacccgacctgggcctgcggcaggagaacatccgcatcaacgggtgtgccatccagtgccgggtcaccaccgaggaccccgcgcgcagcttccagccggacaccggccgcattgaggtgttccggagcggagagggcatgggcatccgcctggataatgcttccgccttccaaggagccgtcatctcgccccactacgactccctgctggtcaaagtcattgcccacggcaaagaccaccccacggccgccaccaagatgagcagggcccttgcggagttccgcgtccgaggtgtgaaggtcagaagacaccaggcacagcccttggccgcagccctgggccgcccctgtggacaggaagccaggaggccccaggctgctgtgactgcccccaccggccctggtagccccacccttgtccgtgtgccaccagcggcccgtgtcctgtcctcccgtctcgggggacctagccagacaacaccagagactagcactgaggtgtccccaacaattttattataaataaaaacaagactcccagtgggtggctgc

SEQ ID NO: 14901 - DNA, 690 bp, Homo sapiens
  source 1..690: mol_type = unassigned DNA
ggatgtggctcagctctgcaggaagccgcggcgtgtaaggcgagggctttccttgttccttgctctcgcactccgcctcccgtaggatcctctactttgtttcagacggggaagctccaggcgcccagacgcagtgattcgcccaaggccgctcattcaggagatagtgtctgccttctggagagctgaccaaacactaaggatgctgaagttccgaacagtccatgggggcctgaggctcctgggaatccgccgaacctccaccgcccccgctgcctccccaaatgtccggcgcctggagtataagcccatcaagaaagtcatggtggccaacagaggtgagattgccatccgtgtgttccgggcctgcacggagctgggcatccgcaccgtagccatctactctgagcaggacacgggccagatgcaccggcagaaagcagatgaagcctatctcatcggccgcggcctggcccccgtgcaggcctacctgcacatcccagacatcatcaaggtggccaaggagaacaacgtagatgcagtgcaccctggctacgggttcctctctgagcgagcggacttcgcccaggcctgccaggatgcaggggtccggtttattgggccaagcccagaagtggtccgcaagatgggagacaaggtggaggcccgggccatcgccattgctgcggg

SEQ ID NO: 14902 - DNA, 706 bp, Homo sapiens
  source 1..706: mol_type = unassigned DNA
ggaggcagcagcggtagaggcggcggcgaggactggcgacggcgaggagctgccttctagtctcacctgtggacactttgccaaaggagtcgggcctgacggtggaagatgggaaatggccaaaagaataaaccatttcctcttacttaccgaatgaaaagcttgcttcatcttggcgttcaagactctctaatatgattccacctgttgggctctttcttccatttgcctccgcagatagtgtctgccttctggagagctgaccaaacactaaggatgctgaagttccgaacagtccatgggggcctgaggctcctgggaatccgccgaacctccaccgcccccgctgcctccccaaatgtccggcgcctggagtataagcccatcaagaaagtcatggtggccaacagaggtgagattgccatccgtgtgttccgggcctgcacggagctgggcatccgcaccgtagccatctactctgagcaggacacgggccagatgcaccggcagaaagcagatgaagcctatctcatcggccgcggcctggcccccgtgcaggcctacctgcacatcccagacatcatcaaggtggccaaggagaacaacgtagatgcagtgcaccctggctacgggttcctctctgagcgagcggacttcgcccaggcctgccaggatgcaggggtccggtttattgggccaagcccag

SEQ ID NO: 14903 - DNA, 512 bp, Homo sapiens
  source 1..512: mol_type = unassigned DNA
cgaggactggcgacggcgaggagatggagaaactgactaaagcgcctcgcgcgaggtccctgagggttcgaacccaagtctgtcaggatcgggagcccaagttgtccccatcgtactggatgtggctcagctctgcaggaagccgcggcgtctgccttctagtctcacctgtggacactttgccaaaggagtcgggcctgacggtggaagatgggaaatggccaaaagaataaaccatttcctcttacttaccgaatgaaaagcttgcttcatcttggcgttcaagactctctaatatgattccacctgttgggctctttcttccatttgcctccgcagatagtgtctgccttctggagagctgaccaaacactaagggtaagtcctgtgcctgaatccaggctggcgggatgcatgggggtcttcaccaggagcagctgtggatgccagcagtttggcatgtcaggtcttaagctcaatcaataaaaaaaggctgcgctctgatttgtgga

SEQ ID NO: 14904 - DNA, 200 bp, Homo sapiens
  source 1..200: mol_type = unassigned DNA
tttgccaaaggagtcgggcctgacggtggaagatgggaaatggccaaaagaataaaccatttcctcttacttaccgaatgaaaagcttgcttcatcttggcgttcaagactctctaatatgattccacctgttgggctctttcttccatttgcctccgcagatagtgtctgccttctggagagctgaccaaacactaagg

SEQ ID NO: 14905 - DNA, 4192 bp, Homo sapiens
  source 1..4192: mol_type = unassigned DNA
gtcagtggaggcagcagcggtagaggcggcggcgaggactggcgacggcgaggagctgccttctagtctcacctgtggacactttgccaaaggagtcgggcctgacggtggaagatgggaaatggccaaaagaataaaccatttcctcttacttaccgaatgaaaagcttgcttcatcttggcgttcaagactctctaatatgattccacctgttgggctctttcttccatttgcctccgcagatagtgtctgccttctggagagctgaccaaacactaaggatgctgaagttccgaacagtccatgggggcctgaggctcctgggaatccgccgaacctccaccgcccccgctgcctccccaaatgtccggcgcctggagtataagcccatcaagaaagtcatggtggccaacagaggtgagattgccatccgtgtgttccgggcctgcacggagctgggcatccgcaccgtagccatctactctgagcaggacacgggccagatgcaccggcagaaagcagatgaagcctatctcatcggccgcggcctggcccccgtgcaggcctacctgcacatcccagacatcatcaaggtggccaaggagaacaacgtagatgcagtgcaccctggctacgggttcctctctgagcgagcggacttcgcccaggcctgccaggatgcaggggtccggtttattgggccaagcccagaagtggtccgcaagatgggagacaaggtggaggcccgggccatcgccattgctgcgggtgttcccgttgtccctggcacagatgcccccatcacgtccctgcatgaggcccacgagttctccaacacctacggcttccccatcatcttcaaggcggcctatgggggtggagggcgtggcatgagggtggtgcacagctacgaggagctggaggagaattacacccgggcctactcagaggctctggccgcctttgggaatggggcgctgtttgtggagaagttcatcgagaagccacggcacatcgaggtgcagatcttgggggaccagtatgggaacatcctgcacctgtacgagcgagactgctccatccagcggcggcaccagaaggtggtcgagattgcccccgccgcccacctggacccgcagcttcggactcggctcaccagcgactctgtgaaactcgctaaacaggtgggctacgagaacgcaggcaccgtggagttcctggtggacaggcacggcaagcactacttcatcgaggtcaactcccgcctgcaggtggagcacacggtcacagaggagatcaccgacgtagacctggtccatgctcagatccacgtggctgagggcaggagcctacccgacctgggcctgcggcaggagaacatccgcatcaacgggtgtgccatccagtgccgggtcaccaccgaggaccccgcgcgcagcttccagccggacaccggccgcattgaggtgttccggagcggagagggcatgggcatccgcctggataatgcttccgccttccaaggagccgtcatctcgccccactacgactccctgctggtcaaagtcattgcccacggcaaagaccaccccacggccgccaccaagatgagcagggcccttgcggagttccgcgtccgaggtgtgaagaccaacatcgccttcctgcagaatgtgctcaacaaccagcagttcctggcaggcactgtggacacccagttcatcgacgagaacccagagctgttccagctgcggcctgcacagaaccgggcccaaaagctgttgcactacctcggccatgtcatggtaaacggtccaaccaccccgattcccgtcaaggccagccccagccccacggaccccgttgtccctgcagtgcccataggcccgcccccggctggtttcagagacatcctgctgcgagaggggcctgagggctttgctcgagctgtgcggaaccacccggggctgctgctgatggacacgaccttcagggacgcccaccagtcactgctggccactcgtgtgcgcacccacgatctcaaaaagatcgccccctatgttgcccacaacttcagcaagctcttcagcatggagaactggggaggagccacgtttgacgtcgccatgcgcttcctgtatgagtgcccctggcggcggctgcaggagctccgggagctcatccccaacatccctttccagatgctgctgcggggggccaatgctgtgggctacaccaactacccagacaacgtggtcttcaagttctgtgaagtggccaaagagaatggcatggatgtcttccgtgtgtttgactccctcaactacttgcccaacatgctgctgggcatggaggcggcaggaagtgccggaggcgtggtggaggctgccatctcatacacgggcgacgtggccgaccccagccgcaccaagtactcactgcagtactacatgggcttggccgaagagctggtgcgagctggcacccacatcctgtgcatcaaggacatggccgggctgctgaagcccacggcctgcaccatgctggtcagctccctccgggaccgcttccccgacctcccactgcacatccacacccacgacacgtcaggggcaggcgtggcagccatgctggcctgtgcccaggctggagctgatgtggtggatgtggcagctgattccatgtctgggatgacttcacagcccagcatgggggccctggtggcctgtaccagagggactcccctggacacagaggtgcccatggagcgcgtgtttgactacagtgagtactgggagggggctcggggactgtacgcggccttcgactgcacggccaccatgaagtctggcaactcggacgtgtatgaaaatgagatcccagggggccagtacaccaacctgcacttccaggcccacagcatggggcttggctccaagttcaaggaggtcaagaaggcctatgtggaggccaaccagatgctgggcgatctcatcaaggtgacgccctcctccaagatcgtgggggacctggcccagtttatggtgcagaatggattgagccgggcagaggccgaagctcaggcggaagagctgtcctttccccgctccgtggtggagttcctgcagggctacatcggtgtcccccatggggggttccccgaaccctttcgctctaaggtactgaaggacctgccaagggtggaggggcggcctggagcctccctccctcccctggatctgcaggcactggagaaggagctggtagaccggcatggggaggaggtgacgccggaagatgtgctctcagcagctatgtaccccgatgtgtttgcccacttcaaggacttcactgccacctttggccccctggatagcctgaatactcgcctcttcctgcagggacccaagatcgcagaggagtttgaggtggagctggagcggggcaagacgctgcacatcaaagccctggccgtgagcgacctgaaccgggccggccagaggcaggtcttctttgagctcaatgggcagctgcggtccatcttggtcaaggacacccaggccatgaaggagatgcacttccaccccaaggccctaaaggacgtgaagggccagatcggggcgcccatgcctgggaaggtgatagacatcaaagtggtggcaggggccaaggtggccaagggccagcccctgtgtgtgctcagtgccatgaagatggagactgtggtgacctcacccatggagggtactgtccgcaaggttcatgtgaccaaggacatgacactggaaggtgacgacctcatcctggagatcgagtgatcttgccccagaccggcagcctggccatccccaagccttcaacagaagctgtgctgccacggcaggcccaggccagccagtgcccgaggccaggaaggccgggccgtggaggtcctgtccacagctggacaggagagacaccgcctgcggtggttcattcctttcagccatcgtcctttcctccggcggacagctgcttacatgttcatctcttgccaaataagggtcccctcctcactggagactacaagtggtgggtcaggtggtcctaggacccaggggaggtttaggggtcctatctcctgggggaaggggagatctaagatgtcccaggtcctgggaagtttactcaataaagctggctttcccctgc

SEQ ID NO: 14906 - DNA, 1470 bp, Homo sapiens
  source 1..1470: mol_type = unassigned DNA
atggtggccaacagaggtgagattgccatccgtgtgttccgggcctgcacggagctgggcatccgcaccgtagccatctactctgagcaggacacgggccagatgcaccggcagaaagcagatgaagcctatctcatcggccgcggcctggcccccgtgcaggcctacctgcacatcccagacatcatcaaggtggccaaggagaacaacgtagatgcagtgcaccctggctacgggttcctctctgagcgagcggacttcgcccaggcctgccaggatgcaggggtccggtttattgggccaagcccagaagtggtccgcaagatgggagacaaggtggaggcccgggccatcgccattgctgcgggtgttcccgttgtccctggcacagatgcccccatcacgtccctgcatgaggcccacgagttctccaacacctacggcttccccatcatcttcaaggcggcctatgggggtggagggcgtggcatgagggtggtgcacagctacgaggagctggaggagaattacacccgggcctactcagaggctctggccgcctttgggaatggggcgctgtttgtggagaagttcatcgagaagccacggcacatcgaggtgcagatcttgggggaccagtatgggaacatcctgcacctgtacgagcgagactgctccatccagcggcggcaccagaaggtggtcgagattgcccccgccgcccacctggacccgcagcttcggactcggctcaccagcgactctgtgaaactcgctaaacaggtgggctacgagaacgcaggcaccgtggagttcctggtggacaggcacggcaagcactacttcatcgaggtcaactcccgcctgcaggtggagcacacggtcacagaggagatcaccgacgtagacctggtccatgctcagatccacgtggctgagggcaggagcctacccgacctgggcctgcggcaggagaacatccgcatcaacgggtgtgccatccagtgccgggtcaccaccgaggaccccgcgcgcagcttccagccggacaccggccgcattgaggtgttccggagcggagagggcatgggcatccgcctggataatgcttccgccttccaaggagccgtcatctcgccccactacgactccctgctggtcaaagtcattgcccacggcaaagaccaccccacggccgccaccaagatgagcagggcccttgcggagttccgcgtccgaggtgtgaaggtcagaagacaccaggcacagcccttggccgcagccctgggccgcccctgtggacaggaagccaggaggccccaggctgctgtgactgcccccaccggccctggtagccccacccttgtccgtgtgccaccagcggcccgtgtcctgtcctcccgtctcgggggacctagccagacaacaccagagactagcactgaggtgtccccaacaattttattataa

SEQ ID NO: 14907 - DNA, 1607 bp, Homo sapiens; identical to SEQ ID NO: 14893
  source 1..1607: mol_type = unassigned DNA

SEQ ID NO: 14908 - DNA, 4004 bp, Homo sapiens; identical to SEQ ID NO: 14894
  source 1..4004: mol_type = unassigned DNA

SEQ ID NO: 14909 - DNA, 4005 bp, Homo sapiens; identical to SEQ ID NO: 14895
  source 1..4005: mol_type = unassigned DNA

SEQ ID NO: 14910 - DNA, 1008 bp, Homo sapiens; identical to SEQ ID NO: 14896
  source 1..1008: mol_type = unassigned DNA

SEQ ID NO: 14911 - DNA, 291 bp, Homo sapiens; identical to SEQ ID NO: 14897
  source 1..291: mol_type = unassigned DNA

SEQ ID NO: 14912 - DNA, 906 bp, Homo sapiens; identical to SEQ ID NO: 14898
  source 1..906: mol_type = unassigned DNA

SEQ ID NO: 14913 - DNA, 621 bp, Homo sapiens; identical to SEQ ID NO: 14899
  source 1..621: mol_type = unassigned DNA

SEQ ID NO: 14914 - DNA, 1714 bp, Homo sapiens; identical to SEQ ID NO: 14900
  source 1..1714: mol_type = unassigned DNA

SEQ ID NO: 14915 - DNA, 690 bp, Homo sapiens; identical to SEQ ID NO: 14901
  source 1..690: mol_type = unassigned DNA

SEQ ID NO: 14916 - DNA, 706 bp, Homo sapiens; identical to SEQ ID NO: 14902
  source 1..706: mol_type = unassigned DNA

SEQ ID NO: 14917 - DNA, 512 bp, Homo sapiens; identical to SEQ ID NO: 14903
  source 1..512: mol_type = unassigned DNA

SEQ ID NO: 14918 - DNA, 200 bp, Homo sapiens; identical to SEQ ID NO: 14904
  source 1..200: mol_type = unassigned DNA

SEQ ID NO: 14919 - DNA, 4192 bp, Homo sapiens; identical to SEQ ID NO: 14905
  source 1..4192: mol_type = unassigned DNA

SEQ ID NO: 14920 - DNA, 1470 bp, Homo sapiens; identical to SEQ ID NO: 14906
  source 1..1470: mol_type = unassigned DNA

SEQ ID NO: 14921 - DNA, 14138 bp, Homo sapiens
  source 1..14138: mol_type = unassigned DNA
gcactgcagcgccagcgtccgagcgggcggccgagctcccggagcggcctggccccgagccccgagcgggcgtcgctcagcagcaggtcgcggccgcagccccatccagccccgcgcccgccatgccgtccgcgggccccgcctgagctgcggcctccgcgcgcgggcgggcctggggacggcggggccatgcgcgcgctgccctaacgatgccgcccgccgcgcccgcccgcctggcgctggccctgggcctgggcctgtggctcggggcgctggcggggggccccgggcgcggctgcgggccctgcgagcccccctgcctctgcggcccagcgcccggcgccgcctgccgcgtcaactgctcgggccgcgggctgcggacgctcggtcccgcgctgcgcatccccgcggacgccacagcgctagacgtctcccacaacctgctccgggcgctggacgttgggctcctggcgaacctctcggcgctggcagagctggatataagcaacaacaagatttctacgttagaagaaggaatatttgctaatttatttaatttaagtgaaataaacctgagtgggaacccgtttgagtgtgactgtggcctggcgtggctgccgcgatgggcggaggagcagcaggtgcgggtggtgcagcccgaggcagccacgtgtgctgggcctggctccctggctggccagcctctgcttggcatccccttgctggacagtggctgtggtgaggagtatgtcgcctgcctccctgacaacagctcaggcaccgtggcagcagtgtccttttcagctgcccacgaaggcctgcttcagccagaggcctgcagcgccttctgcttctccaccggccagggcctcgcagccctctcggagcagggctggtgcctgtgtggggcggcccagccctccagtgcctcctttgcctgcctgtccctctgctccggccccccgccacctcctgcccccacctgtaggggccccaccctcctccagcacgtcttccctgcctccccaggggccaccctggtggggccccacggacctctggcctctggccagctagcagccttccacatcgctgccccgctccctgtcactgccacacgctgggacttcggagacggctccgccgaggtggatgccgctgggccggctgcctcgcatcgctatgtgctgcctgggcgctatcacgtgacggccgtgctggccctgggggccggctcagccctgctggggacagacgtgcaggtggaagcggcacctgccgccctggagctcgtgtgcccgtcctcggtgcagagtgacgagagcctcgacctcagcatccagaaccgcggtggttcaggcctggaggccgcctacagcatcgtggccctgggcgaggagccggcccgagcggtgcacccgctctgcccctcggacacggagatcttccctggcaacgggcactgctaccgcctggtggtggagaaggcggcctggctgcaggcgcaggagcagtgtcaggcctgggccggggccgccctggcaatggtggacagtcccgccgtgcagcgcttcctggtctcccgggtcaccaggagcctagacgtgtggatcggcttctcgactgtgcagggggtggaggtgggcccagcgccgcagggcgaggccttcagcctggagagctgccagaactggctgcccggggagccacacccagccacagccgagcactgcgtccggctcgggcccaccgggtggtgtaacaccgacctgtgctcagcgccgcacagctacgtctgcgagctgcagcccggaggcccagtgcaggatgccgagaacctcctcgtgggagcgcccagtggggacctgcagggacccctgacgcctctggcacagcaggacggcctctcagccccgcacgagcccgtggaggtcatggtattcccgggcctgcgtctgagccgtgaagccttcctcaccacggccgaatttgggacccaggagctccggcggcccgcccagctgcggctgcaggtgtaccggctcctcagcacagcagggaccccggagaacggcagcgagcctgagagcaggtccccggacaacaggacccagctggcccccgcgtgcatgccagggggacgctggtgccctggagccaacatctgcttgccgctggacgcctcctgccacccccaggcctgcgccaatggctgcacgtcagggccagggctacccggggccccctatgcgctatggagagagttcctcttctccgttcccgcggggccccccgcgcagtactcggtcaccctccacggccaggatgtcctcatgctccctggtgacctcgttggcttgcagcacgacgctggccctggcgccctcctgcactgctcgccggctcccggccaccctggtccccgggccccgtacctctccgccaacgcctcgtcatggctgccccacttgccagcccagctggagggcacttgggcctgccctgcctgtgccctgcggctgcttgcagccacggaacagctcaccgtgctgctgggcttgaggcccaaccctggactgcggctgcctgggcgctatgaggtccgggcagaggtgggcaatggcgtgtccaggcacaacctctcctgcagctttgacgtggtctccccagtggctgggctgcgggtcatctaccctgccccccgcgacggccgcctctacgtgcccaccaacggctcagccttggtgctccaggtggactctggtgccaacgccacggccacggctcgctggcctgggggcagtgtcagcgcccgctttgagaatgtctgccctgccctggtggccaccttcgtgcccggctgcccctgggagaccaacgataccctgttctcagtggtagcactgccgtggctcagtgagggggagcacgtggtggacgtggtggtggaaaacagcgccagccgggccaacctcagcctgcgggtgacggcggaggagcccatctgtggcctccgcgccacgcccagccccgaggcccgtgtactgcagggagtcctagtgaggtacagccccgtggtggaggccggctcggacatggtcttccggtggaccatcaacgacaagcagtccctgaccttccagaacgtggtcttcaatgtcatttatcagagcgcggcggtcttcaagctctcactgacggcctccaaccacgtgagcaacgtcaccgtgaactacaacgtaaccgtggagcggatgaacaggatgcagggtctgcaggtctccacagtgccggccgtgctgtcccccaatgccacgctagcactgacggcgggcgtgctggtggactcggccgtggaggtggccttcctgtggacctttggggatggggagcaggccctccaccagttccagcctccgtacaacgagtccttcccggttccagacccctcggtggcccaggtgctggtggagcacaatgtcatgcacacctacgctgccccaggtgagtacctcctgaccgtgctggcatctaatgccttcgagaacctgacgcagcaggtgcctgtgagcgtgcgcgcctccctgccctccgtggctgtgggtgtgagtgacggcgtcctggtggccggccggcccgtcaccttctacccgcacccgctgccctcgcctgggggtgttctttacacgtgggacttcggggacggctcccctgtcctgacccagagccagccggctgccaaccacacctatgcctcgaggggcacctaccacgtgcgcctggaggtcaacaacacggtgagcggtgcggcggcccaggcggatgtgcgcgtctttgaggagctccgcggactcagcgtggacatgagcctggccgtggagcagggcgcccccgtggtggtcagcgccgcggtgcagacgggcgacaacatcacgtggaccttcgacatgggggacggcaccgtgctgtcgggcccggaggcaacagtggagcatgtgtacctgcgggcacagaactgcacagtgaccgtgggtgcggccagccccgccggccacctggcccggagcctgcacgtgctggtcttcgtcctggaggtgctgcgcgttgaacccgccgcctgcatccccacgcagcctgacgcgcggctcacggcctacgtcaccgggaacccggcccactacctcttcgactggaccttcggggatggctcctccaacacgaccgtgcgggggtgcccgacggtgacacacaacttcacgcggagcggcacgttccccctggcgctggtgctgtccagccgcgtgaacagggcgcattacttcaccagcatctgcgtggagccagaggtgggcaacgtcaccctgcagccagagaggcagtttgtgcagctcggggacgaggcctggctggtggcatgtgcctggcccccgttcccctaccgctacacctgggactttggcaccgaggaagccgcccccacccgtgccaggggccctgaggtgacgttcatctaccgagacccaggctcctatcttgtgacagtcaccgcgtccaacaacatctctgctgccaatgactcagccctggtggaggtgcaggagcccgtgctggtcaccagcatcaaggtcaatggctcccttgggctggagctgcagcagccgtacctgttctctgctgtgggccgtgggcgccccgccagctacctgtgggatctgggggacggtgggtggctcgagggtccggaggtcacccacgcttacaacagcacaggtgacttcaccgttagggtggccggctggaatgaggtgagccgcagcgaggcctggctcaatgtgacggtgaagcggcgcgtgcgggggctcgtcgtcaatgcaagccgcacggtggtgcccctgaatgggagcgtgagcttcagcacgtcgctggaggccggcagtgatgtgcgctattcctgggtgctctgtgaccgctgcacgcccatccctgggggtcctaccatctcttacaccttccgctccgtgggcaccttcaatatcatcgtcacggctgagaacgaggtgggctccgcccaggacagcatcttcgtctatgtcctgcagctcatagaggggctgcaggtggtgggcggtggccgctacttccccaccaaccacacggtacagctgcaggccgtggttagggatggcaccaacgtctcctacagctggactgcctggagggacaggggcccggccctggccggcagcggcaaaggcttctcgctcaccgtgctcgaggccggcacctaccatgtgcagctgcgggccaccaacatgctgggcagcgcctgggccgactgcaccatggacttcgtggagcctgtggggtggctgatggtggccgcctccccgaacccagctgccgtcaacacaagcgtcaccctcagtgccgagctggctggtggcagtggtgtcgtatacacttggtccttggaggaggggctgagctgggagacctccgagccatttaccacccatagcttccccacacccggcctgcacttggtcaccatgacggcagggaacccgctgggctcagccaacgccaccgtggaagtggatgtgcaggtgcctgtgagtggcctcagcatcagggccagcgagcccggaggcagcttcgtggcggccgggtcctctgtgcccttttgggggcagctggccacgggcaccaatgtgagctggtgctgggctgtgcccggcggcagcagcaagcgtggccctcatgtcaccatggtcttcccggatgctggcaccttctccatccggctcaatgcctccaacgcagtcagctgggtctcagccacgtacaacctcacggcggaggagcccatcgtgggcctggtgctgtgggccagcagcaaggtggtggcgcccgggcagctggtccattttcagatcctgctggctgccggctcagctgtcaccttccgcctgcaggtcggcggggccaaccccgaggtgctccccgggccccgtttctcccacagcttcccccgcgtcggagaccacgtggtgagcgtgcggggcaaaaaccacgtgagctgggcccaggcgcaggtgcgcatcgtggtgctggaggccgtgagtgggctgcaggtgcccaactgctgcgagcctggcatcgccacgggcactgagaggaacttcacagcccgcgtgcagcgcggctctcgggtcgcctacgcctggtacttctcgctgcagaaggtccagggcgactcgctggtcatcctgtcgggccgcgacgtcacctacacgcccgtggccgcggggctgttggagatccaggtgcgcgccttcaacgccctgggcagtgagaaccgcacgctggtgctggaggttcaggacgccgtccagtatgtggccctgcagagcggcccctgcttcaccaaccgctcggcgcagtttgaggccgccaccagccccagcccccggcgtgtggcctaccactgggactttggggatgggtcgccagggcaggacacagatgagcccagggccgagcactcctacctgaggcctggggactaccgcgtgcaggtgaacgcctccaacctggtgagcttcttcgtggcgcaggccacggtgaccgtccaggtgctggcctgccgggagccggaggtggacgtggtcctgcccctgcaggtgctgatgcggcgatcacagcgcaactacttggaggcccacgttgacctgcgcgactgcgtcacctaccagactgagtaccgctgggaggtgtatcgcaccgccagctgccagcggccggggcgcccagcgcgtgtggccctgcccggcgtggacgtgagccggcctcggctggtgctgccgcggctggcgctgcctgtggggcactactgctttgtgtttgtcgtgtcatttggggacacgccactgacacagagcatccaggccaatgtgacggtggcccccgagcgcctggtgcccatcattgagggtggctcataccgcgtgtggtcagacacacgggacctggtgctggatgggagcgagtcctacgaccccaacctggaggacggcgaccagacgccgctcagtttccactgggcctgtgtggcttcgacacagagggaggctggcgggtgtgcgctgaactttgggccccgcgggagcagcacggtcaccattccacgggagcggctggcggctggcgtggagtacaccttcagcctgaccgtgtggaaggccggccgcaaggaggaggccaccaaccagacggtgctgatccggagtggccgggtgcccattgtgtccttggagtgtgtgtcctgcaaggcacaggccgtgtacgaagtgagccgcagctcctacgtgtacttggagggccgctgcctcaattgcagcagcggctccaagcgagggcggtgggctgcacgtacgttcagcaacaagacgctggtgctggatgagaccaccacatccacgggcagtgcaggcatgcgactggtgctgcggcggggcgtgctgcgggacggcgagggatacaccttcacgctcacggtgctgggccgctctggcgaggaggagggctgcgcctccatccgcctgtcccccaaccgcccgccgctggggggctcttgccgcctcttcccactgggcgctgtgcacgccctcaccaccaaggtgcacttcgaatgcacgggctggcatgacgcggaggatgctggcgccccgctggtgtacgccctgctgctgcggcgctgtcgccagggccactgcgaggagttctgtgtctacaagggcagcctctccagctacggagccgtgctgcccccgggtttcaggccacacttcgaggtgggcctggccgtggtggtgcaggaccagctgggagccgctgtggtcgccctcaacaggtctttggccatcaccctcccagagcccaacggcagcgcaacggggctcacagtctggctgcacgggctcaccgctagtgtgctcccagggctgctgcggcaggccgatccccagcacgtcatcgagtactcgttggccctggtcaccgtgctgaacgagtacgagcgggccctggacgtggcggcagagcccaagcacgagcggcagcaccgagcccagatacgcaagaacatcacggagactctggtgtccctgagggtccacactgtggatgacatccagcagatcgctgctgcgctggcccagtgcatggggcccagcagggagctcgtatgccgctcgtgcctgaagcagacgctgcacaagctggaggccatgatgctcatcctgcaggcagagaccaccgcgggcaccgtgacgcccaccgccatcggagacagcatcctcaacatcacaggagacctcatccacctggccagctcggacgtgcgggcaccacagccctcagagctgggagccgagtcaccatctcggatggtggcgtcccaggcctacaacctgacctctgccctcatgcgcatcctcatgcgctcccgcgtgctcaacgaggagcccctgacgctggcgggcgaggagatcgtggcccagggcaagcgctcggacccgcggagcctgctgtgctatggcggcgccccagggcctggctgccacttctccatccccgaggctttcagcggggccctggccaacctcagtgacgtggtgcagctcatctttctggtggactccaatccctttccctttggctatatcagcaactacaccgtctccaccaaggtggcctcgatggcattccagacacaggccggcgcccagatccccatcgagcggctggcctcagagcgcgccatcaccgtgaaggtgcccaacaactcggactgggctgcccggggccaccgcagctccgccaactccgccaactccgttgtggtccagccccaggcctccgtcggtgctgtggtcaccctggacagcagcaaccctgcggccgggctgcatctgcagctcaactatacgctgctggacggccactacctgtctgaggaacctgagccctacctggcagtctacctacactcggagccccggcccaatgagcacaactgctcggctagcaggaggatccgcccagagtcactccagggtgctgaccaccggccctacaccttcttcatttccccggggagcagagacccagcggggagttaccatctgaacctctccagccacttccgctggtcggcgctgcaggtgtccgtgggcctgtacacgtccctgtgccagtacttcagcgaggaggacatggtgtggcggacagaggggctgctgcccctggaggagacctcgccccgccaggccgtctgcctcacccgccacctcaccgccttcggcgccagcctcttcgtgcccccaagccatgtccgctttgtgtttcctgagccgacagcggatgtaaactacatcgtcatgctgacatgtgctgtgtgcctggtgacctacatggtcatggccgccatcctgcacaagctggaccagttggatgccagccggggccgcgccatccctttctgtgggcagcggggccgcttcaagtacgagatcctcgtcaagacaggctggggccggggctcaggtaccacggcccacgtgggcatcatgctgtatggggtggacagccggagcggccaccggcacctggacggcgacagagccttccaccgcaacagcctggacatcttccggatcgccaccccgcacagcctgggtagcgtgtggaagatccgagtgtggcacgacaacaaagggctcagccctgcctggttcctgcagcacgtcatcgtcagggacctgcagacggcacgcagcgccttcttcctggtcaatgactggctttcggtggagacggaggccaacgggggcctggtggagaaggaggtgctggccgcgagcgacgcagcccttttgcgcttccggcgcctgctggtggctgagctgcagcgtggcttctttgacaagcacatctggctctccatatgggaccggccgcctcgtagccgtttcactcgcatccagagggccacctgctgcgttctcctcatctgcctcttcctgggcgccaacgccgtgtggtacggggctgttggcgactctgcctacagcacggggcatgtgtccaggctgagcccgctgagcgtcgacacagtcgctgttggcctggtgtccagcgtggttgtctatcccgtctacctggccatcctttttctcttccggatgtcccggagcaaggtggctgggagcccgagccccacacctgccgggcagcaggtgctggacatcgacagctgcctggactcgtccgtgctggacagctccttcctcacgttctcaggcctccacgctgagcaggcctttgttggacagatgaagagtgacttgtttctggatgattctaagagtctggtgtgctggccctccggcgagggaacgctcagttggccggacctgctcagtgacccgtccattgtgggtagcaatctgcggcagctggcacggggccaggcgggccatgggctgggcccagaggaggacggcttctccctggccagcccctactcgcctgccaaatccttctcagcatcagatgaagacctgatccagcaggtccttgccgagggggtcagcagcccagcccctacccaagacacccacatggaaacggacctgctcagcagcctgtccagcactcctggggagaagacagagacgctggcgctgcagaggctgggggagctggggccacccagcccaggcctgaactgggaacagccccaggcagcgaggctgtccaggacaggactggtggagggtctgcggaagcgcctgctgccggcctggtgtgcctccctggcccacgggctcagcctgctcctggtggctgtggctgtggctgtctcagggtgggtgggtgcgagcttccccccgggcgtgagtgttgcgtggctcctgtccagcagcgccagcttcctggcctcattcctcggctgggagccactgaaggtcttgctggaagccctgtacttctcactggtggccaagcggctgcacccggatgaagatgacaccctggtagagagcccggctgtgacgcctgtgagcgcacgtgtgccccgcgtacggccaccccacggctttgcactcttcctggccaaggaagaagcccgcaaggtcaagaggctacatggcatgctgcggagcctcctggtgtacatgctttttctgctggtgaccctgctggccagctatggggatgcctcatgccatgggcacgcctaccgtctgcaaagcgccatcaagcaggagctgcacagccgggccttcctggccatcacgcggtctgaggagctctggccatggatggcccacgtgctgctgccctacgtccacgggaaccagtccagcccagagctggggcccccacggctgcggcaggtgcggctgcaggaagcactctacccagaccctcccggccccagggtccacacgtgctcggccgcaggaggcttcagcaccagcgattacgacgttggctgggagagtcctcacaatggctcggggacgtgggcctattcagcgccggatctgctgggggcatggtcctggggctcctgtgccgtgtatgacagcgggggctacgtgcaggagctgggcctgagcctggaggagagccgcgaccggctgcgcttcctgcagctgcacaactggctggacaacaggagccgcgctgtgttcctggagctcacgcgctacagcccggccgtggggctgcacgccgccgtcacgctgcgcctcgagttcccggcggccggccgcgccctggccgccctcagcgtccgcccctttgcgctgcgccgcctcagcgcgggcctctcgctgcctctgctcacctcggtgtgcctgctgctgttcgccgtgcacttcgccgtggccgaggcccgtacttggcacagggaagggcgctggcgcgtgctgcggctcggagcctgggcgcggtggctgctggtggcgctgacggcggccacggcactggtacgcctcgcccagctgggtgccgctgaccgccagtggacccgtttcgtgcgcggccgcccgcgccgcttcactagcttcgaccaggtggcgcagctgagctccgcagcccgtggcctggcggcctcgctgctcttcctgcttttggtcaaggctgcccagcagctacgcttcgtgcgccagtggtccgtctttggcaagacattatgccgagctctgccagagctcctgggggtcaccttgggcctggtggtgctcggggtagcctacgcccagctggccatcctgctcgtgtcttcctgtgtggactccctctggagcgtggcccaggccctgttggtgctgtgccctgggactgggctctctaccctgtgtcctgccgagtcctggcacctgtcacccctgctgtgtgtggggctctgggcactgcggctgtggggcgccctacggctgggggctgttattctccgctggcgctaccacgccttgcgtggagagctgtaccggccggcctgggagccccaggactacgagatggtggagttgttcctgcgcaggctgcgcctctggatgggcctcagcaaggtcaaggagttccgccacaaagtccgctttgaagggatggagccgctgccctctcgctcctccaggggctccaaggtatccccggatgtgcccccacccagcgctggctccgatgcctcgcacccctccacctcctccagccagctggatgggctgagcgtgagcctgggccggctggggacaaggtgtgagcctgagccctcccgcctccaagccgtgttcgaggccctgctcacccagtttgaccgactcaaccaggccacagaggacgtctaccagctggagcagcagctgcacagcctgcaaggccgcaggagcagccgggcgcccgccggatcttcccgtggcccatccccgggcctgcggccagcactgcccagccgccttgcccgggccagtcggggtgtggacctggccactggccccagcaggacaccccttcgggccaagaacaaggtccaccccagcagcacttagtcctccttcctggcgggggtgggccgtggagtcggagtggacaccgctcagtattactttctgccgctgtcaaggccgagggccaggcagaatggctgcacgtaggttccccagagagcaggcaggggcatctgtctgtctgtgggcttcagcactttaaagaggctgtgtggccaaccaggacccagggtcccctccccagctcccttgggaaggacacagcagtattggacggtttctagcctctgagatgctaatttatttccccgagtcctcaggtacagcgggctgtgcccggccccaccccctgggcagatgtcccccactgctaaggctgctggcttcagggagggttagcctgcaccgccgccaccctgcccctaagttattacctctccagttcctaccgtactccctgcaccgtctcactgtgtgtctcgtgtcagtaatttatatggtgttaaaatgtgtatatttttgtatgtcactattttcactagggctgaggggcctgcgcccagagctggcctcccccaacacctgctgcgcttggtaggtgtggtggcgttatggcagcccggctgctgcttggatgcgagcttggccttgggccggtgctgggggcacagctgtctgccaggcactctcatcaccccagaggccttgtcatcctcccttgccccaggccaggtagcaagagagcagcgcccaggcctgctggcatcaggtctgggcaagtagcaggactaggcatgtcagaggaccccagggtggttagaggaaaagactcctcctgggggctggctcccagggtggaggaaggtgactgtgtgtgtgtgtgtgtgcgcgcgcgcacgcgcgagtgtgctgtatggcccaggcagcctcaaggccctcggagctggctgtgcctgcttctgtgtaccacttctgtgggcatggccgcttctagagcctcgacacccccccaacccccgcaccaagcagacaaagtcaataaaagagctgtctgactgc

SEQ ID NO: 14922 - DNA, 14135 bp, Homo sapiens
  source 1..14135: mol_type = unassigned DNA
gcactgcagcgccagcgtccgagcgggcggccgagctcccggagcggcctggccccgagccccgagcgggcgtcgctcagcagcaggtcgcggccgcagccccatccagccccgcgcccgccatgccgtccgcgggccccgcctgagctgcggcctccgcgcgcgggcgggcctggggacggcggggccatgcgcgcgctgccctaacgatgccgcccgccgcgcccgcccgcctggcgctggccctgggcctgggcctgtggctcggggcgctggcggggggccccgggcgcggctgcgggccctgcgagcccccctgcctctgcggcccagcgcccggcgccgcctgccgcgtcaactgctcgggccgcgggctgcggacgctcggtcccgcgctgcgcatccccgcggacgccacagcgctagacgtctcccacaacctgctccgggcgctggacgttgggctcctggcgaacctctcggcgctggcagagctggatataagcaacaacaagatttctacgttagaagaaggaatatttgctaatttatttaatttaagtgaaataaacctgagtgggaacccgtttgagtgtgactgtggcctggcgtggctgccgcgatgggcggaggagcagcaggtgcgggtggtgcagcccgaggcagccacgtgtgctgggcctggctccctggctggccagcctctgcttggcatccccttgctggacagtggctgtggtgaggagtatgtcgcctgcctccctgacaacagctcaggcaccgtggcagcagtgtccttttcagctgcccacgaaggcctgcttcagccagaggcctgcagcgccttctgcttctccaccggccagggcctcgcagccctctcggagcagggctggtgcctgtgtggggcggcccagccctccagtgcctcctttgcctgcctgtccctctgctccggccccccgccacctcctgcccccacctgtaggggccccaccctcctccagcacgtcttccctgcctccccaggggccaccctggtggggccccacggacctctggcctctggccagctagcagccttccacatcgctgccccgctccctgtcactgccacacgctgggacttcggagacggctccgccgaggtggatgccgctgggccggctgcctcgcatcgctatgtgctgcctgggcgctatcacgtgacggccgtgctggccctgggggccggctcagccctgctggggacagacgtgcaggtggaagcggcacctgccgccctggagctcgtgtgcccgtcctcggtgcagagtgacgagagcctcgacctcagcatccagaaccgcggtggttcaggcctggaggccgcctacagcatcgtggccctgggcgaggagccggcccgagcggtgcacccgctctgcccctcggacacggagatcttccctggcaacgggcactgctaccgcctggtggtggagaaggcggcctggctgcaggcgcaggagcagtgtcaggcctgggccggggccgccctggcaatggtggacagtcccgccgtgcagcgcttcctggtctcccgggtcaccaggagcctagacgtgtggatcggcttctcgactgtgcagggggtggaggtgggcccagcgccgcagggcgaggccttcagcctggagagctgccagaactggctgcccggggagccacacccagccacagccgagcactgcgtccggctcgggcccaccgggtggtgtaacaccgacctgtgctcagcgccgcacagctacgtctgcgagctgcagcccggaggcccagtgcaggatgccgagaacctcctcgtgggagcgcccagtggggacctgcagggacccctgacgcctctggcacagcaggacggcctctcagccccgcacgagcccgtggaggtcatggtattcccgggcctgcgtctgagccgtgaagccttcctcaccacggccgaatttgggacccaggagctccggcggcccgcccagctgcggctgcaggtgtaccggctcctcagcacagcagggaccccggagaacggcagcgagcctgagagcaggtccccggacaacaggacccagctggcccccgcgtgcatgccagggggacgctggtgccctggagccaacatctgcttgccgctggacgcctcctgccacccccaggcctgcgccaatggctgcacgtcagggccagggctacccggggccccctatgcgctatggagagagttcctcttctccgttcccgcggggccccccgcgcagtactcggtcaccctccacggccaggatgtcctcatgctccctggtgacctcgttggcttgcagcacgacgctggccctggcgccctcctgcactgctcgccggctcccggccaccctggtccccgggccccgtacctctccgccaacgcctcgtcatggctgccccacttgccagcccagctggagggcacttgggcctgccctgcctgtgccctgcggctgcttgcagccacggaacagctcaccgtgctgctgggcttgaggcccaaccctggactgcggctgcctgggcgctatgaggtccgggcagaggtgggcaatggcgtgtccaggcacaacctctcctgcagctttgacgtggtctccccagtggctgggctgcgggtcatctaccctgccccccgcgacggccgcctctacgtgcccaccaacggctcagccttggtgctccaggtggactctggtgccaacgccacggccacggctcgctggcctgggggcagtgtcagcgcccgctttgagaatgtctgccctgccctggtggccaccttcgtgcccggctgcccctgggagaccaacgataccctgttctcagtggtagcactgccgtggctcagtgagggggagcacgtggtggacgtggtggtggaaaacagcgccagccgggccaacctcagcctgcgggtgacggcggaggagcccatctgtggcctccgcgccacgcccagccccgaggcccgtgtactgcagggagtcctagtgaggtacagccccgtggtggaggccggctcggacatggtcttccggtggaccatcaacgacaagcagtccctgaccttccagaacgtggtcttcaatgtcatttatcagagcgcggcggtcttcaagctctcactgacggcctccaaccacgtgagcaacgtcaccgtgaactacaacgtaaccgtggagcggatgaacaggatgcagggtctgcaggtctccacagtgccggccgtgctgtcccccaatgccacgctagcactgacggcgggcgtgctggtggactcggccgtggaggtggccttcctgtggacctttggggatggggagcaggccctccaccagttccagcctccgtacaacgagtccttcccggttccagacccctcggtggcccaggtgctggtggagcacaatgtcatgcacacctacgctgccccaggtgagtacctcctgaccgtgctggcatctaatgccttcgagaacctgacgcagcaggtgcctgtgagcgtgcgcgcctccctgccctccgtggctgtgggtgtgagtgacggcgtcctggtggccggccggcccgtcaccttctacccgcacccgctgccctcgcctgggggtgttctttacacgtgggacttcggggacggctcccctgtcctgacccagagccagccggctgccaaccacacctatgcctcgaggggcacctaccacgtgcgcctggaggtcaacaacacggtgagcggtgcggcggcccaggcggatgtgcgcgtctttgaggagctccgcggactcagcgtggacatgagcctggccgtggagcagggcgcccccgtggtggtcagcgccgcggtgcagacgggcgacaacatcacgtggaccttcgacatgggggacggcaccgtgctgtcgggcccggaggcaacagtggagcatgtgtacctgcgggcacagaactgcacagtgaccgtgggtgcggccagccccgccggccacctggcccggagcctgcacgtgctggtcttcgtcctggaggtgctgcgcgttgaacccgccgcctgcatccccacgcagcctgacgcgcggctcacggcctacgtcaccgggaacccggcccactacctcttcgactggaccttcggggatggctcctccaacacgaccgtgcgggggtgcccgacggtgacacacaacttcacgcggagcggcacgttccccctggcgctggtgctgtccagccgcgtgaacagggcgcattacttcaccagcatctgcgtggagccagaggtgggcaacgtcaccctgcagccagagaggcagtttgtgcagctcggggacgaggcctggctggtggcatgtgcctggcccccgttcccctaccgctacacctgggactttggcaccgaggaagccgcccccacccgtgccaggggccctgaggtgacgttcatctaccgagacccaggctcctatcttgtgacagtcaccgcgtccaacaacatctctgctgccaatgactcagccctggtggaggtgcaggagcccgtgctggtcaccagcatcaaggtcaatggctcccttgggctggagctgcagcagccgtacctgttctctgctgtgggccgtgggcgccccgccagctacctgtgggatctgggggacggtgggtggctcgagggtccggaggtcacccacgcttacaacagcacaggtgacttcaccgttagggtggccggctggaatgaggtgagccgcagcgaggcctggctcaatgtgacggtgaagcggcgcgtgcgggggctcgtcgtcaatgcaagccgcacggtggtgcccctgaatgggagcgtgagcttcagcacgtcgctggaggccggcagtgatgtgcgctattcctgggtgctctgtgaccgctgcacgcccatccctgggggtcctaccatctcttacaccttccgctccgtgggcaccttcaatatcatcgtcacggctgagaacgaggtgggctccgcccaggacagcatcttcgtctatgtcctgcagctcatagaggggctgcaggtggtgggcggtggccgctacttccccaccaaccacacggtacagctgcaggccgtggttagggatggcaccaacgtctcctacagctggactgcctggagggacaggggcccggccctggccggcagcggcaaaggcttctcgctcaccgtgctcgaggccggcacctaccatgtgcagctgcgggccaccaacatgctgggcagcgcctgggccgactgcaccatggacttcgtggagcctgtggggtggctgatggtggccgcctccccgaacccagctgccgtcaacacaagcgtcaccctcagtgccgagctggctggtggcagtggtgtcgtatacacttggtccttggaggaggggctgagctgggagacctccgagccatttaccacccatagcttccccacacccggcctgcacttggtcaccatgacggcagggaacccgctgggctcagccaacgccaccgtggaagtggatgtgcaggtgcctgtgagtggcctcagcatcagggccagcgagcccggaggcagcttcgtggcggccgggtcctctgtgcccttttgggggcagctggccacgggcaccaatgtgagctggtgctgggctgtgcccggcggcagcagcaagcgtggccctcatgtcaccatggtcttcccggatgctggcaccttctccatccggctcaatgcctccaacgcagtcagctgggtctcagccacgtacaacctcacggcggaggagcccatcgtgggcctggtgctgtgggccagcagcaaggtggtggcgcccgggcagctggtccattttcagatcctgctggctgccggctcagctgtcaccttccgcctgcaggtcggcggggccaaccccgaggtgctccccgggccccgtttctcccacagcttcccccgcgtcggagaccacgtggtgagcgtgcggggcaaaaaccacgtgagctgggcccaggcgcaggtgcgcatcgtggtgctggaggccgtgagtgggctgcaggtgcccaactgctgcgagcctggcatcgccacgggcactgagaggaacttcacagcccgcgtgcagcgcggctctcgggtcgcctacgcctggtacttctcgctgcagaaggtccagggcgactcgctggtcatcctgtcgggccgcgacgtcacctacacgcccgtggccgcggggctgttggagatccaggtgcgcgccttcaacgccctgggcagtgagaaccgcacgctggtgctggaggttcaggacgccgtccagtatgtggccctgcagagcggcccctgcttcaccaaccgctcggcgcagtttgaggccgccaccagccccagcccccggcgtgtggcctaccactgggactttggggatgggtcgccagggcaggacacagatgagcccagggccgagcactcctacctgaggcctggggactaccgcgtgcaggtgaacgcctccaacctggtgagcttcttcgtggcgcaggccacggtgaccgtccaggtgctggcctgccgggagccggaggtggacgtggtcctgcccctgcaggtgctgatgcggcgatcacagcgcaactacttggaggcccacgttgacctgcgcgactgcgtcacctaccagactgagtaccgctgggaggtgtatcgcaccgccagctgccagcggccggggcgcccagcgcgtgtggccctgcccggcgtggacgtgagccggcctcggctggtgctgccgcggctggcgctgcctgtggggcactactgctttgtgtttgtcgtgtcatttggggacacgccactgacacagagcatccaggccaatgtgacggtggcccccgagcgcctggtgcccatcattgagggtggctcataccgcgtgtggtcagacacacgggacctggtgctggatgggagcgagtcctacgaccccaacctggaggacggcgaccagacgccgctcagtttccactgggcctgtgtggcttcgacacagagggaggctggcgggtgtgcgctgaactttgggccccgcgggagcagcacggtcaccattccacgggagcggctggcggctggcgtggagtacaccttcagcctgaccgtgtggaaggccggccgcaaggaggaggccaccaaccagacggtgctgatccggagtggccgggtgcccattgtgtccttggagtgtgtgtcctgcaaggcacaggccgtgtacgaagtgagccgcagctcctacgtgtacttggagggccgctgcctcaattgcagcagcggctccaagcgagggcggtgggctgcacgtacgttcagcaacaagacgctggtgctggatgagaccaccacatccacgggcagtgcaggcatgcgactggtgctgcggcggggcgtgctgcgggacggcgagggatacaccttcacgctcacggtgctgggccgctctggcgaggaggagggctgcgcctccatccgcctgtcccccaaccgcccgccgctggggggctcttgccgcctcttcccactgggcgctgtgcacgccctcaccaccaaggtgcacttcgaatgcacgggctggcatgacgcggaggatgctggcgccccgctggtgtacgccctgctgctgcggcgctgtcgccagggccactgcgaggagttctgtgtctacaagggcagcctctccagctacggagccgtgctgcccccgggtttcaggccacacttcgaggtgggcctggccgtggtggtgcaggaccagctgggagccgctgtggtcgccctcaacaggtctttggccatcaccctcccagagcccaacggcagcgcaacggggctcacagtctggctgcacgggctcaccgctagtgtgctcccagggctgctgcggcaggccgatccccagcacgtcatcgagtactcgttggccctggtcaccgtgctgaacgagtacgagcgggccctggacgtggcggcagagcccaagcacgagcggcagcaccgagcccagatacgcaagaacatcacggagactctggtgtccctgagggtccacactgtggatgacatccagcagatcgctgctgcgctggcccagtgcatggggcccagcagggagctcgtatgccgctcgtgcctgaagcagacgctgcacaagctggaggccatgatgctcatcctgcaggcagagaccaccgcgggcaccgtgacgcccaccgccatcggagacagcatcctcaacatcacaggagacctcatccacctggccagctcggacgtgcgggcaccacagccctcagagctgggagccgagtcaccatctcggatggtggcgtcccaggcctacaacctgacctctgccctcatgcgcatcctcatgcgctcccgcgtgctcaacgaggagcccctgacgctggcgggcgaggagatcgtggcccagggcaagcgctcggacccgcggagcctgctgtgctatggcggcgccccagggcctggctgccacttctccatccccgaggctttcagcggggccctggccaacctcagtgacgtggtgcagctcatctttctggtggactccaatccctttccctttggctatatcagcaactacaccgtctccaccaaggtggcctcgatggcattccagacacaggccggcgcccagatccccatcgagcggctggcctcagagcgcgccatcaccgtgaaggtgcccaacaactcggactgggctgcccggggccaccgcagctccgccaactccgccaactccgttgtggtccagccccaggcctccgtcggtgctgtggtcaccctggacagcagcaaccctgcggccgggctgcatctgcagctcaactatacgctgctggacggccactacctgtctgaggaacctgagccctacctggcagtctacctacactcggagccccggcccaatgagcacaactgctcggctagcaggaggatccgcccagagtcactccagggtgctgaccaccggccctacaccttcttcatttccccggggagcagagacccagcggggagttaccatctgaacctctccagccacttccgctggtcggcgctgcaggtgtccgtgggcctgtacacgtccctgtgccagtacttcagcgaggaggacatggtgtggcggacagaggggctgctgcccctggaggagacctcgccccgccaggccgtctgcctcacccgccacctcaccgccttcggcgccagcctcttcgtgcccccaagccatgtccgctttgtgtttcctgagccgacagcggatgtaaactacatcgtcatgctgacatgtgctgtgtgcctggtgacctacatggtcatggccgccatcctgcacaagctggaccagttggatgccagccggggccgcgccatccctttctgtgggcagcggggccgcttcaagtacgagatcctcgtcaagacaggctggggccggggctcaggtaccacggcccacgtgggcatcatgctgtatggggtggacagccggagcggccaccggcacctggacggcgacagagccttccaccgcaacagcctggacatcttccggatcgccaccccgcacagcctgggtagcgtgtggaagatccgagtgtggcacgacaacaaagggctcagccctgcctggttcctgcagcacgtcatcgtcagggacctgcagacggcacgcagcgccttcttcctggtcaatgactggctttcggtggagacggaggccaacgggggcctggtggagaaggaggtgctggccgcgagcgacgcagcccttttgcgcttccggcgcctgctggtggctgagctgcagcgtggcttctttgacaagcacatctggctctccatatgggaccggccgcctcgtagccgtttcactcgcatccagagggccacctgctgcgttctcctcatctgcctcttcctgggcgccaacgccgtgtggtacggggctgttggcgactctgcctacagcacggggcatgtgtccaggctgagcccgctgagcgtcgacacagtcgctgttggcctggtgtccagcgtggttgtctatcccgtctacctggccatcctttttctcttccggatgtcccggagcaaggtggctgggagcccgagccccacacctgccgggcagcaggtgctggacatcgacagctgcctggactcgtccgtgctggacagctccttcctcacgttctcaggcctccacgctgaggcctttgttggacagatgaagagtgacttgtttctggatgattctaagagtctggtgtgctggccctccggcgagggaacgctcagttggccggacctgctcagtgacccgtccattgtgggtagcaatctgcggcagctggcacggggccaggcgggccatgggctgggcccagaggaggacggcttctccctggccagcccctactcgcctgccaaatccttctcagcatcagatgaagacctgatccagcaggtccttgccgagggggtcagcagcccagcccctacccaagacacccacatggaaacggacctgctcagcagcctgtccagcactcctggggagaagacagagacgctggcgctgcagaggctgggggagctggggccacccagcccaggcctgaactgggaacagccccaggcagcgaggctgtccaggacaggactggtggagggtctgcggaagcgcctgctgccggcctggtgtgcctccctggcccacgggctcagcctgctcctggtggctgtggctgtggctgtctcagggtgggtgggtgcgagcttccccccgggcgtgagtgttgcgtggctcctgtccagcagcgccagcttcctggcctcattcctcggctgggagccactgaaggtcttgctggaagccctgtacttctcactggtggccaagcggctgcacccggatgaagatgacaccctggtagagagcccggctgtgacgcctgtgagcgcacgtgtgccccgcgtacggccaccccacggctttgcactcttcctggccaaggaagaagcccgcaaggtcaagaggctacatggcatgctgcggagcctcctggtgtacatgctttttctgctggtgaccctgctggccagctatggggatgcctcatgccatgggcacgcctaccgtctgcaaagcgccatcaagcaggagctgcacagccgggccttcctggccatcacgcggtctgaggagctctggccatggatggcccacgtgctgctgccctacgtccacgggaaccagtccagcccagagctggggcccccacggctgcggcaggtgcggctgcaggaagcactctacccagaccctcccggccccagggtccacacgtgctcggccgcaggaggcttcagcaccagcgattacgacgttggctgggagagtcctcacaatggctcggggacgtgggcctattcagcgccggatctgctgggggcatggtcctggggctcctgtgccgtgtatgacagcgggggctacgtgcaggagctgggcctgagcctggaggagagccgcgaccggctgcgcttcctgcagctgcacaactggctggacaacaggagccgcgctgtgttcctggagctcacgcgctacagcccggccgtggggctgcacgccgccgtcacgctgcgcctcgagttcccggcggccggccgcgccctggccgccctcagcgtccgcccctttgcgctgcgccgcctcagcgcgggcctctcgctgcctctgctcacctcggtgtgcctgctgctgttcgccgtgcacttcgccgtggccgaggcccgtacttggcacagggaagggcgctggcgcgtgctgcggctcggagcctgggcgcggtggctgctggtggcgctgacggcggccacggcactggtacgcctcgcccagctgggtgccgctgaccgccagtggacccgtttcgtgcgcggccgcccgcgccgcttcactagcttcgaccaggtggcgcagctgagctccgcagcccgtggcctggcggcctcgctgctcttcctgcttttggtcaaggctgcccagcagctacgcttcgtgcgccagtggtccgtctttggcaagacattatgccgagctctgccagagctcctgggggtcaccttgggcctggtggtgctcggggtagcctacgcccagctggccatcctgctcgtgtcttcctgtgtggactccctctggagcgtggcccaggccctgttggtgctgtgccctgggactgggctctctaccctgtgtcctgccgagtcctggcacctgtcacccctgctgtgtgtggggctctgggcactgcggctgtggggcgccctacggctgggggctgttattctccgctggcgctaccacgccttgcgtggagagctgtaccggccggcctgggagccccaggactacgagatggtggagttgttcctgcgcaggctgcgcctctggatgggcctcagcaaggtcaaggagttccgccacaaagtccgctttgaagggatggagccgctgccctctcgctcctccaggggctccaaggtatccccggatgtgcccccacccagcgctggctccgatgcctcgcacccctccacctcctccagccagctggatgggctgagcgtgagcctgggccggctggggacaaggtgtgagcctgagccctcccgcctccaagccgtgttcgaggccctgctcacccagtttgaccgactcaaccaggccacagaggacgtctaccagctggagcagcagctgcacagcctgcaaggccgcaggagcagccgggcgcccgccggatcttcccgtggcccatccccgggcctgcggccagcactgcccagccgccttgcccgggccagtcggggtgtggacctggccactggccccagcaggacaccccttcgggccaagaacaaggtccaccccagcagcacttagtcctccttcctggcgggggtgggccgtggagtcggagtggacaccgctcagtattactttctgccgctgtcaaggccgagggccaggcagaatggctgcacgtaggttccccagagagcaggcaggggcatctgtctgtctgtgggcttcagcactttaaagaggctgtgtggccaaccaggacccagggtcccctccccagctcccttgggaaggacacagcagtattggacggtttctagcctctgagatgctaatttatttccccgagtcctcaggtacagcgggctgtgcccggccccaccccctgggcagatgtcccccactgctaaggctgctggcttcagggagggttagcctgcaccgccgccaccctgcccctaagttattacctctccagttcctaccgtactccctgcaccgtctcactgtgtgtctcgtgtcagtaatttatatggtgttaaaatgtgtatatttttgtatgtcactattttcactagggctgaggggcctgcgcccagagctggcctcccccaacacctgctgcgcttggtaggtgtggtggcgttatggcagcccggctgctgcttggatgcgagcttggccttgggccggtgctgggggcacagctgtctgccaggcactctcatcaccccagaggccttgtcatcctcccttgccccaggccaggtagcaagagagcagcgcccaggcctgctggcatcaggtctgggcaagtagcaggactaggcatgtcagaggaccccagggtggttagaggaaaagactcctcctgggggctggctcccagggtggaggaaggtgactgtgtgtgtgtgtgtgtgcgcgcgcgcacgcgcgagtgtgctgtatggcccaggcagcctcaaggccctcggagctggctgtgcctgcttctgtgtaccacttctgtgggcatggccgcttctagagcctcgacacccccccaacccccgcaccaagcagacaaagtcaataaaagagctgtctgactgc

SEQ ID NO: 14923 - DNA, 1140 bp, Homo sapiens
  source 1..1140: mol_type = unassigned DNA
ggctgcaagcagacagatttctcgtccgcaggctgcccagcagctacgcttcgtgcgccagtggtccgtctttggcaagacattatgccgagctctgccagagctcctgggggtcaccttgggcctggtggtgctcggggtagcctacgcccagctggccatcctgctcgtgtcttcctgtgtggactccctctggagcgtggcccaggccctgttggtgctgtgccctgggactgggctctctaccctgtgtcctgccgagtcctggcacctgtcacccctgctgtgtgtggggctctgggcactgcggctgtggggcgccctacggctgggggctgttattctccgctggcgctaccacgccttgcgtggagagctgtaccggccggcctgggagccccaggactacgagatggtggagttgttcctgcgcaggctgcgcctctggatgggcctcagcaaggtcaaggagttccgccacaaagtccgctttgaagggatggagccgctgccctctcgctcctccaggggctccaaggtatccccggatgtgcccccacccagcgctggctccgatgcctcgcacccctccacctcctccagccagctggatgggctgagcgtgagcctgggccggctggggacaaggtgtgagcctgagccctcccgcctccaagccgtgttcgaggccctgctcacccagtttgaccgactcaaccaggccacagaggacgtctaccagctggagcagcagctgcacagcctgcaaggccgcaggagcagccgggcgcccgccggatcttcccgtggcccatccccgggcctgcggccagcactgcccagccgccttgcccgggccagtcggggtgtggacctggccactggccccagcaggacaccccttcgggccaagaacaaggtccaccccagcagcacttagtcctccttcctggcgggggtgggccgtggagtcggagtggacaccgctcagtattactttctgccgctgtcaaggccgagggccaggcagaatggctgcacgtaggttccccagagagcaggcaggggcatctgtctgtctgtgggcttcagcactttaaagaggctgtgtggccaaccaggacccagggtcccctcccc

SEQ ID NO: 14924 - DNA, 568 bp, Homo sapiens
  source 1..568: mol_type = unassigned DNA
aaggacaagggagtagttctccaggagtgccgcggcctcctgaccagcctggctccggggtgccggaagggctggggtgcggcacccacgccacccctctccggcagggcatggtcctggggctcctgtgccgtgtatgacagcgggggctacgtgcaggagctgggcctgagcctggaggagagccgcgaccggctgcgcttcctgcagctgcacaactggctggacaacaggtgtgcctgctgctgttcgccgtgcacttcgccgtggccgaggcccgtacttggcacagggaagggcgctggcgcgtgctgcggctcggagcctgggcgcggtggctgctggtggcgctgacggcggccacggcactggtacgcctcgcccagctgggtgccgctgaccgccagtggacccgtttcgtgcgcggccgcccgcgccgcttcactagcttcgaccaggtggcgcagctgagctccgcagcccgtggcctggcggcctcgctgctcttcctgcttttggtcaaggctgcccagcagctacgcttcgtgcgccagtggtccgtctttgg

SEQ ID NO: 14925 - DNA, 665 bp, Homo sapiens
  source 1..665: mol_type = unassigned DNA
ccggccccagggtccacacgtgctcggccgcaggaggcttcagcaccagcgattacgacgttggctgggagagtcctcacaatggctcggggacgtgggcctattcagcgccggatctgctggggagctgggcctgagcctggaggagagccgcgaccggctgcgcttcctgcagctgcacaactggctggacaacaggagccgcgctgtgttcctggagctcacgcgctacagcccggccgtggggctgcacgccgccgtcacgctgcgcctcgagttcccggcggccggccgcgccctggccgccctcagcgtccgcccctttgcgctgcgccgcctcagcgcgggcctctcgctgcctctgctcacctcggtgtgcctgctgctgttcgccgtgcacttcgccgtggccgaggcccgtacttggcacagggaagggcgctggcgcgtgctgcggctcggagcctgggcgcggtggctgctggtggcgctgacggcggccacggcactggtacgcctcgcccagctgggtgccgctgaccgccagtggacccgtttcgtgcgcggccgcccgcgccgcttcactagcttcgaccaggtggcgcagctgagctccgcagcccgtggcctggcggcctcgctgctcttcctgcttttggtcaagg

SEQ ID NO: 14926 - DNA, 6464 bp, Homo sapiens
  source 1..6464: mol_type = unassigned DNA
cccacacccggcctgcacttggtcaccatgacggcagggaacccgctgggctcagccaacgccaccgtggaagtggatgtgcaggtgcctgtgagtggcctcagcatcagggccagcgagcccggaggcagcttcgtggcggccgggtcctctgtgcccttttgggggcagctggccacgggcaccaatgtgagctggtgctgggctgtgcccggcggcagcagcaagcgtggccctcatgtcaccatggtcttcccggatgctggcaccttctccatccggctcaatgcctccaacgcagtcagctgggtctcagccacgtacaacctcacggcggaggagcccatcgtgggcctggtgctgtgggccagcagcaaggtggtggcgcccgggcagctggtccattttcagatcctgctggctgccggctcagctgtcaccttccgcctgcaggtcggcggggccaaccccgaggtgctccccgggccccgtttctcccacagcttcccccgcgtcggagaccacgtggtgagcgtgcggggcaaaaaccacgtgagctgggcccaggcgcaggtgcgcatcgtggtgctggaggccgtgagtgggctgcaggtgcccaactgctgcgagcctggcatcgccacgggcactgagaggaacttcacagcccgcgtgcagcgcggctctcgggtcgcctacgcctggtacttctcgctgcagaaggtccagggcgactcgctggtcatcctgtcgggccgcgacgtcacctacacgcccgtggccgcggggctgttggagatccaggtgcgcgccttcaacgccctgggcagtgagaaccgcacgctggtgctggaggttcaggacgccgtccagtatgtggccctgcagagcggcccctgcttcaccaaccgctcggcgcagtttgaggccgccaccagccccagcccccggcgtgtggcctaccactgggactttggggatgggtcgccagggcaggacacagatgagcccagggccgagcactcctacctgaggcctggggactaccgcgtgcaggtgaacgcctccaacctggtgagcttcttcgtggcgcaggccacggtgaccgtccaggtgctggcctgccgggagccggaggtggacgtggtcctgcccctgcaggtgctgatgcggcgatcacagcgcaactacttggaggcccacgttgacctgcgcgactgcgtcacctaccagactgagtaccgctgggaggtgtatcgcaccgccagctgccagcggccggggcgcccagcgcgtgtggccctgcccggcgtggacgtgagccggcctcggctggtgctgccgcggctggcgctgcctgtggggcactactgctttgtgtttgtcgtgtcatttggggacacgccactgacacagagcatccaggccaatgtgacggtggcccccgagcgcctggtgcccatcattgagggtggctcataccgcgtgtggtcagacacacgggacctggtgctggatgggagcgagtcctacgaccccaacctggaggacggcgaccagacgccgctcagtttccactgggcctgtgtggcttcgacacagagggaggctggcgggtgtgcgctgaactttgggccccgcgggagcagcacggtcaccattccacgggagcggctggcggctggcgtggagtacaccttcagcctgaccgtgtggaaggccggccgcaaggaggaggccaccaaccagacggtgctgatccggagtggccgggtgcccattgtgtccttggagtgtgtgtcctgcaaggcacaggccgtgtacgaagtgagccgcagctcctacgtgtacttggagggccgctgcctcaattgcagcagcggctccaagcgagggcggtgggctgcacgtacgttcagcaacaagacgctggtgctggatgagaccaccacatccacgggcagtgcaggcatgcgactggtgctgcggcggggcgtgctgcgggacggcgagggatacaccttcacgctcacggtgctgggccgctctggcgaggaggagggctgcgcctccatccgcctgtcccccaaccgcccgccgctggggggctcttgccgcctcttcccactgggcgctgtgcacgccctcaccaccaaggtgcacttcgaatgcacgggctggcatgacgcggaggatgctggcgccccgctggtgtacgccctgctgctgcggcgctgtcgccagggccactgcgaggagttctgtgtctacaagggcagcctctccagctacggagccgtgctgcccccgggtttcaggccacacttcgaggtgggcctggccgtggtggtgcaggaccagctgggagccgctgtggtcgccctcaacaggtctttggccatcaccctcccagagcccaacggcagcgcaacggggctcacagtctggctgcacgggctcaccgctagtgtgctcccagggctgctgcggcaggccgatccccagcacgtcatcgagtactcgttggccctggtcaccgtgctgaacgagtacgagcgggccctggacgtggcggcagagcccaagcacgagcggcagcaccgagcccagatacgcaagaacatcacggagactctggtgtccctgagggtccacactgtggatgacatccagcagatcgctgctgcgctggcccagtgcatggggcccagcagggagctcgtatgccgctcgtgcctgaagcagacgctgcacaagctggaggccatgatgctcatcctgcaggcagagaccaccgcgggcaccgtgacgcccaccgccatcggagacagcatcctcaacatcacaggagacctcatccacctggccagctcggacgtgcgggcaccacagccctcagagctgggagccgagtcaccatctcggatggtggcgtcccaggcctacaacctgacctctgccctcatgcgcatcctcatgcgctcccgcgtgctcaacgaggagcccctgacgctggcgggcgaggagatcgtggcccagggcaagcgctcggacccgcggagcctgctgtgctatggcggcgccccagggcctggctgccacttctccatccccgaggctttcagcggggccctggccaacctcagtgacgtggtgcagctcatctttctggtggactccaatccctttccctttggctatatcagcaactacaccgtctccaccaagctccgccaactccgccaactccgttgtggtccagccccaggcctccgtcggtgctgtggtcaccctggacagcagcaaccctgcggccgggctgcatctgcagctcaactatacgctgctggacggccactacctgtctgaggaacctgagccctacctggcagtctacctacactcggagccccggcccaatgagcacaactgctcggctagcaggaggatccgcccagagtcactccagggtgctgaccaccggccctacaccttcttcatttccccggggagcagagacccagcggggagttaccatctgaacctctccagccacttccgctggtcggcgctgcaggtgtccgtgggcctgtacacgtccctgtgccagtacttcagcgaggaggacatggtgtggcggacagaggggctgctgcccctggaggagacctcgccccgccaggccgtctgcctcacccgccacctcaccgccttcggcgccagcctcttcgtgcccccaagccatgtccgctttgtgtttcctgagccgacagcggatgtaaactacatcgtcatgctgacatgtgctgtgtgcctggtgacctacatggtcatggccgccatcctgcacaagctggaccagttggatgccagccggggccgcgccatccctttctgtgggcagcggggccgcttcaagtacgagatcctcgtcaagacaggctggggccggggctcaggtaccacggcccacgtgggcatcatgctgtatggggtggacagccggagcggccaccggcacctggacggcgacagagccttccaccgcaacagcctggacatcttccggatcgccaccccgcacagcctgggtagcgtgtggaagatccgagtgtggcacgacaacaaagggctcagccctgcctggttcctgcagcacgtcatcgtcagggacctgcagacggcacgcagcgccttcttcctggtcaatgactggctttcggtggagacggaggccaacgggggcctggtggagaaggaggtgctggccgcgagcgacgcagcccttttgcgcttccggcgcctgctggtggctgagctgcagcgtggcttctttgacaagcacatctggctctccatatgggaccggccgcctcgtagccgtttcactcgcatccagagggccacctgctgcgttctcctcatctgcctcttcctgggcgccaacgccgtgtggtacggggctgttggcgactctgcctacagcacggggcatgtgtccaggctgagcccgctgagcgtcgacacagtcgctgttggcctggtgtccagcgtggttgtctatcccgtctacctggccatcctttttctcttccggatgtcccggagcaaggtggctgggagcccgagccccacacctgccgggcagcaggtgctggacatcgacagctgcctggactcgtccgtgctggacagctccttcctcacgttctcaggcctccacgctgagcaggcctttgttggacagatgaagagtgacttgtttctggatgattctaagagtctggtgtgctggccctccggcgagggaacgctcagttggccggacctgctcagtgacccgtccattgtgggtagcaatctgcggcagctggcacggggccaggcgggccatgggctgggcccagaggaggacggcttctccctggccagcccctactcgcctgccaaatccttctcagcatcagatgaagacctgatccagcaggtccttgccgagggggtcagcagcccagcccctacccaagacacccacatggaaacggacctgctcagcagcctgtccagcactcctggggagaagacagagacgctggcgctgcagaggctgggggagctggggccacccagcccaggcctgaactgggaacagccccaggcagcgaggctgtccaggacaggactggtggagggtctgcggaagcgcctgctgccggcctggtgtgcctccctggcccacgggctcagcctgctcctggtggctgtggctgtggctgtctcagggtgggtgggtgcgagcttccccccgggcgtgagtgttgcgtggctcctgtccagcagcgccagcttcctggcctcattcctcggctgggagccactgaaggtcttgctggaagccctgtacttctcactggtggccaagcggctgcacccggatgaagatgacaccctggtagagagcccggctgtgacgcctgtgagcgcacgtgtgccccgcgtacggccaccccacggctttgcactcttcctggccaaggaagaagcccgcaaggtcaagaggctacatggcatgctgcggagcctcctggtgtacatgctttttctgctggtgaccctgctggccagctatggggatgcctcatgccatgggcacgcctaccgtctgcaaagcgccatcaagcaggagctgcacagccgggccttcctggccatcacgcggtctgaggagctctggccatggatggcccacgtgctgctgccctacgtccacgggaaccagtccagcccagagctggggcccccacggctgcggcaggtgcggctgcaggaagcactctacccagaccctcccggccccagggtccacacgtgctcggccgcaggaggcttcagcaccagcgattacgacgttggctgggagagtcctcacaatggctcggggacgtgggcctattcagcgccggatctgctgggggcatggtcctggggctcctgtgccgtgtatgacagcgggggctacgtgcaggagctgggcctgagcctggaggagagccgcgaccggctgcgcttcctgcagctgcacaactggctggacaacaggagccgcgctgtgttcctggagctcacgcgctacagcccggccgtggggctgcacgccgccgtcacgctgcgcctcgagttcccggcggccggccgcgccctggccgccctcagcgtccgcccctttgcgctgcgccgcctcagcgcgggcctctcgctgcctctgctcacctcggtgtgcctgctgctgttcgccgtgcacttcgccgtggccgaggcccgtacttggcacagggaagggcgctggcgcgtgctgcggctcggagcctgggcgcggtggctgctggtggcgctgacggcggccacggcactggtacgcctcgcccagctgggtgccgctgaccgccagtggacccgtttcgtgc

SEQ ID NO: 14927 - DNA, 696 bp, Homo sapiens
  source 1..696: mol_type = unassigned DNA
ggcaggtctgaggagctctggccatggatggcccacgtgctgctgccctacgtccacgggaaccagtccagcccagagctggggcccccacggctgcggcaggtgcggctgcaggaagcactctacccagaccctcccggccccagggtccacacgtgctcggccgcaggaggcttcagcaccagcgattacgacgttggctgggagagtcctcacaatggctcggggacgtgggcctattcagcgccggatctgctggggtgagcagagcgagggccccgggcgtctacgccaaggacaagggagtagttctccaggagtgccgcggcctcctgaccagcctggctccggggtgccggaagggctggggtgcggcacccacgccacccctctccggcagggcatggtcctggggctcctgtgccgtgtatgacagcgggggctacgtgcaggagctgggcctgagcctggaggagagccgcgaccggctgcgcttcctgcagctgcacaactggctggacaacaggagccgcgctgtgttcctggagctcacgcgctacagcccggccgtggggctgcacgccgccgtcacgctgcgcctcgagttcccggcggccggccgcgccctggccgccctcagcgtccgcccctttgcgctgcgccgcctcagcgcgggcctctcgctgcctctgctca

SEQ ID NO: 14928 - DNA, 608 bp, Homo sapiens
  source 1..608: mol_type = unassigned DNA
gcgtgagtgttgcgtggctcctgtccagcagcgccagcttcctggcctcattcctcggctgggagccactgaaggtcttgctggaagccctgtacttctcactggtggccaagcggctgcacccggatgaagatgacaccctggtagagagcccggctgtgacgcctgtgagcgcacgtgtgccccgcgtacggccaccccacggctttgcactcttcctggccaaggaagaagcccgcaaggtcaagaggctacatggcatgctgcgggtctgaggagctctggccatggatggcccacgtgctgctgccctacgtccacgggaaccagtccagcccagagctggggcccccacggctgcggcaggtgcggctgcaggaagcactctacccagaccctcccggccccagggtccacacgtgctcggccgcaggaggcttcagcaccagcgattacgacgttggctgggagagtcctcacaatggctcggggacgtgggcctattcagcgccggatctgctgggggcatggtcctggggctcctgtgccgtgtatgacagcgggggctacgtgcaggagctgggcctgagcctggaggagagccgcga

SEQ ID NO: 14929 - DNA, 575 bp, Homo sapiens
  source 1..575: mol_type = unassigned DNA
tttgcctttagtccagccagaccctaggggacatgtggacatgtgtagatacctttgtggctgctagaactggaggtaggtgctgctggcatcagtaggcagaggggagggacacaggtccgtgtcttgcagtgcacaggacgggcccatgacagacaactgtctgccccagaacatccccaggataaggctgagaagcccaggtctagccgtggccagcagggcagtgggagccatgttccctgggtctctggtggccgctcactcgaggcgggcatggggcagtaggggctggagcgtgtgactgatgctgtggcaggtctgaggagctctggccatggatggcccacgtgctgctgccctacgtccacgggaaccagtccagcccagagctggggcccccacggctgcggcaggtgcggctgcaggaagcactctacccagaccctcccggccccagggtccacacgtgctcggccgcaggaggcttcagcaccagcgattacgacgttggctgggagagtcctcacaatggctcggggacgtgggcctattcagcgccggatctgctgggg

SEQ ID NO: 14930 - DNA, 661 bp, Homo sapiens
  source 1..661: mol_type = unassigned DNA
cccagcccaggcctgaactgggaacagccccaggcagcgaggctgtccaggacaggactggtggagggtctgcggaagcgcctgctgccggcctggtgtgcctccctggcccacgggctcagcctgctcctggtggctgtggctgtggctgtctcagggtgggtgggtgcgagcttccccccgggcgtgagtgttgcgtggctcctgtccagcagcgccagcttcctggcctcattcctcggctgggagccactgaaggtcttgctggaagccctgtacttctcactggtggccaagcggctgcacccggatgaagatgacaccctggtagagagcccggctgtgacgcctgtgagcgcacgtgtgccccgcgtacggccaccccacggctttgcactcttcctggccaaggaagaagcccgcaaggtcaagaggctacatggcatgctgcggagcctcctggtgtacatgctttttctgctggtgaccctgctggccagctatggggatgcctcatgccatgggcacgcctaccgtctgcaaagcgccatcaagcaggagctgcacagccgggccttcctggccatcacgcggtacgggcatccggtgcactggtctgtcttctgggctttagttttgcctttagtccagccagacccta

SEQ ID NO: 14931 - DNA, 447 bp, Homo sapiens
  source 1..447: mol_type = unassigned DNA
gcgtggctcctgtccagcagcgccagcttcctggcctcattcctcggctgggagccactgaaggtcttgctggaagccctgtacttctcactggtggccaagcggctgcacccggatgaagatgacaccctggtagagagcccggctgtgacgcctgtgagcgcacgtgtgccccgcgtacggccaccccacggctttgcactcttcctggccaaggaagaagcccgcaaggtcaagaggctacatggcatgctgcgggtgagcctgggtgcggcctgtgcccctgccacctccgtctcttgtctcccacctcccacccatgcacgcaggacactcctgtccccctttcctcacctcagaaggcccttaggggttcaatgctctgcagcctttgcccggtctccctcctaccccacgccccccacttgctgccccagtccctgccag

SEQ ID NO: 14932 - DNA, 603 bp, Homo sapiens
  source 1..603: mol_type = unassigned DNA
ctgcctggttcctgcagcacgtcatcgtcagggacctgcagacggcacgcagcgccttcttcctggtcaatgactggctttcggtggagacggaggccaacgggggcctggtggagaaggaggtgctggccgcgagcgacgcagcccttttgcgcttccggcgcctgctggtggctgagctgcagcgtggcttctttgacaagcacatctggctctccatatgggaccggccgcctcgtagccgtttcactcgcatccagagggccacctgctgcgttctcctcatctgcctcttcctgggcgccaacgccgtgtggtacggggctgttggcgactctgcctacaggtggctgggagcccgagccccacacctgccgggcagcaggtgctggacatcgacagctgcctggactcgtccgtgctggacagctccttcctcacgttctcaggcctccacgctgaggtgaggactctactgggggtcctgggctgggctgggggtcctgccgccttggcgcagcttggactcaagacactgtgcacctctcagcaggcctttgttggacagatgaagagtgacttgtttctggatgattctaagag

SEQ ID NO: 14933 - DNA, 2040 bp, Homo sapiens
  source 1..2040: mol_type = unassigned DNA
ctctgccctcatgcgcatcctcatgcgctcccgcgtgctcaacgaggagcccctgacgctggcgggcgaggagatcgtggcccagggcaagcgctcggacccgcggagcctgctgtgctatggcggcgccccagggcctggctgccacttctccatccccgaggctttcagcggggccctggccaacctcagtgacgtggtgcagctcatctttctggtggactccaatccctttccctttggctatatcagcaactacaccgtctccaccaaggtggcctcgatggcattccagacacaggccggcgcccagatccccatcgagcggctggcctcagagcgcgccatcaccgtgaaggtgcccaacaactcggactgggctgcccggggccaccgcagctccgccaactccgccaactccgttgtggtccagccccaggcctccgtcggtgctgtggtcaccctggacagcagcaaccctgcggccgggctgcatctgcagctcaactatacgctgctggacggccactacctgtctgaggaacctgagccctacctggcagtctacctacactcggagccccggcccaatgagcacaactgctcggctagcaggaggatccgcccagagtcactccagggtgctgaccaccggccctacaccttcttcatttccccggggagcagagacccagcggggagttaccatctgaacctctccagccacttccgctggtcggcgctgcaggtgtccgtgggcctgtacacgtccctgtgccagtacttcagcgaggaggacatggtgtggcggacagaggggctgctgcccctggaggagacctcgccccgccaggccgtctgcctcacccgccacctcaccgccttcggcgccagcctcttcgtgcccccaagccatgtccgctttgtgtttcctgagccgacagcggatgtaaactacatcgtcatgctgacatgtgctgtgtgcctggtgacctacatggtcatggccgccatcctgcacaagctggaccagttggatgccagccggggccgcgccatccctttctgtgggcagcggggccgcttcaagtacgagatcctcgtcaagacaggctggggccggggctcaggtaccacggcccacgtgggcatcatgctgtatggggtggacagccggagcggccaccggcacctggacggcgacagagccttccaccgcaacagcctggacatcttccggatcgccaccccgcacagcctgggtagcgtgtggaagatccgagtgtggcacgacaacaaagggctcagccctgcctggttcctgcagcacgtcatcgtcagggacctgcagacggcacgcagcgccttcttcctggtcaatgactggctttcggtggagacggaggccaacgggggcctggtggagaaggaggtgctggccgcgagcgacgcagcccttttgcgcttccggcgcctgctggtggctgagctgcagcgtggcttctttgacaagcacatctggctctccatatgggaccggccgcctcgtagccgtttcactcgcatccagagggccacctgctgcgttctcctcatctgcctcttcctgggcgccaacgccgtgtggtacggggctgttggcgactctgcctacagcacggggcatgtgtccaggctgagcccgctgagcgtcgacacagtcgctgttggcctggtgtccagcgtggttgtctatcccgtctacctggccatcctttttctcttccggatgtcccggagcaaggtggctgggagcccgagccccacacctgccgggcagcaggtgctggacatcgacagctgcctggactcgtccgtgctggacagctccttcctcacgttctcaggcctccacgctgaggtgaggactctactgggggtcctgggctgggctgggggtcctgccgccttggcgcagcttggactcaagacactgtgcacctctcagcaggcctttgttggacagatgaagagtgacttgtttctggatgattctaagag

SEQ ID NO: 14934 - DNA, 1822 bp, Homo sapiens
  source 1..1822: mol_type = unassigned DNA
cggagactctggtgtccctgagggtccacactgtggatgacatccagcagatcgctgctgcgctggcccagtgcatggggcccagcagggagctcgtatgccgctcgtgcctgaagcagacgctgcacaagctggaggccatgatgctcatcctgcaggcagagaccaccgcgggcaccgtgacgcccaccgccatcggagacagcatcctcaacatcacaggagacctcatccacctggccagctcggacgtgcgggcaccacagccctcagagctgggagccgagtcaccatctcggatggtggcgtcccaggcctacaacctgacctctgccctcatgcgcatcctcatgcgctcccgcgtgctcaacgaggagcccctgacgctggcgggccactacctgtctgaggaacctgagccctacctggcagtctacctacactcggagccccggcccaatgagcacaactgctcggctagcaggaggatccgcccagagtcactccagggtgctgaccaccggccctacaccttcttcatttccccggggagcagagacccagcggggagttaccatctgaacctctccagccacttccgctggtcggcgctgcaggtgtccgtgggcctgtacacgtccctgtgccagtacttcagcgaggaggacatggtgtggcggacagaggggctgctgcccctggaggagacctcgccccgccaggccgtctgcctcacccgccacctcaccgccttcggcgccagcctcttcgtgcccccaagccatgtccgctttgtgtttcctgagccgacagcggatgtaaactacatcgtcatgctgacatgtgctgtgtgcctggtgacctacatggtcatggccgccatcctgcacaagctggaccagttggatgccagccggggccgcgccatccctttctgtgggcagcggggccgcttcaagtacgagatcctcgtcaagacaggctggggccggggctcaggtaccacggcccacgtgggcatcatgctgtatggggtggacagccggagcggccaccggcacctggacggcgacagagccttccaccgcaacagcctggacatcttccggatcgccaccccgcacagcctgggtagcgtgtggaagatccgagtgtggcacgacaacaaagggctcagccctgcctggttcctgcagcacgtcatcgtcagggacctgcagacggcacgcagcgccttcttcctggtcaatgactggctttcggtggagacggaggccaacgggggcctggtggagaaggaggtgctggccgcgagcgacgcagcccttttgcgcttccggcgcctgctggtggctgagctgcagcgtggcttctttgacaagcacatctggctctccatatgggaccggccgcctcgtagccgtttcactcgcatccagagggccacctgctgcgttctcctcatctgcctcttcctgggcgccaacgccgtgtggtacggggctgttggcgactctgcctacagcacggggcatgtgtccaggctgagcccgctgagcgtcgacacagtcgctgttggcctggtgtccagcgtggttgtctatcccgtctacctggccatcctttttctcttccggatgtcccggagcaaggtggctgggagcccgagccccacacctgccgggcagcaggtgctggacatcgacagctgcctggactcgtccgtgctggacagctccttcctcacgttctcaggcctccacgctgagcaggcctttgttggacagatgaagagtgacttgtttctggatgattctaagag

SEQ ID NO: 14935 - DNA, 4443 bp, Homo sapiens
  source 1..4443: mol_type = unassigned DNA
attctatgtaacacgacagcctgcttcagctttgcttccttccaaacctgccacagttccacgtacagtcttcaagccacatatgctctagtggcaaaagctacacagtcccctagcaataccaacagtgaggaagagccccttcccaccccagaggtagccactgtccccagcccatgtccctgttgctggatgtggtgggccggttctcaccctcacgctcccctctctggaccggccaggaggcttggtgaccctgagcccgtggtggctgctcctgctgctgtcaggcggggcctgctggtgccccagagtgggcgtctgttccccagtccctgctttcctcagctggcctgattgggggtcttcccagaggggtcgtctgaggggagggtgtgggagcaggttccatcccagctcagcctcctgacccaggccctggctaagggctgcaggagtctgtgagtcaggcctacgtggcagctgcggtcctcacacccacacatacgtctcttctcacacgcatccccccaggggccctcagtgagcattgcctgcctcctgctagggtccagctgggtccagtacaccagaacgcacactccagtgtcctctgccctgtgtatgcccttccgccgtccaagttggaaggtggcaaaccggatgagtatcctgggagggagtgagctcaccggcagtggccaggcccctgggaaacctggagtttgggagcagcatcctccatgggtcccccagtccttccagcaggccaaatagacctgtgttggaggtaaccccactcccacgccaggtgctgatccggagtggccgggtgcccattgtgtccttggagtgtgtgtcctgcaaggcacaggccgtgtacgaagtgagccgcagctcctacgtgtacttggagggccgctgcctcaattgcagcagcggctccaagcgagggcggtgggctgcacgtacgttcagcaacaagacgctggtgctggatgagaccaccacatccacgggcagtgcaggcatgcgactggtgctgcggcggggcgtgctgcgggacggcgagggatacaccttcacgctcacggtgctgggccgctctggcgaggaggagggctgcgcctccatccgcctgtcccccaaccgcccgccgctggggggctcttgccgcctcttcccactgggcgctgtgcacgccctcaccaccaaggtgcacttcgaatgcacgggctggcatgacgcggaggatgctggcgccccgctggtgtacgccctgctgctgcggcgctgtcgccagggccactgcgaggagttctgtgtctacaagggcagcctctccagctacggagccgtgctgcccccgggtttcaggccacacttcgaggtgggcctggccgtggtggtgcaggaccagctgggagccgctgtggtcgccctcaacaggtctttggccatcaccctcccagagcccaacggcagcgcaacggggctcacagtctggctgcacgggctcaccgctagtgtgctcccagggctgctgcggcaggccgatccccagcacgtcatcgagtactcgttggccctggtcaccgtgctgaacgaggtgagtgcagcctgggaggggacgtcacatctgctgcatgcgtgcttgggaccaagacctgtacccctgcctggagctttgcagagggctcatcccgggccccagagataaatcccagtgaccctgaagcagcaccccgaccttccgctcccagcagccacacccaccgggccctctccggcgtctgctttccacaatgcagcccccgcccaggagggcccatgtgcttaccctgttttgcccatgaagaaacagctcagtgttgtgggtcagtgcccgcatcacacagcgtctagcacgtaactgcaccccgggagtcgtgggcatctgctggcctcctgccggcctcctgcgctgctgacagcttgctgtgccccctgcctgccccagtacgagcgggccctggacgtggcggcagagcccaagcacgagcggcagcaccgagcccagatacgcaagaacatcacggagactctggtgtccctgagggtccacactgtggatgacatccagcagatcgctgctgcgctggcccagtgcatggggcccagcagggagctcgtatgccgctcgtgcctgaagcagacgctgcacaagctggaggccatgatgctcatcctgcaggcagagaccaccgcgggcaccgtgacgcccaccgccatcggagacagcatcctcaacatcacaggagacctcatccacctggccagctcggacgtgcgggcaccacagccctcagagctgggagccgagtcaccatctcggatggtggcgtcccaggcctacaacctgacctctgccctcatgcgcatcctcatgcgctcccgcgtgctcaacgaggagcccctgacgctggcgggcgaggagatcgtggcccagggcaagcgctcggacccgcggagcctgctgtgctatggcggcgccccagggcctggctgccacttctccatccccgaggctttcagcggggccctggccaacctcagtgacgtggtgcagctcatctttctggtggactccaatccctttccctttggctatatcagcaactacaccgtctccaccaaggtggcctcgatggcattccagacacaggccggcgcccagatccccatcgagcggctggcctcagagcgcgccatcaccgtgaaggtgcccaacaactcggactgggctgcccggggccaccgcagctccgccaactccgccaactccgttgtggtccagccccaggcctccgtcggtgctgtggtcaccctggacagcagcaaccctgcggccgggctgcatctgcagctcaactatacgctgctggacggccactacctgtctgaggaacctgagccctacctggcagtctacctacactcggagccccggcccaatgagcacaactgctcggctagcaggaggatccgcccagagtcactccagggtgctgaccaccggccctacaccttcttcatttccccggggagcagagacccagcggggagttaccatctgaacctctccagccacttccgctggtcggcgctgcaggtgtccgtgggcctgtacacgtccctgtgccagtacttcagcgaggaggacatggtgtggcggacagaggggctgctgcccctggaggagacctcgccccgccaggccgtctgcctcacccgccacctcaccgccttcggcgccagcctcttcgtgcccccaagccatgtccgctttgtgtttcctgagccgacagcggatgtaaactacatcgtcatgctgacatgtgctgtgtgcctggtgacctacatggtcatggccgccatcctgcacaagctggaccagttggatgccagccggggccgcgccatccctttctgtgggcagcggggccgcttcaagtacgagatcctcgtcaagacaggctggggccggggctcaggtaccacggcccacgtgggcatcatgctgtatggggtggacagccggagcggccaccggcacctggacggcgacagagccttccaccgcaacagcctggacatcttccggatcgccaccccgcacagcctgggtagcgtgtggaagatccgagtgtggcacgacaacaaagggctcagccctgcctggttcctgcagcacgtcatcgtcagggacctgcagacggcacgcagcgccttcttcctggtcaatgactggctttcggtggagacggaggccaacgggggcctggtggagaaggaggtgctggccgcgagcgacgcagcccttttgcgcttccggcgcctgctggtggctgagctgcagcgtggcttctttgacaagcacatctggctctccatatgggaccggccgcctcgtagccgtttcactcgcatccagagggccacctgctgcgttctcctcatctgcctcttcctgggcgccaacgccgtgtggtacggggctgttggcgactctgcctacagcacggggcatgtgtccaggctgagcccgctgagcgtcgacacagtcgctgttggcctggtgtccagcgtggttgtctatcccgtctacctggccatcctttttctcttccggatgtcccggagcaaggtggctgggagcccgagccccacacctgccgggcagcaggtgctggacatcgacagctgcctggactcgtccgtgctggacagctccttcctcacgttctcaggcctccacgctgaggtgaggactctactgggggtcctgggctgggctgggggtcctgccgccttggcgcagcttggactcaagacactgtgcacctctcagcaggcctttgttggacagatgaagagtgacttgtttctggatgattctaagag

SEQ ID NO: 14936 - DNA, 3386 bp, Homo sapiens
  source 1..3386: mol_type = unassigned DNA
ctgacggcctccaaccacgtgagcaacgtcaccgtgaactacaacgtaaccgtggagcggatgaacaggatgcagggtctgcaggtctccacagtgccggccgtgctgtcccccaatgccacgctagcactgacggcgggcgtgctggtggactcggccgtggaggtggccttcctgtggacctttggggatggggagcaggccctccaccagttccagcctccgtacaacgagtccttcccggttccagacccctcggtggcccaggtgctggtggagcacaatgtcatgcacacctacgctgccccaggtgctgatccggagtggccgggtgcccattgtgtccttggagtgtgtgtcctgcaaggcacaggccgtgtacgaagtgagccgcagctcctacgtgtacttggagggccgctgcctcaattgcagcagcggctccaagcgagggcggtgggctgcacgtacgttcagcaacaagacgctggtgctggatgagaccaccacatccacgggcagtgcaggcatgcgactggtgctgcggcggggcgtgctgcgggacggcgagggatacaccttcacgctcacggtgctgggccgctctggcgaggaggagggctgcgcctccatccgcctgtcccccaaccgcccgccgctggggggctcttgccgcctcttcccactgggcgctgtgcacgccctcaccaccaaggtgcacttcgaatgcacgggctggcatgacgcggaggatgctggcgccccgctggtgtacgccctgctgctgcggcgctgtcgccagggccactgcgaggagttctgtgtctacaagggcagcctctccagctacggagccgtgctgcccccgggtttcaggccacacttcgaggtgggcctggccgtggtggtgcaggaccagctgggagccgctgtggtcgccctcaacaggtctttggccatcaccctcccagagcccaacggcagcgcaacggggctcacagtctggctgcacgggctcaccgctagtgtgctcccagggctgctgcggcaggccgatccccagcacgtcatcgagtactcgttggccctggtcaccgtgctgaacgagtacgagcgggccctggacgtggcggcagagcccaagcacgagcggcagcaccgagcccagatacgcaagaacatcacggagactctggtgtccctgagggtccacactgtggatgacatccagcagatcgctgctgcgctggcccagtgcatggggcccagcagggagctcgtatgccgctcgtgcctgaagcagacgctgcacaagctggaggccatgatgctcatcctgcaggcagagaccaccgcgggcaccgtgacgcccaccgccatcggagacagcatcctcaacatcacaggagacctcatccacctggccagctcggacgtgcgggcaccacagccctcagagctgggagccgagtcaccatctcggatggtggcgtcccaggcctacaacctgacctctgccctcatgcgcatcctcatgcgctcccgcgtgctcaacgaggagcccctgacgctggcgggcgaggagatcgtggcccagggcaagcgctcggacccgcggagcctgctgtgctatggcggcgccccagggcctggctgccacttctccatccccgaggctttcagcggggccctggccaacctcagtgacgtggtgcagctcatctttctggtggactccaatccctttccctttggctatatcagcaactacaccgtctccaccaaggtggcctcgatggcattccagacacaggccggcgcccagatccccatcgagcggctggcctcagagcgcgccatcaccgtgaaggccactacctgtctgaggaacctgagccctacctggcagtctacctacactcggagccccggcccaatgagcacaactgctcggctagcaggaggatccgcccagagtcactccagggtgctgaccaccggccctacaccttcttcatttccccggggagcagagacccagcggggagttaccatctgaacctctccagccacttccgctggtcggcgctgcaggtgtccgtgggcctgtacacgtccctgtgccagtacttcagcgaggaggacatggtgtggcggacagaggggctgctgcccctggaggagacctcgccccgccaggccgtctgcctcacccgccacctcaccgccttcggcgccagcctcttcgtgcccccaagccatgtccgctttgtgtttcctgagccgacagcggatgtaaactacatcgtcatgctgacatgtgctgtgtgcctggtgacctacatggtcatggccgccatcctgcacaagctggaccagttggatgccagccggggccgcgccatccctttctgtgggcagcggggccgcttcaagtacgagatcctcgtcaagacaggctggggccggggctcaggtaccacggcccacgtgggcatcatgctgtatggggtggacagccggagcggccaccggcacctggacggcgacagagccttccaccgcaacagcctggacatcttccggatcgccaccccgcacagcctgggtagcgtgtggaagatccgagtgtggcacgacaacaaagggctcagccctgcctggttcctgcagcacgtcatcgtcagggacctgcagacggcacgcagcgccttcttcctggtcaatgactggctttcggtggagacggaggccaacgggggcctggtggagaaggaggtgctggccgcgagcgacgcagcccttttgcgcttccggcgcctgctggtggctgagctgcagcgtggcttctttgacaagcacatctggctctccatatgggaccggccgcctcgtagccgtttcactcgcatccagagggccacctgctgcgttctcctcatctgcctcttcctgggcgccaacgccgtgtggtacggggctgttggcgactctgcctacagcacggggcatgtgtccaggctgagcccgctgagcgtcgacacagtcgctgttggcctggtgtccagcgtggttgtctatcccgtctacctggccatcctttttctcttccggatgtcccggagcaaggtggctgggagcccgagccccacacctgccgggcagcaggtgctggacatcgacagctgcctggactcgtccgtgctggacagctccttcctcacgttctcaggcctccacgctgaggtgaggactctactgggggtcctgggctgggctgggggtcctgccgccttggcgcagcttggactcaagacactgtgcacctctcagcaggcctttgttggacagatgaagagtgacttgtttctggatgattctaagag

SEQ ID NO: 14937 - DNA, 4193 bp, Homo sapiens
  source 1..4193: mol_type = unassigned DNA
gcagacagggtgctcacacagggcgtgaggcctggcttcccagtgagggcagcagcccagttactggggacgtcggccccgggcaggtcctgctggctggctcctcgggctacctggtgggctttaaattcctggaaagtcacggctctgacagtggctccgctaactcattccactgtctcatttcacaaaatgaatttaaaactctgctccctgacctcacacgagcccccgtgagtctctcacgccctctgctgtgttctcgcctggctaaagcgagtggcttttgaggtggagtctgaacccctgatgggaaactgcgggctgcccgcggtgccaccatgctggaggtacagccccgtggtggaggccggctcggacatggtcttccggtggaccatcaacgacaagcagtccctgaccttccagaacgtggtcttcaatgtcatttatcagagcgcggcggtcttcaagctctcactgacggcctccaaccacgtgagcaacgtcaccgtgaactacaacgtaaccgtggagcggatgaacaggatgcagggtctgcaggtctccacagtgccggccgtgctgtcccccaatgccacgctagcactgacggcgggcgtgctggtggactcggccgtggaggtggccttcctgtggacctttggggatggggagcaggccctccaccagttccagcctccgtacaacgagtccttcccggttccagacccctcggtggcccaggtgctggtggagcacaatgtcatgcacacctacgctgccccaggtgctgatccggagtggccgggtgcccattgtgtccttggagtgtgtgtcctgcaaggcacaggccgtgtacgaagtgagccgcagctcctacgtgtacttggagggccgctgcctcaattgcagcagcggctccaagcgagggcggtgggctgcacgtacgttcagcaacaagacgctggtgctggatgagaccaccacatccacgggcagtgcaggcatgcgactggtgctgcggcggggcgtgctgcgggacggcgagggatacaccttcacgctcacggtgctgggccgctctggcgaggaggagggctgcgcctccatccgcctgtcccccaaccgcccgccgctggggggctcttgccgcctcttcccactgggcgctgtgcacgccctcaccaccaaggtgcacttcgaatgcacgggctggcatgacgcggaggatgctggcgccccgctggtgtacgccctgctgctgcggcgctgtcgccagggccactgcgaggagttctgtgtctacaagggcagcctctccagctacggagccgtgctgcccccgggtttcaggccacacttcgaggtgggcctggccgtggtggtgcaggaccagctgggagccgctgtggtcgccctcaacaggtctttggccatcaccctcccagagcccaacggcagcgcaacggggctcacagtctggctgcacgggctcaccgctagtgtgctcccagggctgctgcggcaggccgatccccagcacgtcatcgagtactcgttggccctggtcaccgtgctgaacgagtacgagcgggccctggacgtggcggcagagcccaagcacgagcggcagcaccgagcccagatacgcaagaacatcacggagactctggtgtccctgagggtccacactgtggatgacatccagcagatcgctgctgcgctggcccagtgcatggggcccagcagggagctcgtatgccgctcgtgcctgaagcagacgctgcacaagctggaggccatgatgctcatcctgcaggcagagaccaccgcgggcaccgtgacgcccaccgccatcggagacagcatcctcaacatcacaggagacctcatccacctggccagctcggacgtgcgggcaccacagccctcagagctgggagccgagtcaccatctcggatggtggcgtcccaggcctacaacctgacctctgccctcatgcgcatcctcatgcgctcccgcgtgctcaacgaggagcccctgacgctggcgggcgaggagatcgtggcccagggcaagcgctcggacccgcggagcctgctgtgctatggcggcgccccagggcctggctgccacttctccatccccgaggctttcagcggggccctggccaacctcagtgacgtggtgcagctcatctttctggtggactccaatccctttccctttggctatatcagcaactacaccgtctccaccaaggtggcctcgatggcattccagacacaggccggcgcccagatccccatcgagcggctggcctcagagcgcgccatcaccgtgaaggtgcccaacaactcggactgggctgcccggggccaccgcagctccgccaactccgccaactccgttgtggtccagccccaggcctccgtcggtgctgtggtcaccctggacagcagcaaccctgcggccgggctgcatctgcagctcaactatacgctgctggacggtgcgtgcagcgggtggggcacacgcggccccctggccttgttcttggggggaaggcgtttctcgtagggcttccatgggtgtctctggtgaaatttgctttctgtttcatgggctgctgggggcctggccagagaggagctgggggccacggagaagcaggccactacctgtctgaggaacctgagccctacctggcagtctacctacactcggagccccggcccaatgagcacaactgctcggctagcaggaggatccgcccagagtcactccagggtgctgaccaccggccctacaccttcttcatttccccggggagcagagacccagcggggagttaccatctgaacctctccagccacttccgctggtcggcgctgcaggtgtccgtgggcctgtacacgtccctgtgccagtacttcagcgaggaggacatggtgtggcggacagaggggctgctgcccctggaggagacctcgccccgccaggccgtctgcctcacccgccacctcaccgccttcggcgccagcctcttcgtgcccccaagccatgtccgctttgtgtttcctgagccgacagcggatgtaaactacatcgtcatgctgacatgtgctgtgtgcctggtgacctacatggtcatggccgccatcctgcacaagctggaccagttggatgccagccggggccgcgccatccctttctgtgggcagcggggccgcttcaagtacgagatcctcgtcaagacaggctggggccggggctcaggtaccacggcccacgtgggcatcatgctgtatggggtggacagccggagcggccaccggcacctggacggcgacagagccttccaccgcaacagcctggacatcttccggatcgccaccccgcacagcctgggtagcgtgtggaagatccgagtgtggcacgacaacaaagggctcagccctgcctggttcctgcagcacgtcatcgtcagggacctgcagacggcacgcagcgccttcttcctggtcaatgactggctttcggtggagacggaggccaacgggggcctggtggagaaggaggtgctggccgcgagcgacgcagcccttttgcgcttccggcgcctgctggtggctgagctgcagcgtggcttctttgacaagcacatctggctctccatatgggaccggccgcctcgtagccgtttcactcgcatccagagggccacctgctgcgttctcctcatctgcctcttcctgggcgccaacgccgtgtggtacggggctgttggcgactctgcctacagcacggggcatgtgtccaggctgagcccgctgagcgtcgacacagtcgctgttggcctggtgtccagcgtggttgtctatcccgtctacctggccatcctttttctcttccggatgtcccggagcaaggtggctgggagcccgagccccacacctgccgggcagcaggtgctggacatcgacagctgcctggactcgtccgtgctggacagctccttcctcacgttctcaggcctccacgctgaggtgaggactctactgggggtcctgggctgggctgggggtcctgccgccttggcgcagcttggactcaagacactgtgcacctctcagcaggcctttgttggacagatgaagagtgacttgtttctggatgattctaagag

SEQ ID NO: 14938 - DNA, 559 bp, Homo sapiens
  source 1..559: mol_type = unassigned DNA
gccaccccgcacagcctgggtagcgtgtggaagatccgagtgtggcacgacaacaaagggctcagccctgcctggttcctgcagcacgtcatcgtcagggacctgcagacggcacgcagcgccttcttcctggtcaatgactggctttcggtggagacggaggccaacgggggcctggtggagaaggaggtgctggccgcgagcgacgcagcccttttgcgcttccggcgcctgctggtggctgagctgcagcgtggcttctttgacaagcacatctggctctccatatgggaccggccgcctcgtagccgtttcactcgcatccagagggccacctgctgcgttctcctcatctgcctcttcctgggcgccaacgccgtgtggtacggggctgttggcgactctgcctacaggtggctgggagcccgagccccacacctgccgggcagcaggtgctggacatcgacagctgcctggactcgtccgtgctggacagctccttcctcacgttctcaggcctccacgctgagcaggcctttgttggacagatgaagagtga

SEQ ID NO: 14939 - DNA, 4419 bp, Homo sapiens
  source 1..4419: mol_type = unassigned DNA
gtgcgctgaactttgggccccgcgggagcagcacggtcaccattccacgggagcggctggcggctggcgtggagtacaccttcagcctgaccgtgtggaaggccggccgcaaggaggaggccaccaaccagacggtgggtgccgcccgcccctcggccacttgccttggacagcccagcctccctggtcatctactgttttccgtgttttagtgctggtggaggccgcacgctctcccctctctgtttctgatgcaaattctatgtaacacgacagcctgcttcagctttgcttccttccaaacctgccacagttccacgtacagtcttcaagccacatatgctctagtggcaaaagctacacagtcccctagcaataccaacagtgaggaagagccccttcccaccccagaggtagccactgtccccagcccatgtccctgttgctggatgtggtgggccggttctcaccctcacgctcccctctctggaccggccaggaggcttggtgaccctgagcccgtggtggctgctcctgctgctgtcaggcggggcctgctggtgccccagagtgggcgtctgttccccagtccctgctttcctcagctggcctgattgggggtcttcccagaggggtcgtctgaggggagggtgtgggagcaggttccatcccagctcagcctcctgacccaggccctggctaagggctgcaggagtctgtgagtcaggcctacgtggcagctgcggtcctcacacccacacatacgtctcttctcacacgcatccccccaggggccctcagtgagcattgcctgcctcctgctagggtccagctgggtccagtacaccagaacgcacactccagtgtcctctgccctgtgtatgcccttccgccgtccaagttggaaggtggcaaaccggatgagtatcctgggagggagtgagctcaccggcagtggccaggcccctgggaaacctggagtttgggagcagcatcctccatgggtcccccagtccttccagcaggccaaatagacctgtgttggaggtaaccccactcccacgccaggtgctgatccggagtggccgggtgcccattgtgtccttggagtgtgtgtcctgcaaggcacaggccgtgtacgaagtgagccgcagctcctacgtgtacttggagggccgctgcctcaattgcagcagcggctccaagcgagggcggtgggctgcacgtacgttcagcaacaagacgctggtgctggatgagaccaccacatccacgggcagtgcaggcatgcgactggtgctgcggcggggcgtgctgcgggacggcgagggatacaccttcacgctcacggtgctgggccgctctggcgaggaggagggctgcgcctccatccgcctgtcccccaaccgcccgccgctggggggctcttgccgcctcttcccactgggcgctgtgcacgccctcaccaccaaggtgcacttcgaatgcacgggctggcatgacgcggaggatgctggcgccccgctggtgtacgccctgctgctgcggcgctgtcgccagggccactgcgaggagttctgtgtctacaagggcagcctctccagctacggagccgtgctgcccccgggtttcaggccacacttcgaggtgggcctggccgtggtggtgcaggaccagctgggagccgctgtggtcgccctcaacaggtctttggccatcaccctcccagagcccaacggcagcgcaacggggctcacagtctggctgcacgggctcaccgctagtgtgctcccagggctgctgcggcaggccgatccccagcacgtcatcgagtactcgttggccctggtcaccgtgctgaacgagccacacccaccgggccctctccggcgtctgctttccacaatgcagcccccgcccaggagggcccatgtgcttaccctgttttgcccatgaagaaacagctcagtgttgtgggtcagtgcccgcatcacacagcgtctagcacgtaactgcaccccgggagtcgtgggcatctgctggcctcctgccggcctcctgcgctgctgacagcttgctgtgccccctgcctgccccagtacgagcgggccctggacgtggcggcagagcccaagcacgagcggcagcaccgagcccagatacgcaagaacatcacggagactctggtgtccctgagggtccacactgtggatgacatccagcagatcgctgctgcgctggcccagtgcatggggcccagcagggagctcgtatgccgctcgtgcctgaagcagacgctgcacaagctggaggccatgatgctcatcctgcaggcagagaccaccgcgggcaccgtgacgcccaccgccatcggagacagcatcctcaacatcacaggagacctcatccacctggccagctcggacgtgcgggcaccacagccctcagagctgggagccgagtcaccatctcggatggtggcgtcccaggcctacaacctgacctctgccctcatgcgcatcctcatgcgctcccgcgtgctcaacgaggagcccctgacgctggcgggcgaggagatcgtggcccagggcaagcgctcggacccgcggagcctgctgtgctatggcggcgccccagggcctggctgccacttctccatccccgaggctttcagcggggccctggccaacctcagtgacgtggtgcagctcatctttctggtggactccaatccctttccctttggctatatcagcaactacaccgtctccaccaaggtggcctcgatggcattccagacacaggccggcgcccagatccccatcgagcggctggcctcagagcgcgccatcaccgtgaaggtgcccaacaactcggactgggctgcccggggccaccgcagctccgccaactccgccaactccgttgtggtccagccccaggcctccgtcggtgctgtggtcaccctggacagcagcaaccctgcggccgggctgcatctgcagctcaactatacgctgctggacggccactacctgtctgaggaacctgagccctacctggcagtctacctacactcggagccccggcccaatgagcacaactgctcggctagcaggaggatccgcccagagtcactccagggtgctgaccaccggccctacaccttcttcatttccccggggagcagagacccagcggggagttaccatctgaacctctccagccacttccgctggtcggcgctgcaggtgtccgtgggcctgtacacgtccctgtgccagtacttcagcgaggaggacatggtgtggcggacagaggggctgctgcccctggaggagacctcgccccgccaggccgtctgcctcacccgccacctcaccgccttcggcgccagcctcttcgtgcccccaagccatgtccgctttgtgtttcctgagccgacagcggatgtaaactacatcgtcatgctgacatgtgctgtgtgcctggtgacctacatggtcatggccgccatcctgcacaagctggaccagttggatgccagccggggccgcgccatccctttctgtgggcagcggggccgcttcaagtacgagatcctcgtcaagacaggctggggccggggctcaggtaccacggcccacgtgggcatcatgctgtatggggtggacagccggagcggccaccggcacctggacggcgacagagccttccaccgcaacagcctggacatcttccggatcgccaccccgcacagcctgggtagcgtgtggaagatccgagtgtggcacgacaacaaagggctcagccctgcctggttcctgcagcacgtcatcgtcagggacctgcagacggcacgcagcgccttcttcctggtcaatgactggctttcggtggagacggaggccaacgggggcctggtggagaaggaggtgctggccgcgagcgacgcagcccttttgcgcttccggcgcctgctggtggctgagctgcagcgtggcttctttgacaagcacatctggctctccatatgggaccggccgcctcgtagccgtttcactcgcatccagagggccacctgctgcgttctcctcatctgcctcttcctgggcgccaacgccgtgtggtacggggctgttggcgactctgcctacagcacggggcatgtgtccaggctgagcccgctgagcgtcgacacagtcgctgttggcctggtgtccagcgtggttgtctatcccgtctacctggccatcctttttctcttccggatgtcccggagcaaggtggctgggagcccgagccccacacctgccgggcagcaggtgctggacatcgacagctgcctggactcgtccgtgctggacagctccttcctcacgttctcaggcctccacgctgaggtgaggactctactgg

SEQ ID NO: 14940 - DNA, 493 bp, Homo sapiens
  source 1..493: mol_type = unassigned DNA
gtggtacggggctgttggcgactctgcctacagcacggggcatgtgtccaggctgagcccgctgagcgtcgacacagtcgctgttggcctggtgtccagcgtggttgtctatcccgtctacctggccatcctttttctcttccggatgtcccggagcaagctgcaccagtctgctgtcaagtgttcagtggcacacgtcgcgaggggctgccatcacggacggtgcagatgtcccatatatccagcattctaggacattctgtcagatggcaccgggctctgtcctgtctgctgaggaggtggcttctcatccctgtcctgagcaggtctgagctgccgcccgctgaccactgccctcgtcctgcaggtggctgggagcccgagccccacacctgccgggcagcaggtgctggacatcgacagctgcctggactcgtccgtgctggacagctccttcctcacgttctcaggcctccacgctgaggtgaggact

SEQ ID NO: 14941 - DNA, 2505 bp, Homo sapiens
  source 1..2505: mol_type = unassigned DNA
gcggagcctgctgtgctatggcggcgccccagggcctggctgccacttctccatccccgaggctttcagcggggccctggccaacctcagtgacgtggtgcagctcatctttctggtggactccaatccctttccctttggctatatcagcaactacaccgtctccaccaaggtggcctcgatggcattccagacacaggccggcgcccagatccccatcgagcggctggcctcagagcgcgccatcaccgtgaaggtgcccaacaactcggactgggctgcccggggccaccgcagctccgccaactccgccaactccgttgtggtccagccccaggcctccgtcggtgctgtggtcaccctggacagcagcaaccctgcggccgggctgcatctgcagctcaactatacgctgctggacggtgcgtgcagcgggccactacctgtctgaggaacctgagccctacctggcagtctacctacactcggagccccggcccaatgagcacaactgctcggctagcaggaggatccgcccagagtcactccagggtgctgaccaccggccctacaccttcttcatttccccggggagcagagacccagcggggagttaccatctgaacctctccagccacttccgctggtcggcgctgcaggtgtccgtgggcctgtacacgtccctgtgccagtacttcagcgaggaggacatggtgtggcggacagaggggctgctgcccctggaggagacctcgccccgccaggccgtctgcctcacccgccacctcaccgccttcggcgccagcctcttcgtgcccccaagccatgtccgctttgtgtttcctgagccgacagcggatgtaaactacatcgtcatgctgacatgtgctgtgtgcctggtgacctacatggtcatggccgccatcctgcacaagctggaccagttggatgccagccggggccgcgccatccctttctgtgggcagcggggccgcttcaagtacgagatcctcgtcaagacaggctggggccggggctcaggtaccacggcccacgtgggcatcatgctgtatggggtggacagccggagcggccaccggcacctggacggcgacagagccttccaccgcaacagcctggacatcttccggatcgccaccccgcacagcctgggtagcgtgtggaagatccgagtgtggcacgacaacaaagggctcagccctgcctggttcctgcagcacgtcatcgtcagggacctgcagacggcacgcagcgccttcttcctggtcaatgactggctttcggtggagacggaggccaacgggggcctggtggagaaggaggtgctggccgcgagcgacgcagcccttttgcgcttccggcgcctgctggtggctgagctgcagcgtggcttctttgacaagcacatctggctctccatatgggaccggccgcctcgtagccgtttcactcgcatccagagggccacctgctgcgttctcctcatctgcctcttcctgggcgccaacgccgtgtggtacggggctgttggcgactctgcctacagcacggggcatgtgtccaggctgagcccgctgagcgtcgacacagtcgctgttggcctggtgtccagcgtggttgtctatcccgtctacctggccatcctttttctcttccggatgtcccggagcaaggtgggctggggctggggacccgggagtactgggaatggagcctgggcctcggcaccatgcctagggccgccactttccagtgctgcagccagagggaaaggcgtccaccaaaggctgctcgggaagggtcaacacacttgagcagccttagctagactgaccagggagaaagagagaagactcagaagccagaatggtgaaagaacgagggcactttgctaagcagacgccacggacgactgcacagcagcacgccagataactcagaagaagcaagcacgcggctgtgcacgcttccgaaatgcactccagaagaaaatctcagtacatctataggaagtgaagaggctgagttagtcccttagaaacgtcccagtggccgggccgggtgtggtggctcacgcctgtaatcccaacacttcaggtggccgaggtgggcggatctgagtccaggagtttgagaccagcctgggcaacatagcaagaccccatctatataaaacattaaaaagggccaggcgcggtggctcacgcctgtaatcccagcactttgggaggccgaggcgggcagatcacttgaggtcaggagttcgagaccagcctggccaacacaatgaaaccccgactctactacaaatacaaaaacttagctgggcatggtggcgggcgcctgtagtcccagctactcgagaggctgaggcaggagaatggcatgaacccaggaggcggagcttgcagtgagccgagattgcgccactgcactccatcctgggcaacggagcaagactccatctccaaaaaaaaaaaaaaa

SEQ ID NO: 14942 - DNA, 2353 bp, Homo sapiens
  source 1..2353: mol_type = unassigned DNA
tgacctctgccctcatgcgcatcctcatgcgctcccgcgtgctcaacgaggagcccctgacgctggcgggcgaggagatcgtggcccagggcaagcgctcggacccgcggagcctgctgtgctatggcggcgccccagggcctggctgccacttctccatccccgaggctttcagcggggccctggccaacctcagtgacgtggtgcagctcatctttctggtggactccaatccctttccctttggctatatcagcaactacaccgtctccaccaaggtggcctcgatggcattccagacacaggccggcgcccagatccccatcgagcggctggcctcagagcgcgccatcaccgtgaaggtgcccaacaactcggactgggctgcccggggccaccgcagctccgccaactccgccaactccgttgtggtccagccccaggcctccgtcggtgctgtggtcaccctggacagcagcaaccctgcggccgggctgcatctgcagctcaactatacgctgctggacggccactacctgtctgaggaacctgagccctacctggcagtctacctacactcggagccccggcccaatgagcacaactgctcggctagcaggaggatccgcccagagtcactccagggtgctgaccaccggccctacaccttcttcatttccccggggagcagagacccagcggggagttaccatctgaacctctccagccacttccgctggtcggcgctgcaggtgtccgtgggcctgtacacgtccctgtgccagtacttcagcgaggaggacatggtgtggcggacagaggggctgctgcccctggaggagacctcgccccgccaggccgtctgcctcacccgccacctcaccgccttcggcgccagcctcttcgtgcccccaagccatgtccgctttgtgtttcctgagccgacagcggatgtaaactacatcgtcatgctgacatgtgctgtgtgcctggtgacctacatggtcatggccgccatcctgcacaagctggaccagttggatgccagccggggccgcgccatccctttctgtgggcagcggggccgcttcaagtacgagatcctcgtcaagacaggctggggccggggctcaggtaccacggcccacgtgggcatcatgctgtatggggtggacagccggagcggccaccggcacctggacggcgacagagccttccaccgcaacagcctggacatcttccggatcgccaccccgcacagcctgggtagcgtgtggaagatccgagtgtggcacgacaacaaagggctcagccctgcctggttcctgcagcacgtcatcgtcagggacctgcagacggcacgcagcgccttcttcctggtcaatgactggctttcggtggagacggaggccaacgggggcctggtggagaaggaggtgctggccgcgagcgacgcagcccttttgcgcttccggcgcctgctggtggctgagctgcagcgtggcttctttgacaagcacatctggctctccatatgggaccggccgcctcgtagccgtttcactcgcatccagagggccacctgctgcgttctcctcatctgcctcttcctgggcgccaacgccgtgtggtacggggctgttggcgactctgcctacagcacggggcatgtgtccaggctgagcccgctgagcgtcgacacagtcgctgttggcctggtgtccagcgtggttgtctatcccgtctacctggccatcctttttctcttccggatgtcccggagcaaggtgggctggggctggggacccgggagtactgggaatggagcctgggcctcggcaccatgcctagggccgccactttccagtgctgcagccagagggaaaggcgtccaccaaaggctgctcgggaagggtcaacacacttgagcagccttagctagactgaccagggagaaagagagaagactcagaagccagaatggtgaaagaacgagggcactttgctaagcagacgccacggacgactgcacagcagcacgccagataactcagaagaagcaagcacgcggctgtgcacgcttccgaaatgcactccagaagaaaatctcagtacatctataggaagtgaagaggctgagttagtcccttagaaacgtcccagtggccgggccgggtgtggtggctcacgcctgtaatcccaacacttcaggtggccgaggtgggcggatctgagtccaggagtttgagaccagcctgggcaacatagcaagaccccatctatataaaacattaaaaagggccaggcgcggtggctcacgcctgtaatcccagcactttgggaggccgaggcg

SEQ ID NO: 14943 - DNA, 596 bp, Homo sapiens
  source 1..596: mol_type = unassigned DNA
acgacaacaaagggctcagccctgcctggttcctgcagcacgtcatcgtcagggacctgcagacggcacgcagcgccttcttcctggtcaatgactggctttcggtggagacggaggccaacgggggcctggtggagaaggaggtgctggccgcgagcgacgcagcccttttgcgcttccggcgcctgctggtggctgagctgcagcgtggcttctttgacaagcacatctggctctccatatgggaccggccgcctcgtagccgtttcactcgcatccagagggccacctgctgcgttctcctcatctgcctcttcctgggcgccaacgccgtgtggtacggggctgttggcgactctgcctacagcacggggcatgtgtccaggctgagcccgctgagcgtcgacacagtcgctgttggcctggtgtccagcgtggttgtctatcccgtctacctggccatcctttttctcttccggatgtcccggagcaagtgctgcagccagagggaaaggcgtccaccaaaggctgctcgggaagggtcaacacacttgagcagccttagctagactgaccagggagaaagagagaagact

SEQ ID NO: 14944 - DNA, 661 bp, Homo sapiens
  source 1..661: mol_type = unassigned DNA
gccgggactgcctgtgtggctccttgagtgcgcacaggccaaagctgagatgacttgcctgggatgccacacgtgttgggcagcagaccgagcctcccacccctccctcttgcctcccaggtaccacggcccacgtgggcatcatgctgtatggggtggacagccggagcggccaccggcacctggacggcgacagagccttccaccgcaacagcctggacatcttccggatcgccaccccgcacagcctgggtagcgtgtggaagatccgagtgtggcacgacaacaaaggtttgtgcggaccctgccaagctctgcccctctgcccccgcattggggcgccctgcgagcctgacctccctcctgcgcctctgcagggctcagccctgcctggttcctgcagcacgtcatcgtcagggacctgcagacggcacgcagcgccttcttcctggtcaatgactggctttcggtggagacggaggccaacgggggcctggtggagaaggaggtgctggccgcgagcgacgcagcccttttgcgcttccggcgcctgctggtggctgagctgcagcgtggcttctttgacaagcacatctggctctccatatgggaccggccgcctcgtagccgtttcactcgcatccagagggccacctgctgc

SEQ ID NO: 14945 - DNA, 563 bp, Homo sapiens
  source 1..563: mol_type = unassigned DNA
atcatgtccttgaggtcctgctgttaattggacaaattgcagtaaccgcagctccttgtgtatggcagagccgtgcaaagccgggactgcctgtgtggctccttgagtgcgcacaggccaaagctgagatgacttgcctgggatgccacacgtgttgggcagcagaccgagcctcccacccctccctcttgcctcccaggtaccacggcccacgtgggcatcatgctgtatggggtggacagccggagcggccaccggcacctggacggcgacagagccttccaccgcaacagcctggacatcttccggatcgccaccccgcacagcctgggtagcgtgtggaagatccgagtgtggcacgacaacaaagggctcagccctgcctggttcctgcagcacgtcatcgtcagggacctgcagacggcacgcagcgccttcttcctggtcaatgactggctttcggtggagacggaggccaacgggggcctggtggagaaggaggtgctggccgcgagcgacgcagcccttttgcgcttccggcgcctgctggtggctgagctgca

SEQ ID NO: 14946 - DNA, 923 bp, Homo sapiens
  source 1..923: mol_type = unassigned DNA
gtgaaatttgctttctgtttcatgggctgctgggggcctggccagagaggagctgggggccacggagaagcaggtgccagctctggtgcagaggctcctatggcctttcaggcccgtggcagagggtgggctcaggagggccatcgtgggtgtcccccgggtggttgagcttcccggcaggcgtgtgacctgcgcgttctgccccaggccactacctgtctgaggaacctgagccctacctggcagtctacctacactcggagccccggcccaatgagcacaactgctcggctagcaggaggatccgcccagagtcactccagggtgctgaccaccggccctacaccttcttcatttccccggggagcagagacccagcggggagttaccatctgaacctctccagccacttccgctggtcggcgctgcaggtgtccgtgggcctgtacacgtccctgtgccagtacttcagcgaggaggacatggtgtggcggacagaggggctgctgcccctggaggagacctcgccccgccaggccgtctgcctcacccgccacctcaccgccttcggcgccagcctcttcgtgcccccaagccatgtccgctttgtgtttcctgagccgacagcggatgtaaactacatcgtcatgctgacatgtgctgtgtgcctggtgacctacatggtcatggccgccatcctgcacaagctggaccagttggatgccagccggggccgcgccatccctttctgtgggcagcggggccgcttcaagtacgagatcctcgtcaagacaggctggggccggggctcaggtgaggggcgcagcggggtggcagggcctcccctgctctcactggctgtgctggttgcaccctctgggagtgagtctcgtcgcaggcgtcagaacaaggcagtttttgca

SEQ ID NO: 14947 - DNA, 511 bp, Homo sapiens
  source 1..511: mol_type = unassigned DNA
caccgtctccaccaaggtggcctcgatggcattccagacacaggccggcgcccagatccccatcgagcggctggcctcagagcgcgccatcaccgtgaaggccactacctgtctgaggaacctgagccctacctggcagtctacctacactcggagccccggcccaatgagcacaactgctcggctagcaggaggatccgcccagagtcactccagggtgctgaccaccggccctacaccttcttcatttccccggggagcagagacccagcggggagttaccatctgaacctctccagccacttccgctggtcggcgctgcaggtgtccgtgggcctgtacacgtccctgtgccagtacttcagcgaggaggacatggtgtggcggacagaggggctgctgcccctggaggagacctcgccccgccaggccgtctgcctcacccgccacctcaccgccttcggcgccagcctcttcgtgcccccaagccatgtccgctttgtgtttcctg

SEQ ID NO: 14948 - DNA, 964 bp, Homo sapiens
  source 1..964: mol_type = unassigned DNA
cgaatgcacgggctggcatgacgcggaggatgctggcgccccgctggtgtacgccctgctgctgcggcgctgtcgccagggccactgcgaggagttctgtgtctacaagggcagcctctccagctacggagccgtgctgcccccgggtttcaggccacacttcgaggtgggcctggccgtggtggtgcaggaccagctgggagccgctgtggtcgccctcaacaggtctttggccatcaccctcccagagcccaacggcagcgcaacggggctcacagtctggctgcacgggctcaccgctagtgtgctcccagggctgctgcggcaggccgatccccagcacgtcatcgagtactcgttggccctggtcaccgtgctgaacgagtacgagcgggccctggacgtggcggcagagcccaagcacgagcggcagcaccgagcccagatacgcaagaacatcacggagactctggtgtccctgagggtccacactgtggatgacatccagcagatcgctgctgcgctggcccagtgcatggggcccagcagggagctcgtatgccgctcgtgcctgaagcagacgctgcacaagctggaggccatgatgctcatcctgcaggcagagaccaccgcgggcaccgtgacgcccaccgccatcggagacagcatcctcaacatcacaggagacctcatccacctggccagctcggacgtgcgggcaccacagccctcagagctgggagccgagtcaccatctcggatggtggcgtcccaggcctacaacctgacctctgccctcatgcgcatcctcatgcgctcccgcgtgctcaacgaggagcccctgacgctggcgggctttcagcggggccctggccaacctcagtgacgtggtgcagctcatctttctggtggactccaatccctttccctttggctatatcagcaactacaccgtctccaccaa

SEQ ID NO: 14949 - DNA, 1976 bp, Homo sapiens
  source 1..1976: mol_type = unassigned DNA
caggtggactctggtgccaacgccacggccacggctcgctggcctgggggcagtgtcagcgcccgctttgagaatgtctgccctgccctggtggccaccttcgtgcccggctgcccctgggagaccaacgataccctgttctcagtggtagcactgccgtggctcagtgagggggagcacgtggtggacgtggtggtggaaaacagcgccagccgggccaacctcagcctgcgggtgacggcggaggagcccatctgtggcctccgcgccacgcccagccccgaggcccgtgtactgcagggagtcctagtgaggtacagccccgtggtggaggccggctcggacatggtcttccggtggaccatcaacgacaagcagtccctgaccttccagaacgtggtcttcaatgtcatttatcagagcgcggcggtcttcaagctctcagacgctgccatggctgtggctgacggcctccaaccacgtgagcaacgtcaccgtgaactacaacgtaaccgtggagcggatgaacaggatgcagggtctgcaggtctccacagtgccggccgtgctgtcccccaatgccacgctagcactgacggcgggcgtgctggtggactcggccgtggaggtggccttcctgtggacctttggggatggggagcaggccctccaccagttccagcctccgtacaacgagtccttcccggttccagacccctcggtggcccaggtgctggtggagcacaatgtcatgcacacctacgctgccccaggtgctgatccggagtggccgggtgcccattgtgtccttggagtgtgtgtcctgcaaggcacaggccgtgtacgaagtgagccgcagctcctacgtgtacttggagggccgctgcctcaattgcagcagcggctccaagcgagggcggtgggctgcacgtacgttcagcaacaagacgctggtgctggatgagaccaccacatccacgggcagtgcaggcatgcgactggtgctgcggcggggcgtgctgcgggacggcgagggatacaccttcacgctcacggtgctgggccgctctggcgaggaggagggctgcgcctccatccgcctgtcccccaaccgcccgccgctggggggctcttgccgcctcttcccactgggcgctgtgcacgccctcaccaccaaggtgcacttcgaatgcacgggctggcatgacgcggaggatgctggcgccccgctggtgtacgccctgctgctgcggcgctgtcgccagggccactgcgaggagttctgtgtctacaagggcagcctctccagctacggagccgtgctgcccccgggtttcaggccacacttcgaggtgggcctggccgtggtggtgcaggaccagctgggagccgctgtggtcgccctcaacaggtctttggccatcaccctcccagagcccaacggcagcgcaacggggctcacagtctggctgcacgggctcaccgctagtgtgctcccagggctgctgcggcaggccgatccccagcacgtcatcgagtactcgttggccctggtcaccgtgctgaacgagtacgagcgggccctggacgtggcggcagagcccaagcacgagcggcagcaccgagcccagatacgcaagaacatcacggagactctggtgtccctgagggtccacactgtggatgacatccagcagatcgctgctgcgctggcccagtgcatggggcccagcagggagctcgtatgccgctcgtgcctgaagcagacgctgcacaagctggaggccatgatgctcatcctgcaggcagagaccaccgcgggcaccgtgacgcccaccgccatcggagacagcatcctcaacatcacaggagacctcatccacctggccagctcggacgtgcgggcaccacagccctcagagctgggagccgagtcaccatctcggatggtggcgtcccaggcctacaacctgacc

SEQ ID NO: 14950 - DNA, 480 bp, Homo sapiens
  source 1..480: mol_type = unassigned DNA
gtcgccctcaacaggtctttggccatcaccctcccagagcccaacggcagcgcaacggggctcacagtctggctgcacgggctcaccgctagtgtgctcccagggctgctgcggcaggccgatccccagcacgtcatcgagtactcgttggccctggtcaccgtgctgaacgagcccccgcccaggagggcccatgtgcttaccctgttttgcccatgaagaaacagctcagtgttgtgggtcagtgcccgcatcacacagcgtctagcacgtaactgcaccccgggagtcgtgggcatctgctggcctcctgccggcctcctgcgctgctgacagcttgctgtgccccctgcctgccccagtacgagcgggccctggacgtggcggcagagcccaagcacgagcggcagcaccgagcccagatacgcaagaacatcacggagactctggtgtccctgagggtccacactgtggatgaca

SEQ ID NO: 14951 - DNA, 574 bp, Homo sapiens
  source 1..574: mol_type = unassigned DNA
gaatgcacgggtgagtgcaggcctgcgtggggggagcagcgggatcccccgactctgtgacgtcacggagccctcccgtgatgccgtggggaccgtccctcaggctggcatgacgcggaggatgctggcgccccgctggtgtacgccctgctgctgcggcgctgtcgccagggccactgcgaggagttctgtgtctacaagggcagcctctccagctacggagccgtgctgcccccgggtttcaggccacacttcgaggtgggcctggccgtggtggtgcaggaccagctgggagccgctgtggtcgccctcaacaggtctttggccatcaccctcccagagcccaacggcagcgcaacggggctcacagtctggctgcacgggctcaccgctagtgtgctcccagggctgctgcggcaggccgatccccagcacgtcatcgagtactcgttggccctggtcaccgtgctgaacgagtacgagcgggccctggacgtggcggcagagcccaagcacgagcggcagcaccgagcccagatacgcaagaacatcacggagactctggtgtccctga

SEQ ID NO: 14952 - DNA, 577 bp, Homo sapiens
  source 1..577: mol_type = unassigned DNA
ctatgtaacacgacagcctgcttcagctttgcttccttccaaacctgccacagttccacgtacagtcttcaagccacatatgctctagtggcaaaagctacacagtcccctagcaataccaacagtgctgatccggagtggccgggtgcccattgtgtccttggagtgtgtgtcctgcaaggcacaggccgtgtacgaagtgagccgcagctcctacgtgtacttggagggccgctgcctcaattgcagcagcggctccaagcgagggcggtgggctgcacgtacgttcagcaacaagacgctggtgctggatgagaccaccacatccacgggcagtgcaggcatgcgactggtgctgcggcggggcgtgctgcgggacggcgagggatacaccttcacgctcacggtgctgggccgctctggcgaggaggagggctgcgcctccatccgcctgtcccccaaccgcccgccgctggggggctcttgccgcctcttcccactgggcgctgtgcacgccctcaccaccaaggtgcacttcgaatgcacgggctggcatgacgcggaggatgctggcgcc

SEQ ID NO: 14953 - DNA, 2545 bp, Homo sapiens
  source 1..2545: mol_type = unassigned DNA
ctgctggggacagacgtgcaggtggaagcggcacctgccgccctggagctcgtgtgcccgtcctcggtgcagagtgacgagagcctcgacctcagcatccagaaccgcggtggttcaggcctggaggccgcctacagcatcgtggccctgggcgaggagccggcccgagcggtgcacccgctctgcccctcggacacggagatcttccctggcaacgggcactgctaccgcctggtggtggagaaggcggcctggctgcaggcgcaggagcagtgtcaggcctgggccggggccgccctggcaatggtggacagtcccgccgtgcagcgcttcctggtctcccgggtcaccagggggtggaggtgggcccagcgccgcagggcgaggccttcagcctggagagctgccagaactggctgcccggggagccacacccagccacagccgagcactgcgtccggctcgggcccaccgggtggtgtaacaccgacctgtgctcagcgccgcacagctacgtctgcgagctgcagcccggaggcccagtgcaggatgccgagaacctcctcgtgggagcgcccagtggggacctgcagggacccctgacgcctctggcacagcaggacggcctctcagccccgcacgagcccgtggaggtcatggtattcccgggcctgcgtctgagccgtgaagccttcctcaccacggccgaatttgggacccaggagctccggcggcccgcccagctgcggctgcaggtgtaccggctcctcagcacagcagggaccccggagaacggcagcgagcctgagagcaggtccccggacaacaggacccagctggcccccgcgtgcatgccagggggacgctggtgccctggagccaacatctgcttgccgctggacgcctcctgccacccccaggcctgcgccaatggctgcacgtcagggccagggctacccggggccccctatgcgctatggagagagttcctcttctccgttcccgcggggccccccgcgcagtactcggtcaccctccacggccaggatgtcctcatgctccctggtgacctcgttggcttgcagcacgacgctggccctggcgccctcctgcactgctcgccggctcccggccaccctggtccccgggccccgtacctctccgccaacgcctcgtcatggctgccccacttgccagcccagctggagggcacttgggcctgccctgcctgtgccctgcggctgcttgcagccacggaacagctcaccgtgctgctgggcttgaggcccaaccctggactgcggctgcctgggcgctatgaggtccgggcagaggtgggcaatggcgtgtccaggcacaacctctcctgcagctttgacgtggtctccccagtggctgggctgcgggtcatctaccctgccccccgcgacggccgcctctacgtgcccaccaacggctcagccttggtgctccaggtggactctggtgccaacgccacggccacggctcgctggcctgggggcagtgtcagcgcccgctttgagaatgtctgccctgccctggtggccaccttcgtgcccggctgcccctgggagaccaacgataccctgttctcagtggtagcactgccgtggctcagtgagggggagcacgtggtggacgtggtggtggaaaacagcgccagccgggccaacctcagcctgcgggtgacggcggaggagcccatctgtggcctccgcgccacgcccagccccgaggcccgtgtactgcagggagtcctagtgaggtacagccccgtggtggaggccggctcggacatggtcttccggtggaccatcaacgacaagcagtccctgaccttccagaacgtggtcttcaatgtcatttatcagagcgcggcggtcttcaagctctcactgacggcctccaaccacgtgagcaacgtcaccgtgaactacaacgtaaccgtggagcggatgaacaggatgcagggtctgcaggtctccacagtgccggccgtgctgtcccccaatgccacgctagcactgacggcgggcgtgctggtggactcggccgtggaggtggccttcctgtggacctttggggatggggagcaggccctccaccagttccagcctccgtacaacgagtccttcccggttccagacccctcggtggcccaggtgctggtggagcacaatgtcatgcacacctacgctgccccaggtgctgatccggagtggccgggtgcccattgtgtccttggagtgtgtgtcctgcaaggcacaggccgtgtacgaagtgagccgcagctcctacgtgtacttggagggccgctgcctcaattgcagcagcggctccaagcgagggcggtgggctgcacgtacgttcagcaacaagacgctggtgctggatgagaccaccacatccacgggcagtgcaggcatgcgactggtgctgcggcggggcgtgctgcgggacggcgagggatacaccttcacgctcacggtgctgggccgctctggcgaggaggagggctgcgcct

SEQ ID NO: 14954 - DNA, 722 bp, Homo sapiens
  source 1..722: mol_type = unassigned DNA
ttcatgctgcccgaggacgctgccatggctgtgggtgagtggagggagggacgccaatcagggccaggcctctcacctgccacctgggctcactgacgcctgtccctgcagctgacggcctccaaccacgtgagcaacgtcaccgtgaactacaacgtaaccgtggagcggatgaacaggatgcagggtctgcaggtctccacagtgccggccgtgctgtcccccaatgccacgctagcactgacggcgggcgtgctggtggactcggccgtggaggtggccttcctgtggacctttggggatggggagcaggccctccaccagttccagcctccgtacaacgagtccttcccggttccagacccctcggtggcccaggtgctggtggagcacaatgtcatgcacacctacgctgccccaggtgctgatccggagtggccgggtgcccattgtgtccttggagtgtgtgtcctgcaaggcacaggccgtgtacgaagtgagccgcagctcctacgtgtacttggagggccgctgcctcaattgcagcagcggctccaagcgagggcggtgggctgcacgtacgttcagcaacaagacgctggtgctggatgagaccaccacatccacgggcagtgcaggcatgcgactggtgctgcggcggggcgtgctgcgggacggcgagggatacaccttcacgctcacggtgctgggccgctctggcg

SEQ ID NO: 14955 - DNA, 465 bp, Homo sapiens
  source 1..465: mol_type = unassigned DNA
cggcgggcgtgctggtggactcggccgtggaggtggccttcctgtggacctttggggatggggagcaggccctccaccagttccagcctccgtacaacgagtccttcccggttccagacccctcggtggcccaggtgctggtggagcacaatgtcatgcacacctacgctgccccaggtgagtacctcctgaccgtgctggcatctaatgccttcgagaacctgacgcagcaggtgctgatccggagtggccgggtgcccattgtgtccttggagtgtgtgtcctgcaaggcacaggccgtgtacgaagtgagccgcagctcctacgtgtacttggagggccgctgcctcaattgcagcagcggctccaagcgagggcggtgggctgcacgtacgttcagcaacaagacgctggtgctggatgagaccaccacatccacgggcagtgcaggcatgcgactggtgc

SEQ ID NO: 14956 - DNA, 737 bp, Homo sapiens
  source 1..737: mol_type = unassigned DNA
gggacttcggagacggctccgccgaggtggatgccgctgggccggctgcctcgcatcgctatgtgctgcctgggcgctatcacgtgacggccgtgctggccctgggggccggctcagccctgctggggacagacgtgcaggtggaagcggcacctgccgccctggagctcgtgtgcccgtcctcggtgcagagtgacgagagcctcgacctcagcatccagaaccgcggtggttcaggcctggaggccgcctacagcatcgtggccctgggcgaggagccggcccgagcggtgcacccgctctgcccctcggacacggagatcttccctggcaacgggcactgctaccgcctggtggtggagaaggcggcctggctgcaggcgcaggagcagtgtcaggcctgggccggggccgccctggcaatggtggacagtcccgccgtgcagcgcttcctggtctcccgggtcaccagacacacgggacctggtgctggatgggagcgagtcctacgaccccaacctggaggacggcgaccagacgccgctcagtttccactgggcctgtgtggcttcgacacagagggaggctggcgggtgtgcgctgaactttgggccccgcgggagcagcacggtcaccattccacgggagcggctggcggctggcgtggagtacaccttcagcctgaccgtgtggaaggccggccgcaaggaggaggccaccaaccagacggtgctgat

SEQ ID NO: 14957 - DNA, 667 bp, Homo sapiens
  source 1..667: mol_type = unassigned DNA
cccggcgtggacgtgagccggcctcggctggtgctgccgcggctggcgctgcctgtggggcactactgctttgtgtttgtcgtgtcatttggggacacgccactgacacagagcatccaggccaatgtgacggtggcccccgagcgcctggtgcccatcattgagggtggctcataccgcgtgtggtcagacacacgggacctggtgctggatgggagcgagtcctacgaccccaacctggaggacggcgaccagacgccgctcagtttccactgggcctgtgtggcttcgacacagagggaggctggcgggtgtgcgctgaactttgggccccgcgggagcagcacggtcaccattccacgggagcggctggcggctggcgtggagtacaccttcagcctgaccgtgtggaaggccggccgcaaggaggaggccaccaaccagacgtgctggtggaggccgcacgctctcccctctctgtttctgatgcaaattctatgtaacacgacagcctgcttcagctttgcttccttccaaacctgccacagttccacgtacagtcttcaagccacatatgctctagtggcaaaagctacacagtcccctagcaataccaacagtgaggaagagccccttcccaccccagaggtagccactgtccccagcc

SEQ ID NO: 14958 - DNA, 490 bp, Homo sapiens
  source 1..490: mol_type = unassigned DNA
gtggtggaggccggctcggacatggtcttccggtggaccatcaacgacaagcagtccctgaccttccagaacgtggtcttcaatgtcatttatcagagcgcggcggtcttcaagctctcactgacggcctccaaccacgtgagcaacgtcaccgtgaactacaacgtaaccgtggagcggatgaacaggatgcagggtctgcaggtctccacagtgccggccgtgctgtcccccaatgccacgctagcactgacggcgggcgtgctggtggactcggccgtggaggtggccttcctgtggacctttggggatggggagcaggccctccaccagttccagcctccgtacaacgagtccttcccggttccagacccctcggtggcccaggtgctggtggagcacaatgtcatgcacacctacgctgccccagcttcccccgcgtcggagaccacgtggtgagcgtgcggggcaaaaaccacgtgagctgggc

SEQ ID NO: 14959 - DNA, 659 bp, Homo sapiens
  source 1..659: mol_type = unassigned DNA
caggatgcagggtctgcaggtctccacagtgccggccgtgctgtcccccaatgccacgctagcactgacggcgggcgtgctggtggactcggccgtggaggtggccttcctgtggacctttggggatggggagcaggccctccaccagttccagcctccgtacaacgagtccttcccggttccagacccctcggtggcccaggtgctggtggagcacaatgtcatgcacacctacgctgccccaggtgagtacctcctgaccgtgctggcatctaatgccttcgagaacctgacgcagcaggtgcctgtgagcgtgcgcgcctccctgccctccgtggctgtgggtgtgagtgacggcgtcctggtggccggccggcccgtcaccttctacccgcacccgctgccctcgcctgggggtgttctttacacgtgggacttcggggacggctcccctgtcctgacccagagccagccggctgccaaccacacctatgcctcgaggggcacctaccacgtgcgcctggaggtcaacaacacggtgagcggtgcggcggcccaggcggatgtgcgcgtctttgaggagctccgcggactcagcgtggacatgagcctggccgtggagcagggcgcccccgtggtggtcagcgccgcggtgcaga

SEQ ID NO: 14960 - DNA, 571 bp, Homo sapiens
  source 1..571: mol_type = unassigned DNA
gcagccttccacatcgctgccccgctccctgtcactgccacacgctgggacttcggagacggctccgccgaggtggatgccgctgggccggctgcctcgcatcgctatgtgctgcctgggcgctatcacgtgacggccgtgctggccctgggggccggctcagccctgctggggacagacgtgcaggtggaagcggcacctgccgccctggagctcgtgtgcccgtcctcggtgcagagtgacgagagcctcgacctcagcatccagaaccgcggtggttcaggcctggaggccgcctacagcatcgtggccctgggcgaggagccggcccgagcggtgcacccgctctgcccctcggacacggagatcttccctggcaacgggcactgctaccgcctggtggtggagaaggcggcctggctgcaggcgcaggagcagtgtcaggcctgggccggggccgccctggcaatggtggacagtcccgccgtgcagcgcttcctggtctcccgggtcaccaggcccagtgcaggatgccgagaacctcctcgtgggagcgcccagtggggacctg

SEQ ID NO: 14961 - DNA, 5056 bp, Homo sapiens
  source 1..5056: mol_type = unassigned DNA
ggctcctgaggcgcacagcgccgagcgcggcgccgcgcacccgcgcgccggacgccagtgaccgcgatggtgaactccagtcgcgtgcagcctcagcagcccggggacgccaagcggccgcccgcgccccgcgcgccggacccgggccggctgatggctggctgcgcggccgtgggcgccagcctcgccgccccgggcggcctctgcgagcagcggggcctggagatcgagatgcagcgcatccggcaggcggccgcgcgggaccccccggccggagccgcggcctccccttctcctccgctctcgtcgtgctcccggcaggcgtggagccgcgataaccccggcttcgaggccgaggaggaggaggaggaggtggaaggggaagaaggcggaatggtggtggagatggacgtagagtggcgcccgggcagccggaggtcggccgcctcctcggccgtgagctccgtgggcgcgcggagccgggggcttgggggctaccacggcgcgggccacccgagcgggaggcggcgccggcgagaggaccagggcccgccgtgccccagcccagtcggcggcggggacccgctgcatcgccacctccccctggaagggcagccgccccgagtggcctgggcggagaggctggttcgcgggctgcgaggtctctggggaacaagactcatggaggaaagcagcactaaccgagagaaataccttaaaagtgttttacgggaactggtcacatacctcctttttctcatagtcttgtgcatcttgacctacggcatgatgagctccaatgtgtactactacacccggatgatgtcacagctcttcctagacacccccgtgtccaaaacggagaaaactaactttaaaactctgtcttccatggaagacttctggaagttcacagaaggctccttattggatgggctgtactggaagatgcagcccagcaaccagactgaagctgacaaccgaagtttcatcttctatgagaacctgctgttaggggttccacgaatacggcaactccgagtcagaaatggatcctgctctatcccccaggacttgagagatgaaattaaagagtgctatgatgtctactctgtcagtagtgaagatagggctccctttgggccccgaaatggaaccgcttggatctacacaagtgaaaaagacttgaatggtagtagccactggggaatcattgcaacttatagtggagctggctattatctggatttgtcaagaacaagagaggaaacagctgcacaagttgctagcctcaagaaaaatgtctggctggaccgaggaaccagggcaacttttattgacttctcagtgtacaacgccaacattaacctgttctgtgtggtcaggttattggttgaattcccagcaacaggtggtgtgattccatcttggcaatttcagcctttaaagctgatccgatatgtcacaacttttgatttcttcctggcagcctgtgagattatcttttgtttctttatcttttactatgtggtggaagagatattggaaattcgcattcacaaactacactatttcaggagtttctggaattgtctggatgttgtgatcgttgtgctgtcagtggtagctataggaattaacatatacagaacatcaaatgtggaggtgctactacagtttctggaagatcaaaatactttccccaactttgagcatctggcatattggcagatacagttcaacaatatagctgctgtcacagtattttttgtctggattaagctcttcaaattcatcaattttaacaggaccatgagccagctctcgacaaccatgtctcgatgtgccaaagacctgtttggctttgctattatgttcttcattattttcctagcgtatgctcagttggcataccttgtctttggcactcaggtcgatgacttcagtactttccaagagtgtatcttcactcaattccgtatcattttgggcgatatcaactttgcagagattgaggaagctaatcgagttttgggaccaatttatttcactacatttgtgttctttatgttcttcattcttttgaatatgtttttggctatcatcaatgatacttactctgaagtgaaatctgacttggcacagcagaaagctgaaatggaactctcagatcttatcagaaagggctaccataaagctttggtcaaactaaaactgaaaaaaaataccgtggatgacatttcagagagtctgcggcaaggaggaggcaagttaaactttgacgaacttcgacaagatctcaaagggaagggccatactgatgcagagattgaggcaatattcacaaagtacgaccaagatggagaccaagaactgaccgaacatgaacatcagcagatgagagacgacttggagaaagagagggaggacctggatttggatcacagttctttaccacgtcccatgagcagccgaagtttccctcgaagcctggatgactctgaggaggatgacgatgaagatagcggacatagctccagaaggaggggaagcatttctagtggcgtttcttacgaagagtttcaagtcctggtgagacgagtggaccggatggagcattccatcggcagcatagtgtccaagattgacgccgtgatcgtgaagctagagattatggagcgagccaaactgaagaggagggaggtgctgggaaggctgttggatggggtggccgaggatgaaaggctgggtcgtgacagtgaaatccatagggaacagatggaacggctagtacgtgaagagttggaacgctgggaatccgatgatgcagcttcccagatcagtcatggtttaggcacgccagtgggactaaatggtcaacctcgccccagaagctcccgcccatcttcctcccaatctacagaaggcatggaaggtgcaggtggaaatgggagttctaatgtccacgtatgatatgtgtgtttcagtatgtgtgtttctaataagtgaggaagtggctgtcctgaattgctgtaacaagcacactatttatatgccctgaccaccataggatgctagtctttgtgaccgattgctaatcttctgcactttaatttattttatataaactttacccatggttcaaagatttttttttctttttctcatataagaaatctaggtgtaaatattgagtacagaaaaaaaatcttcatgatgtgtattgagcggtacgcccagttgccaccatgactgagtcttctcagttgacaatgaagtagccttttaaagctagaaaactgtcaaagggcttctgagtttcatttccagtcacaaaaatcagtattgttatttttttccaagagtgtgaaggaaaatggggcattcctttccactctggcatagttcatgagcttaatacatagctttcttttaagaaaggagccttttttttcaactagcttcctggggtaaacttttctaaaagataaaatggaaaggaactccaaactatgatagaatctgtgtgaatggttaagatgaatgttaaatactatgcttttttgtaagttgatcgtatctgatgtctgtgggactaactgtatcacttaatttttaccttattttggctctaatttgaataagctgagtaaaaccaccaaagatcagttataggataaaatggcatctctaaccataacacaggagaattggaaggagccctaagttgtcactcagtttaatttcttttaatggttagtttagcctaaagatttatctgcatattctttttcccatgtggctctactcatttgcaactgaatttaatgttataactcatctagtgagaccaacttactaaatttttagtatgcactgaaagtttttatccaacaattatgttcattttaagcaaaattttaagaaagttttgaaattcataaagcatttggttttaaactattttaagaatatagtactcggtcaggtatgacggctcacgcctgtaatcccagcactttgggaggccgaaacaggcgaatcacttgagcccaggagttcaagaccaacatgggcaatgtggcgaaactccatctctacaaaaaatgcaaaaataaaaaatatagtactcaagtattcttgatcctgtgtttcaaaactagaatttgtaatgcaaatggagctcagtctaataaaaaagaggttttggtattaaaagttcatacattagacagtatcagccaaaatttgagttagcaacactgttttctttacgagagggtctcacccaaatttatggggagaaatctatttctcaaaaaaaaaaatcttcttttacagaaatgttgagtaaggtgacattttgagcgctaataagcaaaagagcatgcagtgctgttgaataaccctcacttggagaaccaagagaatcctgtcgtttaatgctatattttaatttcacaagttgttcatttaactggtagaatgtcagtccaatctccaatgagaacatgagcaaatagacctttccaggttgaaagtgaaacatactgggtttctgtaagtttttcctcatggcttcatctctatctttactttctcttgaatatgctacacaaagttctttattactacatactaaagtttgcattccagggatattgactgtacatatttatgtatatgtaccatgttgttacatgtaaacaaacttcaatttgaagtgcagctattatgtggtatccatgtgtatcgaccatgtgccatatatcaattatggtcactagaaagtctctttatgatactttttattgtactgtttttcatttcacttgcaaaattttgcagaattcctcctttctacccataaattacatatatttttcttctttagtcatggagaactccccccctcatctcttccctattatctttccctgtgtactggtattattaaaaagacattacatacgcaagtctttctcgacaatcaagaatgttattaatgtgtaatactgagcactttacttcttaataaaaacttgatatagtagca

SEQ ID NO: 14962 - DNA, 550 bp, Homo sapiens
  source 1..550: mol_type = unassigned DNA
ccagtcggcggcggggacccgctgcatcgccacctccccctggaagggcagccgccccgagtggcctgggcggagaggctggttcgcgggctgcgaggtctctggggaacaagactcatggaggaaagcagcactaaccgagagaaataccttaaaagtgttttacgggaactggtcacatacctcctttttctcatagtcttgtgcatctgaacaatccctttgtgaaggctgctggtatgtgaatgtgtgccggttcccttggggcgttcatttggatctttctgtgttccagtgacctacggcatgatgagctccaatgtgtactactacacccggatgatgtcacagctcttcctagacacccccgtgtccaaaacggagaaaactaactttaaaactctgtcttccatggaagacttctggaagttcacagaaggctccttattggatgggctgtactggaagatgcagcccagcaaccagactgaagctgacaaccgaagtttcatcttctatgagaacctgctgttaggggttccacgaatac

SEQ ID NO: 14963 - DNA, 693 bp, Homo sapiens
  source 1..693: mol_type = unassigned DNA
gaatgataggggaaaggaaggcaagggtgagagaagaccttgtgtgaatttgtccaaaatgtttatccacaggaacaatccctttgtgaaggctgctggtatgtgaatgtgtgccggttcccttggggcgttcatttggatctttctgtgttccagtgacctacggcatgatgagctccaatgtgtactactacacccggatgatgtcacagctcttcctagacacccccgtgtccaaaacggagaaaactaactttaaaactctgtcttccatggaagacttctggaagttcacagaaggctccttattggatgggctgtactggaagatgcagcccagcaaccagactgaagctgacaaccgaagtttcatcttctatgagaacctgctgttaggggttccacgaatacggcaactccgagtcagaaatggatcctgctctatcccccaggacttgagagatgaaattaaagagtgctatgatgtctactctgtcagtagtgaagatagggctccctttgggccccgaaatggaaccgcttggatctacacaagtgaaaaagacttgaatggtagtagccactggggaatcattgcaacttatagtggagctggctattatctggatttgtcaagaacaagagaggaaacagctgcacaagttgctagcctcaagaaaaatgtctggctgg

SEQ ID NO: 14964 - DNA, 1720 bp, Homo sapiens
  source 1..1720: mol_type = unassigned DNA
aatggtagtagccactggggaatcattgcaacttatagtggagctggctattatctggatttgtcaagaacaagagaggaaacagctgcacaagttgctagcctcaagaaaaatgtctggctggaccgaggaaccagggcaacttttattgacttctcagtgtacaacgccaacattaacctgttctgtgtggtcagctgtcagtggtagctataggaattaacatatacagaacatcaaatgtggaggtgctactacagtttctggaagatcaaaatactttccccaactttgagcatctggcatattggcagatacagttcaacaatatagctgctgtcacagtattttttgtctggattaagctcttcaaattcatcaattttaacaggaccatgagccagctctcgacaaccatgtctcgatgtgccaaagacctgtttggctttgctattatgttcttcattattttcctagcgtatgctcagttggcataccttgtctttggcactcaggtcgatgacttcagtactttccaagagtgtatcttcactcaattccgtatcattttgggcgatatcaactttgcagagattgaggaagctaatcgagttttgggaccaatttatttcactacatttgtgttctttatgttcttcattcttttgaatatgtttttggctatcatcaatgatacttactctgaagtgaaatctgacttggcacagcagaaagctgaaatggaactctcagatcttatcagaaagggctaccataaagctttggtcaaactaaaactgaaaaaaaataccgtggatgacatttcagagagtctgcggcaaggaggaggcaagttaaactttgacgaacttcgacaagatctcaaagggaagggccatactgatgcagagattgaggcaatattcacaaagtacgaccaagatggagaccaagaactgaccgaacatgaacatcagcagatgagagacgacttggagaaagagagggaggacctggatttggatcacagttctttaccacgtcccatgagcagccgaagtttccctcgaagcctggatgactctgaggaggatgacgatgaagatagcggacatagctccagaaggaggggaagcatttctagtggcgtttcttacgaagagtttcaagtcctggtgagacgagtggaccggatggagcattccatcggcagcatagtgtccaagattgacgccgtgatcgtgaagctagagattatggagcgagccaaactgaagaggagggaggtgctgggaaggctgttggatggggtggccgaggatgaaaggctgggtcgtgacagtgaaatccatagggaacagatggaacggctagtacgtgaagagttggaacgctgggaatccgatgatgcagcttcccagatcagtcatggtttaggcacgccagtgggactaaatggtcaacctcgccccagaagctcccgcccatcttcctcccaatctacagaaggcatggaaggtgcaggtggaaatgggagttctaatgtccacgtatgatatgtgtgtttcagtatgtgtgtttctaataagtgaggaagtggctgtcctgaattgctgtaacaagcacactatttatatgccctgaccaccataggatgctagtctttgtgaccgattgctaatcttctgcactttaatttattttatataaactttaccca

SEQ ID NO: 14965 - DNA, 1362 bp, Homo sapiens
  source 1..1362: mol_type = unassigned DNA
atactttccccaactttgagcatctggcatattggcagatacagttcaacaatatagctgctgtcacagtattttttgtctggattaagctcttcaaattcatcaattttaacaggaccatgagccagctctcgacaaccatgtctcgatgtgccaaagacctgtttggctttgctattatgttcttcattattttcctagcgtatgctcagttggcataccttgtctttggcactcaggtcgatgacttcagtactttccaagagtgtataatatgtttttggctatcatcaatgatacttactctgaagtgaaatctgacttggcacagcagaaagctgaaatggaactctcagatcttatcagaaagggctaccataaagctttggtcaaactaaaactgaaaaaaaataccgtggatgacatttcagagagtctgcggcaaggaggaggcaagttaaactttgacgaacttcgacaagatctcaaagggaagggccatactgatgcagagattgaggcaatattcacaaagtacgaccaagatggagaccaagaactgaccgaacatgaacatcagcagatgagagacgacttggagaaagagagggaggacctggatttggatcacagttctttaccacgtcccatgagcagccgaagtttccctcgaagcctggatgactctgaggaggatgacgatgaagatagcggacatagctccagaaggaggggaagcatttctagtggcgtttcttacgaagagtttcaagtcctggtgagacgagtggaccggatggagcattccatcggcagcatagtgtccaagattgacgccgtgatcgtgaagctagagattatggagcgagccaaactgaagaggagggaggtgctgggaaggctgttggatggggtggccgaggatgaaaggctgggtcgtgacagtgaaatccatagggaacagatggaacggctagtacgtgaagagttggaacgctgggaatccgatgatgcagcttcccagatcagtcatggtttaggcacgccagtgggactaaatggtcaacctcgccccagaagctcccgcccatcttcctcccaatctacagaaggcatggaaggtgcaggtggaaatgggagttctaatgtccacgtatgatatgtgtgtttcagtatgtgtgtttctaataagtgaggaagtggctgtcctgaattgctgtaacaagcacactatttatatgccctgaccaccataggatgctagtctttgtgaccgattgctaatcttctgcactttaatttattttatataaactttacccatggttcaaagatttttttttctttttctcatataagaaa

SEQ ID NO: 14966 - DNA, 1554 bp, Homo sapiens
  source 1..1554: mol_type = unassigned DNA
acagttcaacaatatagctgctgtcacagtattttttgtctggattaagctcttcaaattcatcaattttaacaggaccatgagccagctctcgacaaccatgtctcgatgtgccaaagacctgtttggctttgctattatgttcttcattattttcctagcgtatgctcagttggcataccttgtctttggcactcaggtcgatgacttcagtactttccaagagtgtataatatgtttttggctatcatcaatgatacttactctgaagtgaaatctgacttggcacagcagaaagctgaaatggaactctcagatcttatcagaaagggctaccataaagctttggtcaaactaaaactgaaaaaaaataccgtggatgacatttcagagagtctgcggcaaggaggaggcaagttaaactttgacgaacttcgacaagatctcaaagggtgagaatcatgcttcctgaggttctgaaaaattcctgcttctaaagataaattcctggtgataagagtatttctagcccaagggctcatacagatactttttttttttttttccagaggcaggtatctttctggaacatgttataagaggaaaacttgcccccatttggtgatttctcctttcctcctgcattttgatgtctctgtgttgagggtgaactgggtacaaggaatgatttttatctgtatcctctctctaatttcaggaagggccatactgatgcagagattgaggcaatattcacaaagtacgaccaagatggagaccaagaactgaccgaacatgaacatcagcagatgagagacgacttggagaaagagagggaggacctggatttggatcacagttctttaccacgtcccatgagcagccgaagtttccctcgaagcctggatgactctgaggaggatgacgatgaagatagcggacatagctccagaaggaggggaagcatttctagtggcgtttcttacgaagagtttcaagtcctggtgagacgagtggaccggatggagcattccatcggcagcatagtgtccaagattgacgccgtgatcgtgaagctagagattatggagcgagccaaactgaagaggagggaggtgctgggaaggctgttggatggggtggccgaggatgaaaggctgggtcgtgacagtgaaatccatagggaacagatggaacggctagtacgtgaagagttggaacgctgggaatccgatgatgcagcttcccagatcagtcatggtttaggcacgccagtgggactaaatggtcaacctcgccccagaagctcccgcccatcttcctcccaatctacagaaggcatggaaggtgcaggtggaaatgggagttctaatgtccacgtatgatatgtgtgtttcagtatgtgtgtttctaataagtgaggaagtggctgtcctgaattgctgtaacaagcacactatttatatgccctgaccaccataggatgctagtctttgtgaccgattgctaatcttctgcactttaatttattttatataaactttacccatggtt

SEQ ID NO: 14967 - DNA, 1222 bp, Homo sapiens
  source 1..1222: mol_type = unassigned DNA
atgtcttctctctcttacagctcttcaaattcatcaattttaacaggaccatgagccagctctcgacaaccatgtctcgatgtgccaaagacctgtttggctttgctattatgttcttcattattttcctagcgtatgctcagttggcataccttgtctttggcactcaggtcgatgacttcagtactttccaagagtgtatcttcactcaattccgtatcattttgggcgatatcaactttgcagagattgaggaagctaatcgagttttgggaccaatttatttcactacatttgtgttctttatgttcttcattcttttgaatatgtttttggctatcatcaatgatacttactctgaagtgaaatctgacttggcacagcagaaagctgaaatggaactctcagatcttatcagaaagggctaccataaagctttggtcaaactaaaactgaaaaaaaataccgtggatgacatttcagagagtctgcggcaaggaggaggcaagttaaactttgacgaacttcgacaagatctcaaagggaagggccatactgatgcagagattgaggcaatattcacaaagtacgaccaagatggagaccaagaactgaccgaacatgaacatcagcagatgagagacgacttggagaaagagagggaggacctggatttggatcacagttctttaccacgtcccatgagcagccgaagtttccctcgaagcctggatgactctgaggaggatgacgatgaagatagcggacatagctccagaaggaggggaagcatttctagtggcgtttcttacgaagagtttcaagtcctggtgagacgagtggaccggatggagcattccatcggcagcatagtgtccaagattgacgccgtgatcgtgaagctagagattatggagcgagccaaactgaagaggagggaggtgctgggaaggctgttggatggggtggccgaggatgaaaggctgggtcgtgacagtgaaatccatagggaacagatggaacggctagtacgtgaagagttggaacgctgggaatccgatgatgcagcttcccagatcagtcatggtttaggcacgccagtgggactaaatggtcaacctcgccccagaagctcccgcccatcttcctcccaatctacagaaggcatggaaggtgcaggtggaaatgggagttctaatgtccacgtatgatatgtgtgttt

SEQ ID NO: 14968 - DNA, 2845 bp, Homo sapiens
  source 1..2845: mol_type = unassigned DNA
attgccactcagaatcctcgcgcgctgctcggagccggagggagcgctgggagcgagcaagcgagcgtttggagcccgggccagcagagggggcgcccggtcgctgcctgtaccgctcccgctggtcatctccgccgcgctcgggggccccgggaggagcgagaccgagtcggagagtccgggagccaagccgggcgaaacccaactgcggaggacgcccgccccactcagcctcctcctgcgtccgagccggggagcatcgccgagcgccccacgggccggagagctgggagcacaggtcccggcagccccagggatggtctaggagccggcgtaaggctcgctgctctgctccctgccggggctagccgcctcctgccgatcgcccggggctgcgagctgcggcggcccggggctgctcgccgggcggcgcaggccggagaagttagttgtgcgcgcccttagtgcgcggaaccagccagcgagcgagggagcagcgaggcgccgggaccatgggctgggggagccgctgctgctgcccgggacgtttggacctgctgtgcgtgctggcgctgctcgggggctgcctgctccccgtgtgtcggacgcgcgtctacaccaaccactgggcagtcaaaatcgccgggggcttcccggaggccaaccgtatcgccagcaagtacggattcatcaacataggacagataggggccctgaaggactactaccacttctaccatagcaggacgattaaaaggtcagttatctcgagcagagggacccacagtttcatttcaatggaaccaaaggtggaatggatccaacagcaagtggtaaaaaagcggacaaagagggattatgacttcagtcgtgcccagtctacctatttcaatgatcccaagtggcccagcatgtggtatatgcactgcagtgacaatacacatccctgccagtctgacatgaatatcgaaggagcctggaagagaggctacacgggaaagaacattgtggtcactatcctggatgacggaattgagagaacccatccagatctgatgcaaaactacgatgctctggcaagttgcgacgtgaatgggaatgacttggacccaatgcctcgttatgatgcaagcaacgagaacaagcatgggactcgctgtgctggagaagtggcagccgctgcaaacaattcgcactgcacagtcggaattgctttcaacgccaagatcggaggagtgcgaatgctggacggagatgtcacggacatggttgaagcaaaatcagttagcttcaacccccagcacgtgcacatttacagcgccagctggggcccggatgatgatggcaagactgtggacggaccagcccccctcacccggcaagcctttgaaaacggcgttagaatggggcggagaggcctcggctctgtgtttgtttgggcatctggaaatggtggaaggagcaaagaccactgctcctgtgatggctacaccaacagcatctacaccatctccatcagcagcactgcagaaagcggaaagaaaccttggtacctggaagagtgttcatccacgctggccacaacctacagcagcggggagtcctacgataagaaaatcatcactacagatctgaggcagcgttgcacggacaaccacactgggacgtcagcctcagcccccatggctgcaggcatcattgcgctggccctggaagccaatccgtttctgacctggagagacgtacagcatgttattgtcaggacttcccgtgcgggacatttgaacgctaatgactggaaaaccaatgctgctggttttaaggtgagccatctttatggatttggactgatggacgcagaagccatggtgatggaggcagagaagtggaccaccgttccccggcagcacgtgtgtgtggagagcacagaccgacaaatcaagacaatccgccctaacagtgcagtgcgctccatctacaaagcttcaggctgctcggataaccccaaccgccatgtcaactacctggagcacgtcgttgtgcgcatcaccatcacccaccccaggagaggagacctggccatctacctgacctcgccctctggaactaggtctcagcttttggccaacaggctatttgatcactccatggaaggattcaaaaactgggagttcatgaccattcattgctggggagaaagagctgctggtgactgggtccttgaagtttatgatactccctctcagctaaggaactttaagactccaggtaaattgaaagaatggtctttggtcctctacggcacctccgtgcagccatattcaccaaccaatgaatttccgaaagtggaacggttccgctatagccgagttgaagaccccacagacgactatggcacagaggattatgcaggtgagctggcttccagtgggacacaggctaaaaagaggcagctcatgcatcatcccaccacatgggagaacagaatggaatggaatggaatgaaatggaatggaatgaaatggaatggaatggaatggaatggaatggaatggaatcgaatcgaatcgaatcgaatagaatagaatagaatagaacagaacagaatagaatagaacagaacaatctactacccatattctgacatattttcttccccttaaatatttgtgtgtgtatatcagtgcactcatatattcaaatatccatatgtgttatctgcaaagctaatagtccatattgcgattgtaccataatatagttaatctgtaatctgggacatattgttcgcttacagaattttacactattttaaacacggtttggataaacatcattatttatc

SEQ ID NO: 14969 - DNA, 5756 bp, Homo sapiens
  source 1..5756: mol_type = unassigned DNA
cggagggagcgctgggagcgagcaagcgagcgtttggagcccgggccagcagagggggcgcccggtcgctgcctgtaccgctcccgctggtcatctccgccgcgctcgggggccccgggaggagcgagaccgagtcggagagtccgggagccaagccgggcgaaacccaactgcggaggacgcccgccccactcagcctcctcctgcgtccgagccggggagcatcgccgagcgccccacgggccggagagctgggagcacaggtcccggcagccccagggatggtctaggagccggcgtaaggctcgctgctctgctccctgccggggctagccgcctcctgccgatcgcccggggctgcgagctgcggcggcccggggctgctcgccgggcggcgcaggccggagaagttagttgtgcgcgcccttagtgcgcggaaccagccagcgagcgagggagcagcgaggcgccgggaccatgggctgggggagccgctgctgctgcccgggacgtttggacctgctgtgcgtgctggcgctgctcgggggctgcctgctccccgtgtgtcggacgcgcgtctacaccaaccactgggcagtcaaaatcgccgggggcttcccggaggccaaccgtatcgccagcaagtacggattcatcaacataggacagataggggccctgaaggactactaccacttctaccatagcaggacgattaaaaggtcagttatctcgagcagagggacccacagtttcatttcaatggaaccaaaggtggaatggatccaacagcaagtggtaaaaaagcggacaaagagggattatgacttcagtcgtgcccagtctacctatttcaatgatcccaagtggcccagcatgtggtatatgcactgcagtgacaatacacatccctgccagtctgacatgaatatcgaaggagcctggaagagaggctacacgggaaagaacattgtggtcactatcctggatgacggaattgagagaacccatccagatctgatgcaaaactacgatgctctggcaagttgcgacgtgaatgggaatgacttggacccaatgcctcgttatgatgcaagcaacgagaacaagcatgggactcgctgtgctggagaagtggcagccgctgcaaacaattcgcactgcacagtcggaattgctttcaacgccaagatcggaggagtgcgaatgctggacggagatgtcacggacatggttgaagcaaaatcagttagcttcaacccccagcacgtgcacatttacagcgccagctggggcccggatgatgatggcaagactgtggacggaccagcccccctcacccggcaagcctttgaaaacggcgttagaatggggcggagaggcctcggctctgtgtttgtttgggcatctggaaatggtggaaggagcaaagaccactgctcctgtgatggctacaccaacagcatctacaccatctccatcagcagcactgcagaaagcggaaagaaaccttggtacctggaagagtgttcatccacgctggccacaacctacagcagcggggagtcctacgataagaaaatcatcactacagatctgaggcagcgttgcacggacaaccacactgggacgtcagcctcagcccccatggctgcaggcatcattgcgctggccctggaagccaatccgtttctgacctggagagacgtacagcatgttattgtcaggacttcccgtgcgggacatttgaacgctaatgactggaaaaccaatgctgctggttttaaggtgagccatctttatggatttggactgatggacgcagaagccatggtgatggaggcagagaagtggaccaccgttccccggcagcacgtgtgtgtggagagcacagaccgacaaatcaagacaatccgccctaacagtgcagtgcgctccatctacaaagcttcaggctgctcggataaccccaaccgccatgtcaactacctggagcacgtcgttgtgcgcatcaccatcacccaccccaggagaggagacctggccatctacctgacctcgccctctggaactaggtctcagcttttggccaacaggctatttgatcactccatggaaggattcaaaaactgggagttcatgaccattcattgctggggagaaagagctgctggtgactgggtccttgaagtttatgatactccctctcagctaaggaactttaagactccaggtaaattgaaagaatggtctttggtcctctacggcacctccgtgcagccatattcaccaaccaatgaatttccgaaagtggaacggttccgctatagccgagttgaagaccccacagacgactatggcacagaggattatgcaggtccctgcgaccctgagtgcagtgaggttggctgtgacgggccaggaccagaccactgcaatgactgtttgcactactactacaagctgaaaaacaataccaggatctgtgtctccagctgcccccctggccactaccacgccgacaagaagcgctgcaggaagtgtgcccccaactgtgagtcctgctttgggagccatggtgaccaatgcatgtcctgcaaatatggatactttctgaatgaagaaaccaacagctgtgttactcactgccctgatgggtcatatcaggataccaagaaaaatctttgccggaaatgcagtgaaaactgcaagacatgtactgaattccataactgtacagaatgtagggatgggttaagcctgcagggatcccggtgctctgtctcctgtgaagatggacggtatttcaacggccaggactgccagccctgccaccgcttctgcgccacttgtgctggggcaggagctgatgggtgcattaactgcacagagggctacttcatggaggatgggagatgcgtgcagagctgtagtatcagctattactttgaccactcttcagagaatggatacaaatcctgcaaaaaatgtgatatcagttgtttgacgtgcaatggcccaggattcaagaactgtacaagctgccctagtgggtatctcttagacttaggaatgtgtcaaatgggagccatttgcaaggatgcaacggaagagtcctgggcggaaggaggcttctgtatgcttgtgaaaaagaacaatctgtgccaacggaaggttcttcaacaactttgctgcaaaacatgtacatttcaaggctgagcagccatcttagatttctttgttcctgtagacttatagattattccatattattaaaaagaaaaaagccaaaaagaaaaaaaaaaaaagcaagccacctctctctttcttttcttgctctctttttctttctctctctctcaagtttgtgcagggagatggtgaactgttttgtcagaacttaaatggaaaaaaaaataaaactacaacaagcctaccttttataactgggtgtttagtgctaaacagccagaaccacagagacagtattgtatgaccaaagcatttgatgccaaaatttgacgttaaagtaatgatttgatttcctgccctggttttgaaggtccatttttttcccttttgcattgacttgcttgtttcccctttgaaacacctaaaaatacctttccaaaacatcgcgagagcatacatagacaaaaatgaaatagaaagctcttgcatgcttgagtccaccattgggggaaatgacagaaaactggacctgagggcattaggaacatcctacagagttgtgtttagtgtcgtttgccatggtatttcacagtgaaacatggatactctccacacatcatttacttcatgctgtgtacttatgtactggtttttgcattttactcacttgataagtctgctccactggtttcatcagatagacttgctgctactggcttttccattgtagattgggttattttacacgcagttcgccaaatgggattgctctgtatagtcaaattggtgatggacagatggacagaatgcagaggtacatagatgagctgaggctgatccagctcccctgaaattcagagtgttaactttgtagaccctgcacaatctcttggtgctatctagccattacccccattttttttttaaaggccatctgaaattccatttgtcatggtgggaagcattttggatatgatgcaggaaatctcttcctggagtcaaaagttcccaagaggtcctgtatttttaagaaatggaatttatttaaataatatttaagcttgtgcccatgttggccgggcaacttttttcaatggtgcttattagaagaagttttttcatcttgtcattttaagaaaataaaactggaaattgaatatgggtggcatgattgtacccttttagttctcttatttttctactcctctgtccctctataactatgccatactattatatgctggtccactgaatgctgagatgatctgttttttggggttttttttttttaagaaatattttcactggttttctgtgactctctaaacacttcatcgaaactagaagactgaattatgaggaaactatttggattagtggccagaaacgatgaaatcttatagatcttttgacagtttctctgtttaggggagcctagactgatatcaagtttcttcatatcaaagcttcattggtgacctcatttgctttacaagtgaccagccatcttgcaggcttcatgcttctgagagccttacttagaagatgctgctggagtcacagctgaggagaggaatactatcaacatggactatcctgggaaagagctaggaagtagatgctgaggtccccatccaaacagcaagctaggaaaaagcctgccttgaaaatatttctagacatcaaagataacttacaacccaaagtgaataataagtaaatagtctgatgaccctcttaatagcattgcaattgtattgaatcacataatgattcataagtaactagggaaccaactgattttgctaagcagtcttccccttataacaccacaggcccttctgacacacaaaaaaatgaaagttaatcctgggtacagcatacagttttacatttaaacgcacagtcttacgtggacaaatgcaagcacaagcctaaagcaaggtcaagcagatggcaaaaccgaatttgcctgcaaagaaatctatttaactgaatcagcccataatatttgaggcacgaggttactgtgattgataggaaagataaaaatgatgtctgtttttgtagacgaataaccatcaacatgacaacaaaattcattggggtctaccagcgtgcattccatttcccactgaccatgcaggtgcacgtcgcggaaatactggtttaactactagtgtgttactgcctcatttatctacataacattattaactagaacataatgctttcaaagtttaagttaatgttatatattatgtataaatatatatattcataatgagatatatgtaatggatagtacaaagtttggagactcaacaaatgctctaaccttctagagacaaaagtcctatttctgttttcttttgtctttttattttcaattagtgacccattgttaaatccaaatccacttttactgaaaaatactgtacatgtgtaaaatgttcagttgtttttttgtaaaatatagtagaacggttgtaactgatactggccaaaatcaatgttattccatattttattttttctattaaattaacctaagttcctgttta

SEQ ID NO: 14970 - DNA, 4731 bp, Homo sapiens
  source 1..4731: mol_type = unassigned DNA
aacagcatctacaccatctccatcagcagcactgcagaaagcggaaagaaaccttggtacctggaagagtgttcatccacgctggccacaacctacagcagcggggagtcctacgataagaaaatcatcactacagatctgaggcagcgttgcacggacaaccacactgggacgtcagcctcagcccccatggctgcaggcatcattgcgctggccctggaagccaatccgtttctgacctggagagacgtacagcatgttattgtcaggacttcccgtgcgggacatttgaacgctaatgactggaaaaccaatgctgctggttttaaggtgagccatctttatggatttggactgatggacgcagaagccatggtgatggaggcagagaagtggaccaccgttccccggcagcacgtgtgtgtggagagcacagaccgacaaatcaagacaatccgccctaacagtgcagtgcgctccatctacaaagcttcaggctgctcggataaccccaaccgccatgtcaactacctggagcacgtcgttgtgcgcatcaccatcacccaccccaggagaggagacctggccatctacctgacctcgccctctggaactaggtctcagcttttggccaacaggctatttgatcactccatggaaggattcaaaaactgggagttcatgaccattcattgctggggagaaagagctgctggtgactgggtccttgaagtttatgatactccctctcagctaaggaactttaagactccaggtaaattgaaagaatggtctttggtcctctacggcacctccgtgcagccatattcaccaaccaatgaatttccgaaagtggaacggttccgctatagccgagttgaagaccccacagacgactatggcacagaggattatgcaggtccctgcgaccctgagtgcagtgaggttggctgtgacgggccaggaccagaccactgcaatgactgtttgcactactactacaagctgaaaaacaataccaggatctgtgtctccagctgcccccctggccactaccacgccgacaagaagcgctgcaggaagtgtgcccccaactgtgagtcctgctttgggagccatggtgaccaatgcatgtcctgcaaatatggatactttctgaatgaagaaaccaacagctgtgttactcactgccctgatgggtcatatcaggataccaagaaaaatctttgccggaaatgcagtgaaaactgcaagacatgtactgaattccataactgtacagaatgtagggatgggttaagcctgcagggatcccggtgctctgtctcctgtgaagatggacggtatttcaacggccaggactgccagccctgccaccgcttctgcgccacttgtgctggggcaggagctgatgggtgcattaactgcacagagggctacttcatggaggatgggagatgcgtgcagagctgtagtatcagctattactttgaccactcttcagagaatggatacaaatcctgcaaaaaatgtgatatcagttgtttgacgtgcaatggcccaggattcaagaactgtacaagctgccctagtgggtatctcttagacttaggaatgtgtcaaatgggagccatttgcaaggatggagaatatgttgatgagcatggccactgccagacctgtgaggcctcatgtgccaagtgccagggaccaacccaggaagactgcactacctgccccatgacaaggatttttgatgatggccgctgtgtttcgaactgcccctcatggaaatttgaatttgagaaccaatgccatccatgccaccacacctgccagagatgccaaggaagtggccctacccactgcacctcctgtggagcagacaactatggccgagagcacttcctgtaccagggagagtgtggagatagctgcccagagggccactatgccactgaggggaacacctgcctgccctgcccagacaactgtgagctttgccacagcgtgcatgtctgcacaagatgcatgaagggctacttcatagcgcccaccaaccacacatgccagaagttagagtgtggacaaggtgaagtccaagacccagactatgaagaatgtgtcccttgtgaagaaggatgtctgggatgcagcttggatgatccaggaacatgtacatcttgcgctatggggtattacaggtttgatcaccattgttataaaacctgtcctgagaagacctacagtgaggaagtggaatgcaaggcgtgtgatagtaactgtggcagctgtgaccagaatgggtgttactggtgtgaagagggcttctttctcttaggtggcagttgtgtgaggaaatgtggtcctggattctatggtgaccaagaaatgggagaatgtgagtcctgccaccgagcatgcgaaacctgcacaggccctggtcatgacgagtgcagcagctgccaggaaggactgcagctgctgcgtgggatgtgcgtgcatgccaccaagacccaggaggagggcaaattctggaatgaagctgtgtccactgcaaacctatctgtggtgaagagcctgctgcaggagcgacgaaggtggaaagttcaaatcaaaagagatattttgagaaaactccagccttgtcattcttcttgtaaaacctgcaatggatctgcaactctgtgcacttcatgtcccaaaggtgcatatcttctggctcaggcctgtgtttcctcctgtccccaaggcacatggccttccgtaaggagtgggagctgcgagaactgtacggaggcctgtgccatctgctctggagccgatctttgcaaaaaatgccagatgcagccgggccaccctctcttcctccatgaaggcaggtgctactccaagtgcccggagggctcttatgcagaagacggcatatgtgaacgctgtagctctccttgcagaacatgtgaaggaaacgccaccaactgccattcttgtgaaggaggccacgtcctgcaccacggagtgtgccaggaaaactgccccgagaggcacgtggctgtgaagggggtatgcaagcattgcccagagatgtgtcaggactgcatccatgagaaaacatgcaaagagtgcacgcctgagttcttcctgcacgatgatatgtgccaccagtcctgtccccgtggcttctatgcagactcgcgccactgtgtcccctgccataaagactgtctggagtgcagtggccccaaagccgacgactgcgagctctgtcttgagagttcctgggtcctctatgatggactgtgcttggaggagtgtccagcaggaacctattatgaaaaggagactaaggagtgcagagattgccacaagtcctgcttgacctgctcatcatctgggacctgcaccacctgtcagaaaggcctgatcatgaaccctcgtgggagctgcatggccaacgagaagtgctcaccctccgagtactgggatgaggatgctcccgggtgcaagccctgccatgttaagtgcttccactgcatggggccggcggaggaccagtgtcaaacatgccccatgaacagccttcttctcaacacaacctgtgtgaaggactgcccagagggctattatgccgatgaggacagcaaccggtgtgcccactgccacagctcttgcaggacatgtgaagggagacacagcaggcagtgccactcctgccgaccgggctggttccagctaggaaaagagtgcctgctccagtgcagggaaggatattacgcagacaactccactggccggtgtgagaggtgcaacaggagctgcaaggggtgccagggcccacggcccacagactgcctgtcttgcgatagatttttctttctgctccgctccaaaggagagtgtcatcgctcctgcccagaccattactatgtagagcaaagcacacagacctgtgagagatgccatccgacttgtgatcaatgcaaaggaaaaggagcgttgaattgtttatcctgtgtgtggagttaccacctcatgggagggatctgcacctcggactgtcttgtgggggaatacagagtgggagagggagagaagtttaactgtgaaaaatgccacgagagctgcatggaatgcaagggaccaggggccaagaactgcaccttgtgccctgccaacctggtgctgcacatggacgacagccactgcctccactgctgcaacacctctgatccccccagtgcccaggagtgctgtgactgccaggacaccacggacgaatgcatccttcgaacaagcaaggttaggcctgcaactgagcatttcaagacagctctgttcatcacctcctccatgatgctggtgcttctgctcggggcagctgtggtagtgtggaagaaatctcgtggccgagtccagccagcagcaaaggccggctatgaaaaactggccgaccccaacaagtcttactcctcctataagagcagctatagagagagcaccagctttgaagaggatcaggtgattgagtacagggatcgggactatgatgaggatgatgatgatgacatcgtctacatgggccaggatggcacagtctaccggaaatttaaatatgggctgctggatgacgatgacatagatgagctggaatatgatgacgagagttactcctactaccagtaaacaggcactcccccaccaacaccaccattccactctcaggcatgcctg

SEQ ID NO: 14971 - DNA, 503 bp, Homo sapiens
  source 1..503: mol_type = unassigned DNA
tgccagccctgccaccgcttctgcgccacttgtgctggggcaggagctgatgggtgcattaactgcacagagggctacttcatggaggatgggagatgcgtgcagagctgtagtatcagctattactttgaccactcttcagagaatggatacaaatcctgcaaaaaatgtgatatcagttgtttgacgtgcaatggcccaggattcaagaactgtacaagctgccctagtgggtatctcttagacttaggaatgtgtcaaatgggagccatttgcaaggatgtttctctgtttaggggagcctagactgatatcaagtttcttcatatcaaagcttcattggtgacctcatttgctttacaagtgaccagccatcttgcaggcttcatgcttctgagagccttacttagaagatgctgctggagtcacagctgaggagaggaatactatcaacatggactatcctgggaaagagctaggaagtagatgctgaggtccccatc

SEQ ID NO: 14972 - DNA, 9538 bp, Homo sapiens
  source 1..9538: mol_type = unassigned DNA
atttatgcagagcaggagctgctgccattgccactcagaatcctcgcgcgctgctcggagccggagggagcgctgggagcgagcaagcgagcgtttggagcccgggccagcagagggggcgcccggtcgctgcctgtaccgctcccgctggtcatctccgccgcgctcgggggccccgggaggagcgagaccgagtcggagagtccgggagccaagccgggcgaaacccaactgcggaggacgcccgccccactcagcctcctcctgcgtccgagccggggagcatcgccgagcgccccacgggccggagagctgggagcacaggtcccggcagccccagggatggtctaggagccggcgtaaggctcgctgctctgctccctgccggggctagccgcctcctgccgatcgcccggggctgcgagctgcggcggcccggggctgctcgccgggcggcgcaggccggagaagttagttgtgcgcgcccttagtgcgcggaaccagccagcgagcgagggagcagcgaggcgccgggaccatgggctgggggagccgctgctgctgcccgggacgtttggacctgctgtgcgtgctggcgctgctcgggggctgcctgctccccgtgtgtcggacgcgcgtctacaccaaccactgggcagtcaaaatcgccgggggcttcccggaggccaaccgtatcgccagcaagtacggattcatcaacataggacagataggggccctgaaggactactaccacttctaccatagcaggacgattaaaaggtcagttatctcgagcagagggacccacagtttcatttcaatggaaccaaaggtggaatggatccaacagcaagtggtaaaaaagcggacaaagagggattatgacttcagtcgtgcccagtctacctatttcaatgatcccaagtggcccagcatgtggtatatgcactgcagtgacaatacacatccctgccagtctgacatgaatatcgaaggagcctggaagagaggctacacgggaaagaacattgtggtcactatcctggatgacggaattgagagaacccatccagatctgatgcaaaactacgatgctctggcaagttgcgacgtgaatgggaatgacttggacccaatgcctcgttatgatgcaagcaacgagaacaagcatgggactcgctgtgctggagaagtggcagccgctgcaaacaattcgcactgcacagtcggaattgctttcaacgccaagatcggaggagtgcgaatgctggacggagatgtcacggacatggttgaagcaaaatcagttagcttcaacccccagcacgtgcacatttacagcgccagctggggcccggatgatgatggcaagactgtggacggaccagcccccctcacccggcaagcctttgaaaacggcgttagaatggggcggagaggcctcggctctgtgtttgtttgggcatctggaaatggtggaaggagcaaagaccactgctcctgtgatggctacaccaacagcatctacaccatctccatcagcagcactgcagaaagcggaaagaaaccttggtacctggaagagtgttcatccacgctggccacaacctacagcagcggggagtcctacgataagaaaatcatcactacagatctgaggcagcgttgcacggacaaccacactgggacgtcagcctcagcccccatggctgcaggcatcattgcgctggccctggaagccaatccgtttctgacctggagagacgtacagcatgttattgtcaggacttcccgtgcgggacatttgaacgctaatgactggaaaaccaatgctgctggttttaaggtgagccatctttatggatttggactgatggacgcagaagccatggtgatggaggcagagaagtggaccaccgttccccggcagcacgtgtgtgtggagagcacagaccgacaaatcaagacaatccgccctaacagtgcagtgcgctccatctacaaagcttcaggctgctcggataaccccaaccgccatgtcaactacctggagcacgtcgttgtgcgcatcaccatcacccaccccaggagaggagacctggccatctacctgacctcgccctctggaactaggtctcagcttttggccaacaggctatttgatcactccatggaaggattcaaaaactgggagttcatgaccattcattgctggggagaaagagctgctggtgactgggtccttgaagtttatgatactccctctcagctaaggaactttaagactccaggtaaattgaaagaatggtctttggtcctctacggcacctccgtgcagccatattcaccaaccaatgaatttccgaaagtggaacggttccgctatagccgagttgaagaccccacagacgactatggcacagaggattatgcaggtccctgcgaccctgagtgcagtgaggttggctgtgacgggccaggaccagaccactgcaatgactgtttgcactactactacaagctgaaaaacaataccaggatctgtgtctccagctgcccccctggccactaccacgccgacaagaagcgctgcaggaagtgtgcccccaactgtgagtcctgctttgggagccatggtgaccaatgcatgtcctgcaaatatggatactttctgaatgaagaaaccaacagctgtgttactcactgccctgatgggtcatatcaggataccaagaaaaatctttgccggaaatgcagtgaaaactgcaagacatgtactgaattccataactgtacagaatgtagggatgggttaagcctgcagggatcccggtgctctgtctcctgtgaagatggacggtatttcaacggccaggactgccagccctgccaccgcttctgcgccacttgtgctggggcaggagctgatgggtgcattaactgcacagagggctacttcatggaggatgggagatgcgtgcagagctgtagtatcagctattactttgaccactcttcagagaatggatacaaatcctgcaaaaaatgtgatatcagttgtttgacgtgcaatggcccaggattcaagaactgtacaagctgccctagtgggtatctcttagacttaggaatgtgtcaaatgggagccatttgcaaggatggagaatatgttgatgagcatggccactgccagacctgtgaggcctcatgtgccaagtgccagggaccaacccaggaagactgcactacctgccccatgacaaggatttttgatgatggccgctgtgtttcgaactgcccctcatggaaatttgaatttgagaaccaatgccatccatgccaccacacctgccagagatgccaaggaagtggccctacccactgcacctcctgtggagcagacaactatggccgagagcacttcctgtaccagggagagtgtggagatagctgcccagagggccactatgccactgaggggaacacctgcctgccctgcccagacaactgtgagctttgccacagcgtgcatgtctgcacaagatgcatgaagggctacttcatagcgcccaccaaccacacatgccagaagttagagtgtggacaaggtgaagtccaagacccagactatgaagaatgtgtcccttgtgaagaaggatgtctgggatgcagcttggatgatccaggaacatgtacatcttgcgctatggggtattacaggtttgatcaccattgttataaaacctgtcctgagaagacctacagtgaggaagtggaatgcaaggcgtgtgatagtaactgtggcagctgtgaccagaatgggtgttactggtgtgaagagggcttctttctcttaggtggcagttgtgtgaggaaatgtggtcctggattctatggtgaccaagaaatgggagaatgtgagtcctgccaccgagcatgcgaaacctgcacaggccctggtcatgacgagtgcagcagctgccaggaaggactgcagctgctgcgtgggatgtgcgtgcatgccaccaagacccaggaggagggcaaattctggaatgatattttgagaaaactccagccttgtcattcttcttgtaaaacctgcaatggatctgcaactctgtgcacttcatgtcccaaaggtgcatatcttctggctcaggcctgtgtttcctcctgtccccaaggcacatggccttccgtaaggagtgggagctgcgagaactgtacggaggcctgtgccatctgctctggagccgatctttgcaaaaaatgccagatgcagccgggccaccctctcttcctccatgaaggcaggtgctactccaagtgcccggagggctcttatgcagaagacggcatatgtgaacgctgtagctctccttgcagaacatgtgaaggaaacgccaccaactgccattcttgtgaaggaggccacgtcctgcaccacggagtgtgccaggaaaactgccccgagaggcacgtggctgtgaagggggtatgcaagcattgcccagagatgtgtcaggactgcatccatgagaaaacatgcaaagagtgcacgcctgagttcttcctgcacgatgatatgtgccaccagtcctgtccccgtggcttctatgcagactcgcgccactgtgtcccctgccataaagactgtctggagtgcagtggccccaaagccgacgactgcgagctctgtcttgagagttcctgggtcctctatgatggactgtgcttggaggagtgtccagcaggaacctattatgaaaaggagactaaggagtgcagagattgccacaagtcctgcttgacctgctcatcatctgggacctgcaccacctgtcagaaaggcctgatcatgaaccctcgtgggagctgcatggccaacgagaagtgctcaccctccgagtactgggatgaggatgctcccgggtgcaagccctgccatgttaagtgcttccactgcatggggccggcggaggaccagtgtcaaacatgccccatgaacagccttcttctcaacacaacctgtgtgaaggactgcccagagggctattatgccgatgaggacagcaaccggtgtgcccactgccacagctcttgcaggacatgtgaagggagacacagcaggcagtgccactcctgccgaccgggctggttccagctaggaaaagagtgcctgctccagtgcagggaaggatattacgcagacaactccactggccggtgtgagaggtgcaacaggagctgcaaggggtgccagggcccacggcccacagactgcctgtcttgcgatagatttttctttctgctccgctccaaaggagagtgtcatcgctcctgcccagaccattactatgtagagcaaagcacacagacctgtgagagatgccatccgacttgtgatcaatgcaaaggaaaaggagcgttgaattgtttatcctgtgtgtggagttaccacctcatgggagggatctgcacctcggactgtcttgtgggggaatacagagtgggagagggagagaagtttaactgtgaaaaatgccacgagagctgcatggaatgcaagggaccaggggccaagaactgcaccttgtgccctgccaacctggtgctgcacatggacgacagccactgcctccactgctgcaacacctctgatccccccagtgcccaggagtgctgtgactgccaggacaccacggacgaatgcatccttcgaacaagcaaggttaggcctgcaactgagcatttcaagacagctctgttcatcacctcctccatgatgctggtgcttctgctcggggcagctgtggtagtgtggaagaaatctcgtggccgagtccagccagcagcaaaggccggctatgaaaaactggccgaccccaacaagtcttactcctcctataagagcagctatagagagagcaccagctttgaagaggatcaggtgattgagtacagggatcgggactatgatgaggatgatgatgatgacatcgtctacatgggccaggatggcacagtctaccggaaatttaaatatgggctgctggatgacgatgacatagatgagctggaatatgatgacgagagttactcctactaccagtaaacaggcactcccccaccaacaccaccattccactctcaggcatgcctgtgagcatcactgtttttggttttatccccacaccaggctgatgtgtgagtttttctatttgtcttctttaaccatgagtccaaccagaatatgtaagaatgatgaaatactttgttcttcttttgagtggctaaactcaattaacagttcctgttcaaccgtaattgaagagcaaggataaaattcagaggcattttcctcaaaataatgtgttaagacacaaaaatgaaggaagtgaaaacaaatgagatttgtacaaactcttctatgtgattttaaaaaaaggacagcagatctatagaaattctgtttccgagctgcattgtggaggtgtctgctgcctcctggtattctaatttttctttatctaattttggggataatggaggtacaaaggagttgttggtttggtggtgtttttcttccctttagctgtctttaggcagaaatttgttttgtaagggccaagaaaagagggctcttatcaattgactccaggccacccctggtgagcagaagagaccacctgggctgggctgctcaggacctacttgagataagggaagaaaagagaaggtgcatcatagctgaggagccatgaggtcaccccaggccctagttcctccgcaggaatccagagtcacaacaattctaaaggcagagcaagcccagcgagaaagaaataactgaatttccaggaactgcactctcatgattttctgggtacttttcgcctgggagacatcagctaagacatcgaataataaaagaaaaatggcagtgttaacctaacataaaatggaataaaatgacaaacacttcatccgctctaaaaaattcagagctttccttcatcaacaacccatcacaaaaccgtggactctcaatagaaagagttggaatagagtctaacatggaaaaaaaaaaatcccaatatgctgctcacaagctgtactctagctgctgaccagccttccagcactgctcatcactatgatttttgtttctagacttcctaggcttccttttttccattcttctgtcaagtgtattcttggattcatgcaactgaggacagtttttgtccagattgtaacacagagaagggctcttgctatgcaaaatgatgttggcagggtcttacagatttccttgtcaaaatagaccttacaggcagtactagaaatggagcaccagaaagcaaaaatgacattttcagagaatgatgataattataatctattgcacacctactaccagataacaagctaagtaattcccccccaaaaatgccccacttatccattttggtacttaccatactcccatgaggttggtattgctattattctgttcttgtaggaaacctgaggcttacaagaggttaggtaactagtccaaggtcatgcaaagctcaacaaaattcaagaaaaaagaatgatcaccctaaagcgtgtgttcttataactatgctactgaaataaggtgggaaaataagcatcctaaatataattaaagtcatgcctattgttttagtctataatatcaatgttatctttactaaattcatggattttctttttttaacataatgtatcactgacacagaaaatctttatgaagaagtcttcagtttactaaaggcttgtgcttctttagaggaaagctcttaaaacagggttgacaaacagtctctggaaagagccagctagtaagtacattaggctttcttggccagaaagtctctgtcataaccactcagctctgctattatagcatgaatgcagctggtacataacggatgggtgagctgtgcttcaataaaaccttatttatggacactgacatttgaaattcaggtaattttcacatattataaaattttattcttcttttgatttttttcaaccttttaaaatttaaaaatgcaaaagctattctcagttcacagcattacaagaacaggtggtgggtcagatttggccaacaggctgtactttgctgactttatctttaaaacagttttcagagatcatacatgtacatgtatgatatgcctccaaaaattttgatcatttaaaattatctccttggccaggcgtggtggctcatacctctaatcctagcactttgggagactgaggcaggcagatcacctgaagtcaggagtttgataccagcttagccaacatggtgaaaccccatttctactaaaaatacaataaaaatctgggcatgttggtgcacacctgtaatcccagctactcaggaggctgaggcaggcaaatcacttgagcccgggaggcagaggttgcagtgagcggagatggcaccattgcactccagcctgggtgacagagcaagactccatctcaaaaaataagtaactaactaactaactaaataaataaataaataaaattatctccttgccaggactgctggctcatgcctgtaatcccagcactctgggaggctaaggcaggaggattgctgacccaccacctgttcttgagcccaggagttcgacatcagccttggacaacatagtgagactcccgtgtctacaaaaaatttaaaaattagccaggcatggtggcaagtgtctgtagtctcagctactcaggaggctaaggtggaaggatcacttgaacccgggaggtcgaggctgcagtgagctgtgatcttgctattgcacttcagcctgaatgacagagctaagaccctgactcaaaataaataaataacattatctcttcaaaatgtatctgaagccctgatagttctactttcaattcttagaaacatataaaaatatatgcatgatagccatcatatcaatggaagactttctcacctctgtggttgcagttagcttacaaaaacgagcaattttgcttatactgtgttgttcatcttccttgttaattctaaagctctgatagactgagtttgacatttctttctgtaaactggaaattgttttctatgaaaaaaaaactctatgatacacagttaaagattggttgaggttgagatgaacttcaatactaagaaaaattgtggtgttcctctgtgtggcctgcaatgaaaagaaggctcatgcttgtgtattgaggtttgacatctttccttctttgtttttagtcatgcaacgtcattcttagatggcttttgaatactatgctaatgactatctaaatagataaatatgtgattggaaaacaaagtcaccttttagttttctacttggaaatattaagagaatccttgtagactggaaacacaccaaaaggctgggtaaagcatgggaggttccagttaatagaaagtaattttaaaattggaaataaaattaaatcaagacca

SEQ ID NO: 14973 - DNA, 2845 bp, Homo sapiens; identical to SEQ ID NO: 14968
  source 1..2845: mol_type = unassigned DNA

SEQ ID NO: 14974 - DNA, 5756 bp, Homo sapiens; identical to SEQ ID NO: 14969
  source 1..5756: mol_type = unassigned DNA

SEQ ID NO: 14975 - DNA, 4731 bp, Homo sapiens; identical to SEQ ID NO: 14970
  source 1..4731: mol_type = unassigned DNA

SEQ ID NO: 14976 - DNA, 503 bp, Homo sapiens; identical to SEQ ID NO: 14971
  source 1..503: mol_type = unassigned DNA

SEQ ID NO: 14977 - DNA, 9538 bp, Homo sapiens; identical to SEQ ID NO: 14972
  source 1..9538: mol_type = unassigned DNA

SEQ ID NO: 14978 - DNA, 4649 bp, Homo sapiens
  source 1..4649: mol_type = unassigned DNA
gatgctgcgggagacccctgagatacaagtggactctcccggggcgcggggaagaagggagagccgactgcgagaaggaaggcgacctgggtgggcaggatcccctctgggaagattacagggacagtcggggccatggcggtcagaaggagaagagcaacgagtggcttttaaaggtcggaaccgaaatgccctttacagaggacgccatgaaggagagccttctgaagagggaccatgtggaagatgccccgaggactcggggaggcggagcccgcgggttcagcccccagcgcccgcacggcccctgcctgcgtaggccgcccgcgggagccggaccccgggcgccggttgctgtggcccgcgggggtcgccgggccgcaggcgccgcgctgattggctgcgccgcgggcggaagtgatgctgctgtcactgctcctccggctcccgggaagccgcgagtttccgcagggaggcggcggcagctgcggcggggccggtctgtagcctttgctgagtcaacactactcacagtgaaagtgatgccttttctccatttgcacaacatgagtgtgacgtggttagccagaccaggagctcaacctcatgtagaatccagtccactgctctgatgccgaaggggaggcagaaagtgccacacttggatgcccccctgggcctgcccacctgcctctggctggaattagccgggctcttcttactggttccctgggtcatgggcctggcagggacaggtgggcctgatggccagggcacaggggggccgagctgggctgtgcacctggaaagcctggaaggtgacggggaggaagagactctggagcagcaggcggatgccttggcccaggcagcagggctggtgaatgctggacgcatcggagagcttcaggggcactacctctttgtccagcctgctgggcacaggccggccctggaggtggaggccatccggcagcaggtggaggctgtgttggctgggcatgaagctgtgcgctggcactcagagcagaggctgctaaggcgggccaagcgcagcgtccacttcaacgaccccaagtacccgcagcaatggcacctgaataaccgacggagcccgggcagggacatcaacgtgacgggtgtgtgggaacgcaatgtgactgggcgaggggtgacggtggtggtagtggatgacggagtggaacacaccatccaggacattgcacccaactatagccctgagggtagctatgacctcaactctaatgaccctgaccccatgccccacccggatgtggagaatggcaaccaccatggcacgcgatgtgcaggagagatcgcggctgtgcccaacaacagcttctgtgccgtgggcgtggcctacgggagccgcatcgcaggtatccgggtactggatggacctctcacagacagcatggaggcagtggcgttcaacaagcactatcagatcaatgacatctacagctgcagctggggaccagatgacgatgggaagacagtggatggcccccatcagcttggaaaggctgccttacaacatggggtgattgctggtcgccagggctttgggagcatctttgtggtagccagtggcaacggaggccaacacaacgacaactgcaactacgatggctacgccaactccatctacaccgtcaccataggagctgtggatgaggagggacgcatgcctttctatgcagaagaatgtgcctccatgctggcagtcaccttcagtggtggggacaagatgcttcggagcattgtgaccactgactgggaccttcagaagggcactggctgcactgagggccacacagggacctcagctgcagcgcctctggcagctggcatgatagccttaatgctgcaggtgcggccctgcctcacgtggcgtgacgtccagcacatcattgtcttcacagccacccggtatgaggatcgccgtgcagagtgggtcaccaacgaggcaggcttcagccatagccaccagcacggtttcggcctcctcaacgcctggaggctcgtgaatgcagccaagatctggacatctgtcccttacttagcatcctacgtcagtcccgtgttaaaagaaaacaaggcgattccgcagtccccccgttccctggaggtcctgtggaatgtcagcaggatggacctggagatgtcagggctgaagaccctggagcatgtggcagtgacagtctccatcactcacccacggcgcggcagcttggagctgaagctgttctgccccagtggcatgatgtccctcatcggcgccccccgcagcatggactcggatcccaacggcttcaatgactggaccttctccactgtgcgatgctggggggagagagcccgagggacctacaggcttgtcatcagggatgtcggggatgagtcattccaggtcggcatcctccggcaatggcagctgaccctatatggctctgtgtggagtgcagtagacatcagggacagacaaaggctgttagagagtgccatgagtggaaaatacctgcacgatgacttcgccctgccctgcccaccggggctgaaaattcctgaggaagatggttacaccatcacccccaacaccctcaagaccctggtgctggtaggctgtttcaccgtcttctggactgtttactacatgctggaagtatatttgagccagaggaatgtggcttccaatcaagtttgtaggagtggaccctgccactggccccatcggagccggaaagccaaggaggaagggacagagctagaatcagtgccactttgcagcagcaaggatccagacgaagtggaaacagagagcaggggccctcccaccacctctgacctccttgccccagacctgctggagcaaggggactggagcctgtcccagaacaagagcgccctggactgccctcatcagcacctagacgtaccgcacgggaaggaggagcagatctgctgacctcagggcctgacagtgtgggacaggctcttctttcccaaaattagggagctcttgacagaaagcagttctgatgcttacatctggaatctgaggcatcctctgactccactcaaagagggtgagggccttcttaagatacaaatggtggaggattgctgccagagaagtctggtcagagccacagggtctgcctccagccaaacgggagcttttggtgagaaggtgttggacaggggattggcgcccccctttggtttggcctccatcctcatctctcttgggccaagccagctgcctaggtcccccaagcatgggggaccccttcccacatataagttgagaaggtgcctgccatagccaggagcgcatctcaatggaaacatcactggggtcacttgggaagaggacttcggggtagaggctgggaggagcccctggacatgcctgtcctgaaagcggctgcctccattatccattcccaagatgcctgatcagaaaccaaccatgaatgaacccctggctccttcaccacccccacgattggtatgatgctgccggcacagctgggatacacacggctcccccaggcctgagctgcttcactagggaatcctgcggcaggactgcagagcagatggcagatgcacatgttggaggagagagccttgggagccactgccactccagtcctgccaccaccctgtcttcctctgcaagtgctcagggaaatggccttcccgccggaggccagctatctgcctgacaggctgtgactcttctctcaaccttggccttctcccctcttctgagctagttggttgaattttttttaatgcttaagatttgtttttctcttttcacagcaacattttcttgaatttttttctgcacagcttttccaaaataaaaaccttccaaacaattctgccactcgcaatctctcctttcctctgtctccccaaagccactgcatgctgctgagtggctcctttttcccttcggtccccaagattcactctcctgttctatggcctgtttcctctgaaagaatctgactgtcctggaatcttggcacatgaagggtccttcagaggacggcagccaggaacacatacaagcccgagatgcctgcctgtcccctgcgcagatctgaaaccataacaaaagtgaccagggcaaatcaaactctgccagccaggcctgagaaaagattgattttttttttttttttttgagttccaaccccaaaaatattccaggacaagatagggggcaggctgggctggttcttcttcaatgggcttttgccgccaaggaggacagtggacttggcccacatccaggctacccccagcccgcttctcccctgcttagcccagggaggagacagtagaggtgatgggggcagccgggagggaggggccaaggcagtgatgctttcgggtaagaagttgggctgaggctgggggcacagggaggagctgcccaggtgcagttaccattgctcagtgacagagcctcaaagcttggccagggctgaaggtaccacacgggtgtgggtgaggcaggctaagcgggatggctgcagccaaggagctgggggagggccgggctcagggctagccctctccgctctaactgatgatctgccgaggtc

SEQ ID NO: 14979 - DNA, 5393 bp, Homo sapiens
  source 1..5393: mol_type = unassigned DNA
cagcctttgcatttcccagctccccagctccccagctcccagtcccactgatggtcacgggctgctctccatccttttgggggagctgagcagccctattcctccctggaggtggttctgtggttctttcacactcaacgtctgtccatcaaggcaaaaggtgaagggaatgaatggggaagccctcaccataactccttatgtgcttgggaacctacagactgaacagactattcctcttatactccagcagagggcagtagctctccataaatgagaccggaggagccagaaaccctgtccaagtcccttctctgaaagtgccacagcactgcagcctgggcgacagagccagactttgtctctctctatatatatatttttttggtggggggacaagtaatacgtatacatggtgtaaaaatgcaaaatgggctgggcgtgggggctatggggatcacacctgtaatcccagcactttgggaggccaaggcaggcagatcacttgaggtcaggagttcgagaccagcctgaccaatatggtgaaaccccatctctactaaaaatacaaaaattagccgggtgtggtggcatgcgcctgtagtcccagctacttcgaggctgaggcaagacaatcgcttgaacccaggaggtggaggctgcagtgagccgagatcatgccactgcactccagtctgggtgacaagtaagactttatctcaaaaaaaaaaaaaagcaaaatgtacaaagagcatgtagggaaaaataagtctcccacatatggctccccacctcccagttccccggctaggagaccagcattagtgaggagctgctgtggccttcattgcctaggtatccgggtactggatggacctctcacagacagcatggaggcagtggcgttcaacaagcactatcagatcaatgacatctacagctgcaggtgaggcagagctgcagatgagagggcaagagcctggagcacctgggacaaatccgccaacaaaatcccaaccagtgggctgacttaggccggagcaggggtctcctcattgggttcagctaataagtccattgccttcatttctctagattcccagccactgggcactcaaccttaagcccccgtcacccccgtaatcagattgccacatgagaagccctggcctgtgcacatttatttgttttctaaactcctaaggcctctgcaagaaagcgggctttcttctccatccacaggccagctgaatgcccaacaccaatcccccaccccacgccaatgcactgcaccttcagggcatggctgtgctggactggacaagaaggaaatggggttgggggcccacatggcattgatggcacctgttcctcccccgacatacctcccttaaatccatgacatcatccacagggtacacttcccgatagagacagaatagagaactcctcaacctgagaaccaagagcttccacagaagttcatgggcgctctgccttctaccctacgagttgggccaggtgcggtggctcacgcctgtaatcccagcactttgggaggctgaggcatgtggattgcttgaggtcaggagttcaagacctgcctgaccaacatggtgaaaccccatctctactaaaaatacaaaaattagccaggcttggtggtgggcacctgtaatcccagctactccagaggctgaggcaggagaatcgcttgaacctgggaggtggaggtggcagtgagccaaaatcgcgccattgcacttcagcctgggcaacagaggaagacgccgtttcaggagaaaaaaaaaaaaaaaaaaaggtctacatgtctctgatccctagatcaggagatgagtgacctctgtccctctctgccactatgggctatggggacattcacaaggaaaagaagagccttagcacacttctgttttccactttggagaggggatggacctttgaaccctgtgccttttaatcacggaagcctttaagtggaacccttgggaggagttaagagctgcaggtcaaagggcagccagctgagactgggaggcgctgggtgggtagccgcagcctggctctggctgtcccctctaggtatttatttctcaacagctggggaccagatgacgatgggaagacagtggatggcccccatcagcttggaaaggctgccttacaacatggggtgattgctggtcgccagggctttgggagcatctttgtggtagccagtggcaacggaggccaacacaacgacaactgcaactacgatggctacgccaactccatctacaccgtcaccataggtagtcacccaatgtttctgtgctcctgtgtgtgtgtcaccgaagggttagggcatcacacgtcttgtcctagcttctgtgtgtgtctaaatgtgtgagcacaataatctctttgggctcagataggactagccctgcttgcagaggaccttgggacttcttagatgtcagcataccctgggaacaccttcaagccatcatctggagatcaccgagctgcctccaccccaccacagctggttaggcctctgctctggcctgtctttctgtgggccaccttctgcctgctggaagcctcccctgactccccacaggcctaaattaagtgccctttgcctgtgctcccagttagcatgtgtttatttacttacctgacttctacctgactctaggctcctcgagactaggactgcggccttttccatatggccctgatgcctggcacgggtgtgacccacagtagatgggtaatgaatgttgaaaacagtaagcatgtgaatgaataagtgggtatgaaggtagaaggctgccagttgtaccccagagcctactgaaagaatggtattgcggcacagaatgccctctgccacttgagactgcctgttcagaagaggatcaggactgctctgagggacgtgggccgctcagatcatgtttcaaactcaggacagccccccaggatggtaactccaagataactgacattagcaagcccctgccacaggaccccctctgcatctcagctctaatctccctcctctgtccctaggagctgtggatgaggagggacgcatgcctttctatgcagaagaatgtgcctccatgctggcagtcaccttcagtggtggggacaagatgcttcggagcattgtgaccactgactgggaccttcagaagggcactggctgcactgagggccacacagggacctcagctgcagcgcctctggcagctggcatgatagccttaatgctgcaggtgcggccctgcctcacgtggcgtgacgtccagcacatcattgtcttcacagccacccggtatgaggatcgccgtgcagagtgggtcaccaacgaggcaggcttcagccatagccaccagcacggtttcggcctcctcaacgcctggaggctcgtgaatgcagccaagatctggacatctgtcccttacttagcatcctacgtcagtcccgtgttaaaagaaaacaaggcgattccgcagtccccccgttccctggaggtcctgtggaatgtcagcaggatggacctggagatgtcagggctgaagaccctggagcatgtggcagtgacagtctccatcactcacccacggcgcggcagcttggagctgaagctgttctgccccagtggcatgatgtccctcatcggcgccccccgcagcatggactcggatcccaacggcttcaatgactggaccttctccactgtgcgatgctggggggagagagcccgagggacctacaggcttgtcatcagggatgtcggatagcaacaaaaagtccttgtcgaaaccacatttcaagtccttttacgtataaccatccttcggccagccccggtaggcaggggatgagtcattccaggtcggcatcctccggcaatggcagctgaccctatatggctctgtgtggagtgcagtagacatcagggacagacaaaggctgttagagagtgccatgagtggaaaatacctgcacgatgacttcgccctgccctgcccaccggggctgaaaattcctgaggaagatggttacaccatcacccccaacaccctcaagaccctggtgctggtaggctgtttcaccgtcttctggactgtttactacatgctggaagtatatttgagccagaggaatgtggcttccaatcaagtttgtaggagtggaccctgccactggccccatcggagccggaaagccaaggaggaagggacagagctagaatcagtgccactttgcagcagcaaggatccagacgaagtggaaacagagagcaggggccctcccaccacctctgacctccttgccccagacctgctggagcaaggggactggagcctgtcccagaacaagagcgccctggactgccctcatcagcacctagacgtaccgcacgggaaggaggagcagatctgctgacctcagggcctgacagtgtgggacaggctcttctttcccaaaattagggagctcttgacagaaagcagttctgatgcttacatctggaatctgaggcatcctctgactccactcaaagagggtgagggccttcttaagatacaaatggtggaggattgctgccagagaagtctggtcagagccacagggtctgcctccagccaaacgggagcttttggtgagaaggtgttggacaggggattggcgcccccctttggtttggcctccatcctcatctctcttgggccaagccagctgcctaggtcccccaagcatgggggaccccttcccacatataagttgagaaggtgcctgccatagccaggagcgcatctcaatggaaacatcactggggtcacttgggaagaggacttcggggtagaggctgggaggagcccctggacatgcctgtcctgaaagcggctgcctccattatccattcccaagatgcctgatcagaaaccaaccatgaatgaacccctggctccttcaccacccccacgattggtatgatgctgccggcacagctgggatacacacggctcccccaggcctgagctgcttcactagggaatcctgcggcaggactgcagagcagatggcagatgcacatgttggaggagagagccttgggagccactgccactccagtcctgccaccaccctgtcttcctctgcaagtgctcagggaaatggccttcccgccggaggccagctatctgcctgacaggctgtgactcttctctcaaccttggccttctcccctcttctgagctagttggttgaattttttttaatgcttaagatttgtttttctcttttcacagcaacattttcttgaatttttttctgcacagcttttccaaaataaaaaccttccaaac

SEQ ID NO: 14980 - DNA, 695 bp, Homo sapiens
  source 1..695: mol_type = unassigned DNA
aaagtgttgctgggggaaggtcagctctctggcccacgccttccacctgtttctgctgtgttctttcctcagggatcccaacggcttcaatgactggaccttctccactgtgcgatgctggggggagagagcccgagggacctacaggcttgtcatcagggatgtcggctgttagagagtgccatgagtggaaaatacctgcacgatgacttcgccctgccctgcccaccggggctgaaaattcctgaggaagatggttacaccatcacccccaacaccctcaagaccctggtgctggtaggctgtttcaccgtcttctggactgtttactacatgctggaagtatatttgagccagaggaatgtggcttccaatcaagtttgtaggagtggaccctgccactggccccatcggagccggaaagccaaggaggaagggacagagctagaatcagtgccactttgcagcagcaaggatccagacgaagtggaaacagagagcaggggccctcccaccacctctgacctccttgccccagacctgctggagcaaggggactggagcctgtcccagaacaagagcgccctggactgccctcatcagcacctagacgtaccgcacgggaaggaggagcagatctgctgacctcagggcctgacagtgtgggacaggctcttctttcccaaaattaggga

SEQ ID NO: 14981 - DNA, 2346 bp, Homo sapiens
  source 1..2346: mol_type = unassigned DNA
attctgttaggaggccaggagggttagggtttcctttgccctgccctgctattgggtccttctctggtcaaagattcagctctaacaaaggaagggtccacctgtgagacctgttctgaggaccagccctgtacctttcccccataacaactttgaactcagtctctagcttcttttttaaaaaatattctttttttattttttaaagatgggttctcactcagccacctaggctggagtgcagtggcacagtcataactcctgtgctcaagcaatcctcctgcctgggcctcccaggtagccgggactataggtgcacaccactgtccccagcttgaactcagtctctaacctacttccttttcctgtttcacttccaggtgaccactgactgggaccttcagaagggcactggctgcactgagggccacacagggacctcagctgcagcgcctctggcagctggcatgatagccttaatgctgcaggtgcggccctgcctcacgtggcgtgacgtccagcacatcattgtcttcacagccacccgggtgagataccagcaggtagacaagtggcctggcccagcctgctccagagttcgggtatcaggtggccttagattctcaatgtcccaaatgttagatactaagtctctttcagagtccctttcagagttgcatatgtaaagaacaggtgtggggaccccacaaagaccacaggcctaaactcattttatctgcaaaggggagctctggctgtgcctcctggccccttctctagaagcaagccagtggggtggtgacatcatgggctttgaccttttgtcccagcttgccttggggaatccattcccagtagccatagtgggagagcgtggactggatcagccagcagggcaagcagggaaaccagagtcagattgttgagactacactggcaatgcaagagactaaccaggacctctgtcctttcagtatgaggatcgccgtgcagagtgggtcaccaacgaggcaggcttcagccatagccaccagcacggtttcggcctcctcaacgcctggaggctcgtgaatgcagccaaggtgaacaggtgttggcagggcagggtgccctgtgtggagtgaccaagggtcggagctgaatgccccaaactgcctgggatatcataggtgcctagtaaatgttcattcagttcattgatttaacaacttcaaccttcatcccagctgatatccattttacaaatgagaaagcaggctcaatgctatcactgaagtttccaaactactaatagagtaaatgggacctgagtatgtgtgggactcaggatgctctggttcccctcctccaccctggacacagctgtttcctctggttccttagctgggggctgtacggagcattccagcgagcaagcaggagctgagggctgaaggaagatgatgaggagtggaaaaataaagacagctaaaccttcaagatcgtattgacaagggcgtgtgtgtttgtgagaatgtgggtgtgatcattcttgtttgttgatttgccatcccctcctttcctttcatagatctggacatctgtcccttacttagcatcctacgtcagtcccgtgttaaaagaaaacaaggcgattccgcagtccccccgttccctggaggtcctgtggaatgtcagcaggatggacctggagatgtcagggctgaagaccctggagcatgtggcagtgacagtctccatcactcacccacggcgcggcagcttggagctgaagctgttctgccccagtggcatgatgtccctcatcggcgccccccgcagcatggactcggatcccaacggcttcaatgactggaccttctccactgtgcgatgctggggggagagagcccgagggacctacaggcttgtcatcagggatgtcggggatgagtcattccaggtcggcatcctccggcaatggcagctgaccctatatggctctgtgtggagtgcagtagacatcagggacagacaaaggctgttagagagtgccatgagtggaaaatacctgcacgatgacttcgccctgccctgcccaccggggctgaaaattcctgaggaagatggttacaccatcacccccaacaccctcaagaccctggtgctggtaggctgtttcaccgtcttctggactgtttactacatgctggaagtatatttgagccagaggaatgtggcttccaatcaagtttgtaggagtggaccctgccactggccccatcggagccggaaagccaaggaggaagggacagagctagaatcagtgccactttgcagcagcaaggatccagacgaagtggaaac

SEQ ID NO: 14982 - DNA, 925 bp, Homo sapiens
  source 1..925: mol_type = unassigned DNA
ctttgtaacctccttttacaaatgaggaaactggctgggtgtggtggctcacacctgtaatcccagcactttgggaggtcaaggcaggagaatcacttgaactcaggagttcaagaccagcctgggcaacaaagtgagaccctgtctctacaaaaaatttaaagattagctgagcatggtggtacatgcctgtagtcccagctactcaggagactgaggtgggaggatcacttgaacccaggaagtcaaggctgcagtgagctgtgatcatgccactgcactccagcttggataacagagtgagaccctgtctccaaaaaaaaaaagaaagaaaaagaaaacaagtcatggagctagtaagtgcccaagagaacaagaataaacctagatccgtgggactccaagcctgtgcgcgctccatgcttgctttttccaccacaccacgttaacacaatttcctccttccatgagaccccaggggaaaggggcacctgagaagccctcgtggcaccctcccaggttgtttccacggctactacagtaagaaagtgttgctgggggaaggtcagctctctggcccacgccttccacctgtttctgctgtgttctttcctcagggatcccaacggcttcaatgactggaccttctccactgtgcgatgctggggggagagagcccgagggacctacaggcttgtcatcagggatgtcggggatgagtcattccaggtcggcatcctccggcaatggcagctgaccctatatggctctgtgtggagtgcagtagacatcagggacagacaaaggctgttagagagtgccatgagtggaaaatacctgcacgatgacttcgccctgccctgcccaccggggctgaaaattcctgaggaagatggttacaccatcacccccaacaccctcaagg

SEQ ID NO: 14983 - DNA, 589 bp, Homo sapiens
  source 1..589: mol_type = unassigned DNA
ctagtacagtgcctgaaatggaggaggtacccagtaaataatgttttggatgaatgaatgattgaagttgctctgctggattcttatattgtgtcttgggtatgtgtcgtcttcccaactgcactcgaagctacgttgtaaacttgagagcagcagctccattccatttactagtataggcgaggtcccagttagggttgccgtagatgtttgtatgtggcttcagtgagcgtgtgtctttgtgtacgtgggggtgaagtgaaggcgtgtttgtgggctggtttcccagctgcccagcctgactttctacagtcagcaggatggacctggagatgtcagggctgaagaccctggagcatgtggcagtgacagtctccatcactcacccacggcgcggcagcttggagctgaagctgttctgccccagtggcatgatgtccctcatcggcgccccccgcagcatggactcggatcccaacggcttcaatgactggaccttctccactgtgcgatgctggggggagagagcccgagggacctacaggcttgtcatcagggatgtcggctgttagagagtgccatgagtgga

SEQ ID NO: 14984 - DNA, 562 bp, Homo sapiens
  source 1..562: mol_type = unassigned DNA
agtcccagctactcaggagactgaggtgggaggatcacttgaacccaggaagtcaaggctgcagtgagctgtgatcatgccactgcactccagcttggataacagagtgagaccctgtctccaaaaaaaaaaagaaagaaaaagaaaacaagtcatggagctagtaagtgcccaagagaacaagaataaacctagatccgtgggactccaagcctgtgcgcgctccatgcttgctttttccaccacaccacgttaacacaatttcctccttccatgagaccccaggggaaaggggcacctgagaagccctcgtggcaccctcccaggttgtttccacggctactacagtaagaaagtgttgctgggggaaggtcagctctctggcccacgccttccacctgtttctgctgtgttctttcctcagggatcccaacggcttcaatgactggaccttctccactgtgcgatgctggggggagagagcccgagggacctacaggcttgtcatcagggatgtcggatagcaacaaaaagtccttgtcgaaaccacatttcaagtcct

SEQ ID NO: 14985 - DNA, 549 bp, Homo sapiens
  source 1..549: mol_type = unassigned DNA
gtatgaggatcgccgtgcagagtgggtcaccaacgaggcaggcttcagccatagccaccagcacggtttcggcctcctcaacgcctggaggctcgtgaatgcagccaagatctggacatctgtcccttacttagcatcctacgtcagtcccgtgttaaaagaaaacaaggcgattccgcagtccccccgttccctggaggtcctgtggaatggatggacctggagatgtcagggctgaagaccctggagcatgtggcagtgacagtctccatcactcacccacggcgcggcagcttggagctgaagctgttctgccccagtggcatgatgtccctcatcggcgccccccgcagcatggactcggatcccaacggcttcaatgactggaccttctccactgtgcgatgctggggggagagagcccgagggacctacaggcttgtcatcagggatgtcgggttgccattggaccaagagagttgatgccaagagtgtgcccatccgtgaaatgggcattgctctctgcaactgttcatttatactacctct

SEQ ID NO: 14986 - DNA, 9347 bp, Homo sapiens
  source 1..9347: mol_type = unassigned DNA
taagtaatcagcacaaagggggttaatcttaggcctgaggtttggggccgggtgacaaggaagttaaactcgtcctccctgccagattctaccccctttcggagctgagctccagccaaacctgtggagttttctttgaccattttaggacatgttactgcttctgagttggctcccccagctgcttaaacaagacctttctcctgggttcctagtagtgaaaaggagcagcagagcaactgaggaggagggcgggtgggaggcatgggactggggcttggggaggtcaggcgagaccggggtgagagctcagagaagctcctgtgacttccatgctaagatcttgccagagaactctggtcagtcctcgggtgtctggatgaagtaaaggagttaggcatttcttcctttgattctctggcttacctaatagagagagtcagatgtggtctgctggggatggacagagggtttgtagaagtctcctaggctttagtgacccatcctctgcctccgcctccatggtggccagcatgaaccaggattgtctgaaggggttgtatcctctaagccagcgacctggttttatgttgagcgaagaggcggacgccctccctagaggagagtgcagctggatcaggatgcttgtgcagaggatgccctgtctgcacatttaccagcgttttccctacccccagctccttgggggattctttttcctggagtcatttactactttttgcaaaggaagtatgctatgcttagtgcccaaaccaaaactgtcttcactttttctgtcctcctagaaagtgatcaattgagagccatggcaggagaaggaatggccagagaaggttactcagaagggaggatgaggggtggcttccctcaggtgaaggtttcacagagaagaattgagttttctcctcctaaccacatccagcacttgcccaatttccctcaatgtggaatgaaacccctgggccagtcactgcatttcccataaaaggaatgttatcttggaaagggcataaagcgtcagccaagtcagagaagttcagaaacatttccaggaatgcagttcatttggaagcccctggctttgcacttgcgtgtcttagagatagtgtgccttcaactttaccttctatccagggctatttcctgttgcatctgtcaaatgagggcagtgacttaaaagagtaatatggtcttcccagcttcgtcatcctctgcttcctgctgaccaggggacgttgccacggaatgtctaccctaggcattgaggcatctggcaactgcttgcttgtcactaaaaagtaagagaaagaaggacagattgcctgggtggagaagagtgggaggtggcctagtggagaaagcaggattaagagaagggagggaaagatttagggagtttggctaatggagccctttacctgttggaagggcagcaagcaaaagttttaccagagttttccctacccccagctccttgggggattttttgttttgtttcatttttgtttttgtttttttgccttgagtaattttgacatgcagagttattcacaactttttgcaaagtactattttcattggcttttcagagccagtgaagttgccttctcctccaacatgaccacattttcctctgagcagacaaaaacagaacaaataagtttgtgggcttgcttggaggttgaaagaaataagtccagttaaaatgagagttgagccaggtgccctggctcatgcctgtaatcccagcactttgggaactttgggaggcagataacctgaggtcaggagtttgagaccaacctgaccaacatggtgataccccatctccactaaaaatacaaaattagctgggtgtggtggctcatgcctgtagtcccagctacttgggaggctgaggcaggagaacccgggaggcagaggttgcagtgagctgagatcgcaccattgcactccagcctgggcaagaagagggaaactccatctcaaaaaaaaaaaaaaaaaaaaaaattgagagttgagcagctcagtcccaggaagtcaagaaaccccttctacagccaagttatggttgttttccaccaggacctggttgattcagtgtctgggggctggaaagtgaactttttataaagcagagggagctgaacatccctgagatagaagaggaggctaaatacctctaagactctagagtagcattgtcccaaagaattttctgcaatgatggaactgttccatgtccatgctgctcagttcagtggtcactagtcatctgagtctattgaacatttaaaacatgaccagttggccgggcatggtggctcacacctgtaatccctttgggaagctgaggcaggagcattgtttacgctcatgagttcaagaccagcctgaacaacatagtgagaccctatttctacaaaaaataaaattagccaggtgtggtggtgcatgcctcctgggaggctgagacaggaggattccttgagcccaggatgccaaggctgcagtaagccatggttgcactactgcactctccatcctgggtgacagagcgagaccttgtctcaaaaataataataggctaggcgtggtagctcatacctagcctataatcccagcactttgggaggccaagggcaggggcggatcacttgaggtcaggagttcaagaccagcctggccaacagagtgaaacctcgactctactaaaaaaaaaaaaaaaaacgatacaaaaattggctgggcacggtggctcacgcctgtaatcccagcactttgggaggctgaggcgggtggatcacaaggtcaggagatcgagaccatcctggctaacacggtgaaaccccatctctactacaaatacaaaaaaattagccaggcgtggtggtgggtgcctgtagtcccagctactcgggaggctgaggcaggagaatggcgtgaaccagggaggcggagcttgcagtgagccaagatcgtgccactgcactccagcctagacaacagagcgagactccatctcaaaaaaaaaaagtatatatatatatatatatatatatacacacacacacacacaaattagccaggcatggtggcacgtgcctgtagtcccagctattcaagaggttgaggcagggaaattgcttgaacctgggaggcagaagttgcagtgagccaagattgtgccattgcactccagcctggatgacagagcaagactccatctcaaataataataataaggctagtatgactaaggagctaaattttaattttgttatacttcattttaatttagatagccatgtgtggctaagggctaccatattgagaagtgctgctaaagagcaagactgatttttctctctccccgctgacaggaggttatgagggagaggggattggggcctcttggggtttttagatctgacgctggtctgaaatctctacctgagggtaggagggagagtggggctctggaggagtgtgttattcacactcagagagtctgtgattggaaggtgcctgaacacccacttgcacctctccttttgttgtcgtttgcagtcttgaggatactggctaagcctctgcctacgcagtgagtcctgttccttctcctctccaggtcttccctctttaaccaacatttccctctctgctgattcttcctttctgccttcaaatgcaagtccctgctacctccaaccaggcaacttttcaaatgaatgaactgaagcaatttctcccctttgtcacacactccctctgccacagaagacttgctttcttactcatagtgcccctttcctgaccggttcaggggctggttcagagttcatcctttttaacattcttgtcactctgaccctattaatgaggtctttgttgcaacgtctctcctcctgtagcttctgtggcggccttcttggctccatagccctcctctgccttctctgcctgaggtacttgtttcatactcctgaactgtgagtgtcttctaaggcttgtttcctgactttttcctcactctacatcatcctccttgacagtacagctatgtttatgaccttagctaccacctctccacaaatgagtcctcgacctaaatctcttattctgatccttcaccagtggaaaggatagaaactagagcatagcttccataagattatgggcaaatagtccaggcacggtggctcacgcctgtaatcacagcactttgggaggccgaggtgggcagatcacgaggtcaggagatcgagaccatcctggccaacatggtgaaaccccgtctctactaaaaatacaaaaaaatcagctgggcatggtggcgggctcctgtagtcccagctactcgggaggctgaggcaggagaattgcttgaacctgggaggtggaggttgcagtgagcagagatcatgccactgcactgcagcctggtgaccgagcaagactccgtctaaaaaaaaaaaaaaaaaaaagaaaaagaaaagaaaagaaaaagattatgggcaaatagaaccctggcgtcttctgggacagagagtgactgttgaaaaaattccaatttaccaaaggccacataataagatgctttttatgtgccaatcactgttcgcagcgttagctcatttaatgcattaactcatttagttctggtagagagagttctagtgtactcatttgcactgccacccaagtccgcatccacaccaagaagtaaatggatgtagcatgccactgcgtacactgcgaacgcagacaagcactccttttgggattcttttccttttgggattctattctgttccataacgtcatttctctcctgtaagccccttctctgccacatcaatgctgtcctctaactatgccataaatattttccatcatctttctgttcctaaatcactgtgtgctgttgatattccaccaatacagtacacttaacatgtacaaaattttagatttcactatcacctctcaaaagctggcttgctttctaagattttcccattcgtgtcagtgccgtcaccgttccctaggcccccaaacttgaaacgcgcgagtgtttcatccctctaatatccctcgcctcttcccaggtcttccccagccctttcccttgcaatttaatctttttgttgttttctgtgaaatatctctcaatcgacttattcattctacaaatattcgaggcctacttcatcccaggcactgtattagttctagagactcggggataagacactattcctgccttcaacgagcttacaacctggtagggaagacagtgaggtttataggcatagtgcagtgttataggcactgcaacagggacaacacaggtgctttgagagcacagcagagagatgtctcctgccactaaggaagaaagggaaggtttctcaaagaaactggtggccaggcacagtggctcatgcctctaatcccagcactttgggaggctggagcaggcagattgcttgagctcatgagttcgagaccagcctcgccaacatggcaaaaccttgtctctacaaaaaaatacagaaattagctgggcatggtggtgcacacttacagttcccagctactagggaggctgaggtgggaagatggcttgagcctgggaggcggaggttgcagtgagctgagatcatgccactgtgctccagtctggcgacaaagcaagactctgtctcaaaaaaaaaaaaaaaaagaaaaggccgggcacggtggctcatgcctgtaatcccagcacgttgggaggccaaggcaggtggatcacaaggtcagaagttcgagaccagcctgaccaacatggtgaaaccccgtctctactaaaaatacaaaaattagctgggtatggtggcacatgcctgtaatcccagctacttgggaggtgggaggctgaggcaagagaatcgctggaacccaggaggcggaggttgcagtgagccgagatcgtgccactgcactccagcctaggcaacagagcaagacttcgtctcaaaaaaaaaaaaaaaaaaagaaaagaaaaaaaactgtgatgtaattattttgtaaatgtggaggggacgacaactggggaaaaggtgtgggcatgatttgttagattctcatctgccataaatgaaagtcaatgcataatgtctcaaattgataagccatgaaatatccataacgcttactgtttagaaacacgaaagtagatcccagaagaaaacaattaaaaacaataaaaaaaaagtttgcttctggggagtagatctcaaaggtggtagggaattttttttttcattataagcactgtagcaccaacttacatttaaattcatgcatactattttaatagaaaaaaatgtcaaggacaattgggaaggtaagaagtagccatcgtgaatctaaacagctttctcaagaattttgacaatacaggaaaagaaataatatctgatacatatgtagccttaacattagctaggtaccattctgaacgctttaggtatattaactgtttaatcctcgtctcaaacctatgaagtaggtactgttactggccccattttacagatgaggaaacagttctcacagctagtaagtggcagagctgggattagaacccaagcttagtggctccagagcccatgctcttaacactggtaggtggcaggaagtgaagaactgagaaagggtttatttgtttttgtttttcatttgtagtaggaaaggtgctagcaaaaaggtctagccaagaagatggataatcaggctgagccattgtttgacttttgccaagtattgctgtgaaaggacaagaaagtgaagggagcttgagaatgtaaacacacatgttggatgagccatggaatctcagccagttaggagaaaggagcttgaggggttgtgggaaaatgagggggtcaagaagagagtggggaaagtggaaggagagaggttgttttcaaagaaatgggacattggctttgaagaggtgacagatggaattatagaaaatgaggctgggtgtggtggctcgtgcctgtaatcccagcactttgggaggccaaggcaggcaggtggatcacctgaggtcaggagttcgagaccagcctggccaacacggtgaaaccccgtctctactaaaactacaaaaattagctgggcgtggtggcatgcgcctgtaatcccagctacttgggaggctgaggcaggagaattgcttgaacccaggaggtagaggtggcagtgagccaagcatctagccgctgcactccagcctgggtgacagagctagactccgtctcaaacaaacaaacacccctgtccttgctcagtcatctataatagctcttagttgcttatttaaaacaaaaatctttaaagcgcatcccaccctaggttacccagcccctactttcagtgcctctctgagctactgtgtctgtaaaatcaaggtattgtactctgccttgcatattggaataatttttttttttgagacaggctctcactctattgcccaggctagagtgcagaggcacagtcatggttcactgcagcctcaacctcctgggctcaagccatcctcccaccctcaacctcctgagtagctgggaccacaggtgcttaccactatatccagctaattttttatttttttgtaaagatgatgtctcccaggctgaagttatcctccaccatgcctggagtgagccaccatgcctggcctggaataaattaatggaagaaagggtgctttaaaaagaattgtattcggccgggtgcagtggctcacgcctgtaatcccagcactttcggaggctgaggcgggtggatcataaggtcaagagattgagaccatcctggccaacatggtgaaaccccatctctactaaaaatacaaaaattaggtggccatggtggcgtgcacctgtagtcctagctacttgggaagctgaggcaggagaatcgcttgaacccagaaggcagaggttgcagtgagccaagatcatgccactgcactccagcctggcaacagagagagactctgtctcaaaaaaaaaaaaaaaaagaatcgttctcattacagcctaatttcttaatagtccccagttgagtcttcctcttcagtagttttttgtttttgtttttgttttaataattgtagatttacaggaggtttcaaagaaatgtacaagagaagtcccgtgcacccttctcccaatcttaatgtttcacacaattaaagtataatatcaaaaccaagaaattgacattggtacaatccatagagcttatttggagttcaccagatacacatgctgtcaatatttgtgtatgcgcgtgtgtagctgtatgcaattgtatcacatgtagccttgcataactaccaccacaaccaagatccagaacaattccattatcacaagactcctttgtgttacccctttctggccacacccatcccctcccctgtccctggcccctggcacccatttatctgttatgtatcactgcaggtacttcaattaacatcacctaaatggaattgtgtgctacgcatcctttttctttttttttttttctttgagacagggtcttgttctgttgcccaggctggagtgtggtagcatgagcatggctcactgcaatctccacctcccaggctcaagcgatcctcccacctcaccctccccggtagtgggaccacaggtgcacaccaccacacctggctatatgcttcttttgagattgcttttttcactcacataatttgcttgaaatttatccaccagcattttttaaaaattaactgtgcatcatcttcagtgagatgtgtgcatttcgtctttgttcatgccttttccactgcctagaatgccctctaccaaccctgtctaccgatctgtattcatttccttcagtgtgtctcactgctgtgtgcctaaacccatctgacttatttctcttcccttatcaattatgtatatttcccataccatatcattttccacttgcaggtaggaggcagggaccacgcccatcttatctttatattcccagcatctagtacagtgcctgaaatggaggaggtacccagtaaataatgttttggatgaatgaatgattgaagttgctctgctggattcttatattgtgtcttgggtatgtgtcgtcttcccaactgcactcgaagctacgttgtaaacttgagagcagcagctccattccatttactagtataggcgaggccctgcacctcacatacatgttctctaatccttctaagaaccccctagattagactttgtaac

SEQ ID NO: 14987 - DNA, 2954 bp, Homo sapiens
  source 1..2954: mol_type = unassigned DNA
atgccacccttggagtagtagactcggggactctgaatacatcttgggaatgcttttatcttagaaatttggatttaggacgaatatacatatttttagaaactaagtgtcacatggggccaaacatggtggctcactcctgtaatcccagcactttgggaggccaaggcggatggatcacttgaggtcaggagttcaagaccagcctggccaacatggtgaaaccctgtctctactaaaaatacaaaaattagcctggtgtggtggcgggcatctgtaatcccagctacttgggaggctgaggcaggagaatcgcttgaaacaaggaggcggaggttacagtgagccaagattgcaccactgtactccagcctgggtgacagaacaagactccttctcaaaaaaaaaaaagaaactaagtgtcacatggattaaacaactttttcacactcaaggaaatgcacaaacaacttctttgcagtgtcttcctttggtaaaatttgggcttttgctaatttctgtggacttaaaaaaaactcctaattccattgcccttcagctcttaggtaaatactgtgagttctggtcatgtgcatcttcaggaggaaagctagtctggttgtcgtttttatgggatgagtgggaagaggagtgggggaatgtctcatgtcaacaccagagagagctctttctctggagctataattggagccatagcaaatgaaattcgagcagggtcatggagcttctctaacctgtggaacccatttaaagaatttgaagacgatcgcctacacccagctgggcttagcgccatcccagcaggtttaaggcaggcctctagaccatcttcctagagctccctgcctgtccctgttgcccgcaaccatatagtgtgggcataggaggctctaggcaggagctgggctggagccaggtggtatcaaatttctccagtggctgagtcgggagatctctctggggccattgggaattaggctgctttgtcttcctgctgggtcaaatttattttccaaaactaaaattttgttatgccaataaatgacttctggtcaacacaatgttccaaggctctgtgccagttgacccctactaccccctcctcccagccccagggagaagagaaaagggagtggactaaagtagagagggaagagaggctgggctgtgtgcacagagggcacccactgcaggccaggctgggttaggaggaagaacaggaacataccaaactccaccctctagcagaactctagggaacccagctcgccctgcccaggccagggacctaagaaggttctacaacataattgtcactcttgctctgctgtacctggcctttctcattttaactcacctcagcttctcaccctcaccaccctcttccatctgaactgtaatttgcccagaaatgaagagagagtgtgtttagcagagttcccatctttggaatgtccttgctatggaaacttcttgttgccagtttctagtcaatgaccagggcagctgggtagagctgtctttctgagggcagaggctgggggcatatgcttcccaccatttggctccctggggaagcaaagcttctctggacttttcaatgcctgcctgtggctcctgccaccatagacaagttcgtgggcttcacagccacacttcagactatcactgcaaggctgtttccttaacaggaaaaaaaatcaacccgctcccttgcataaaccaggctcccactctcattgagacaaccacttggagagtgcttttcccttttttttctgggagtgcgccatggctgggtgaaaattacatctcttggcagctgctctaacagctgggagggaagcagtgagtacagtggagaaagggcagctcttggcagaagtcgccaccctggtatctgacccagaagagaagtttggaagaaagaaattctccggtgttagcactgacaccatgggccaacgatccaagtgccatagagtggagcagatttaggcagggcccgcctcagctaaaccctctgagtctccaggggtgatgacagccccaaaagagctcgatgccaggcagtcactgcctccccttgccccattctcgctccccacctcagaaccacacagagagaaggggtttcatggcatctggcccagagcagtgaggcagcttgtcctgttgagagctgtagagccgggcaggcgggccttatagacactgagtccatgcagggctcgggggtgggcaaggacacagtcctctcttgctggaacacactccctgtgttcacgccgacatcattccagcccctgtcgcggagctgccaaattggatttccttgaatagtgccgtcagtgttgtcccagctccagctgggcccagtagctcccctggccacttcctctgtctagcttggttgtgggggttgaagggtttggagttgggagttgggatagagaatttaggaatgggagcaagaatattaggagcaaaaatcgggaggcccccccatggtggctcatgcctgttaatcccgacactttgggaggccaaggcaggaagattgcttgaggccaagagttcgagaccagcctgggcaacatagtgagatgctgtctctacaaaaaataagaatattagtgtggtgcagtggtacacgcctgtagtcccagctacatgggaagctgaagcaggaggatcgctggaacccaggagttcgaggctgtggtgaccactgactgggaccttcagaagggcactggctgcactgagggccacacagggacctcagctgcagcgcctctggcagctggcatgatagccttaatgctgcaggtgcggccctgcctcacgtggcgtgacgtccagcacatcattgtcttcacagccacccggtatgaggatcgccgtgcagagtgggtcaccaacgaggcagg

SEQ ID NO: 14988 - DNA, 1312 bp, Homo sapiens
  source 1..1312: mol_type = unassigned DNA
ctctgctaaagaacagtcacgatgcagccagtagtttgtggaagcgatgtgtgctttgagccctgtgggtggcaacaggggttgctcgcagtgcctgtgagcaactggacctcctgctggattagctggtgtcgtgaggattggctgtcttgctgtgggaggccatccgctggtgttagtgctggcccacactccacctgggggcttatccctgttggtcagggataaatgtgaacaaaaagagaagatcaaatgtttcacaatttaaaaggcatggcttagggacttccagggggaacacatggatggctcagcatctccctctcagattcctgcagttaccagctctttgatctcttccatatcctttttctttgtctgcagtccactgctctgatgccgaaggggaggcagaaagtgccacacttggatgcccccctgggcctgcccacctgcctctggctggaattagccgggctcttcttactggttccctgggtcatgggcctggcagggacaggtgggcctgatggccagggcacaggggggccgagctgggctgtgcacctggaaagcctggaaggtgacggggaggaagagactctggagcagcaggcggatgccttggcccaggcagcagggctggtgaatgctggacgcatcggagagcttcaggggcactacctctttgtccagcctgctgggcacaggccggccctggaggtggaggccatccggcagcaggtggaggctgtgttggctgggcatgaagctgtgcgctggcactcagagcagaggctgctaaggcgggccaagcgcagcgtccacttcaacgaccccaagtacccgcagcaatggcacctgaataaccgacggagcccgggcagggacatcaacgtgacgggtgtgtgggaacgcaatgtgactgggcgaggggtgacggtggtggtagtggatgacggagtggaacacaccatccaggacattgcacccaactatagccctgagggtagctatgacctcaactctaatgaccctgaccccatgccccacccggatgtggagaatggcaaccaccatggcacgcgatgtgcaggagagatcgcggctgtgcccaacaacagcttctgtgccgtgggcgtggcctacgggagccgcatcgcaggtatccgggtactggatggacctctcacagacagcatggaggcagtggcgttcaacaagcactatcagatcaatgacatctacagctgcagctggggaccagatgacgatgggaagacagtggatggcccccatcagcttggaaagg

SEQ ID NO: 14989 - DNA, 553 bp, Homo sapiens
  source 1..553: mol_type = unassigned DNA
ataatgtgggtgctaatgaggagaggggcacattgcacggagcgatcgaggccgacggagggagaatcgggaaactgacccggtctgtagcctttgctgagtcaacactactcacagtgaaagtgatgccttttctccatttgcacaacatgagtgtgacgtggttagccagaccaggagctcaacctcatgtagaatccagtccactgctctgatgccgaaggggaggcagaaagtgccacacttggatgcccccctgggcctgcccacctgcctctggctggaattagccgggctcttcttactggttccctgggtcatgggcctggcagggacaggtgggcctgatggccagggcacaggggggccgagctgggctgtgcacctggaaagcctggaaggtgacggggaggaagagactctggagcagcaggcggatgccttggcccaggcagcagggctggtgaatgctggacgcatcggagagcttcaggggcactacctctttgtccagcctgctgggcacaggccggccctggaggtggaggccatc

SEQ ID NO: 14990 - DNA, 549 bp, Homo sapiens
  source 1..549: mol_type = unassigned DNA
gaagccgcgagtttccgcagggaggcggcggcagctgcggcggggccgagccgcttgggtgtgtatctgagtactaagccctgccccagggtggacccagtggagagcaaaggcttttaaaggagcccagccaccataggtctgtagcctttgctgagtcaacactactcacagtgaaagtgatgccttttctccatttgcacaacatgagtgtgacgtggttagccagaccaggagctcaacctcatgtagaatccagtccactgctctgatgccgaaggggaggcagaaagtgccacacttggatgcccccctgggcctgcccacctgcctctggctggaattagccgggctcttcttactggttccctgggtcatgggcctggcagggacaggtgggcctgatggccagggcacaggggggccgagctgggctgtgcacctggaaagcctggaaggtgacggggaggaagagactctggagcagcaggcggatgccttggcccaggcagcagggctggtgaatgctggacgcatcggagagcttca

SEQ ID NO: 14991 - DNA, 583 bp, Homo sapiens
  source 1..583: mol_type = unassigned DNA
gatgctgcgggagacccctgagatacaagtggactctcccggggcgcggggaagaagggagagccgactgcgagaaggaaggcgacctgggtgggcaggatcccctctgggaagattacagggacagtcggggccatggcggtcagaaggagaagagcaacgagtggcttttaaaggtctgtagcctttgctgagtcaacactactcacagtgaaagtgatgccttttctccatttgcacaacatgagtgtgacgtggttagccagaccaggagctcaacctcatgtagaatccagtccactgctctgatgccgaaggggaggcagaaagtgccacacttggatgcccccctgggcctgcccacctgcctctggctggaattagccgggctcttcttactggttccctgggtcatgggcctggcagggacaggtgggcctgatggccagggcacaggggggccgagctgggctgtgcacctggaaagcctggaaggtgacggggaggaagagactctggagcagcaggcggatgccttggcccaggcagcagggctggtgaatgctggacgcatcggagagct

SEQ ID NO: 14992 - DNA, 3332 bp, Homo sapiens
  source 1..3332: mol_type = unassigned DNA
cactgctcctccggctcccgggaagccgcgagtttccgcagggaggcggcggcagctgcggcggggccggtctgtagcctttgctgagtcaacactactcacagtgaaagtgatgccttttctccatttgcacaacatgagtgtgacgtggttagccagaccaggagctcaacctcatgtagaatccagtccactgctctgatgccgaaggggaggcagaaagtgccacacttggatgcccccctgggcctgcccacctgcctctggctggaattagccgggctcttcttactggttccctgggtcatgggcctggcagggacaggtgggcctgatggccagggcacaggggggccgagctgggctgtgcacctggaaagcctggaaggtgacggggaggaagagactctggagcagcaggcggatgccttggcccaggcagcagggctggtgaatgctggacgcatcggagagcttcaggggcactacctctttgtccagcctgctgggcacaggccggccctggaggtggaggccatccggcagcaggtggaggctgtgttggctgggcatgaagctgtgcgctggcactcagagcagaggctgctaaggcgggccaagcgcagcgtccacttcaacgaccccaagtacccgcagcaatggcacctgaataaccgacggagcccgggcagggacatcaacgtgacgggtgtgtgggaacgcaatgtgactgggcgaggggtgacggtggtggtagtggatgacggagtggaacacaccatccaggacattgcacccaactatagccctgagggtagctatgacctcaactctaatgaccctgaccccatgccccacccggatgtggagaatggcaaccaccatggcacgcgatgtgcaggagagatcgcggctgtgcccaacaacagcttctgtgccgtgggcgtggcctacgggagccgcatcgcaggtatccgggtactggatggacctctcacagacagcatggaggcagtggcgttcaacaagcactatcagatcaatgacatctacagctgcagctggggaccagatgacgatgggaagacagtggatggcccccatcagcttggaaaggctgccttacaacatggggtgattgctggtcgccagggctttgggagcatctttgtggtagccagtggcaacggaggccaacacaacgacaactgcaactacgatggctacgccaactccatctacaccgtcaccataggagctgtggatgaggagggacgcatgcctttctatgcagaagaatgtgcctccatgctggcagtcaccttcagtggtggggacaagatgcttcggagcattgtgaccactgactgggaccttcagaagggcactggctgcactgagggccacacagggacctcagctgcagcgcctctggcagctggcatgatagccttaatgctgcaggtgcggccctgcctcacgtggcgtgacgtccagcacatcattgtcttcacagccacccggtatgaggatcgccgtgcagagtgggtcaccaacgaggcaggcttcagccatagccaccagcacggtttcggcctcctcaacgcctggaggctcgtgaatgcagccaagatctggacatctgtcccttacttagcatcctacgtcagtcccgtgttaaaagaaaacaaggcgattccgcagtccccccgttccctggaggtcctgtggaatgtcagcaggatggacctggagatgtcagggctgaagaccctggagcatgtggcagtgacagtctccatcactcacccacggcgcggcagcttggagctgaagctgttctgccccagtggcatgatgtccctcatcggcgccccccgcagcatggactcatggctctgtgtggagtgcagtagacatcagggacagacaaaggctgttagagagtgccatgagtggaaaatacctgcacgatgacttcgccctgccctgcccaccggggctgaaaattcctgaggaagatggttacaccatcacccccaacaccctcaagaccctggtgctggtaggctgtttcaccgtcttctggactgtttactacatgctggaagtatatttgagccagaggaatgtggcttccaatcaagtttgtaggagtggaccctgccactggccccatcggagccggaaagccaaggaggaagggacagagctagaatcagtgccactttgcagcagcaaggatccagacgaagtggaaacagagagcaggggccctcccaccacctctgacctccttgccccagacctgctggagcaaggggactggagcctgtcccagaacaagagcgccctggactgccctcatcagcacctagacgtaccgcacgggaaggaggagcagatctgctgacctcagggcctgacagtgtgggacaggctcttctttcccaaaattagggagctcttgacagaaagcagttctgatgcttacatctggaatctgaggcatcctctgactccactcaaagagggtgagggccttcttaagatacaaatggtggaggattgctgccagagaagtctggtcagagccacagggtctgcctccagccaaacgggagcttttggtgagaaggtgttggacaggggattggcgcccccctttggtttggcctccatcctcatctctcttgggccaagccagctgcctaggtcccccaagcatgggggaccccttcccacatataagttgagaaggtgcctgccatagccaggagcgcatctcaatggaaacatcactggggtcacttgggaagaggacttcggggtagaggctgggaggagcccctggacatgcctgtcctgaaagcggctgcctccattatccattcccaagatgcctgatcagaaaccaaccatgaatgaacccctggctccttcaccacccccacgattggtatgatgctgccggcacagctgggatacacacggctcccccaggcctgagctgcttcactagggaatcctgcggcaggactgcagagcagatggcagatgcacatgttggaggagagagccttgggagccactgccactccagtcctgccaccaccctgtcttcctctgcaagtgctcagggaaatggccttcccgccggaggccagctatctgcctgacaggctgtgactcttctctcaaccttggccttctcccctcttctgagctagttggttgaattttttttaatgcttaagatttgtttttctcttttcacagcaacattttcttgaatttttttctgcacagcttttccaaaataaaaaccttcc

SEQ ID NO: 14993 - DNA, 1750 bp, Homo sapiens
  source 1..1750: mol_type = unassigned DNA
aaagcgggcttcccgccccgcccagaccgccgaggctgccgccggagtcgccaccgccgcgccctcgcccacccgcccgcccgccgctcccggccccgctcgccccctccgccgccgccgcccgcccctgcgactacgctgcggcctcccgcccgctcccgctcgctcccgcggccctcgctcgcctcgcgccggcagttttgggcctacacctcccctccccccgccagccgccaaagacttgaccacgtaacgagcccaactcccccgaacgccgcccgccgctcgccatggatgccggtgtgactgaaagtggactaaatgtgactctcaccattcggcttcttatgcacggaaaggaagtaggaagcatcattgggaagaaaggggagtcggttaagaggatccgcgaggagagtggcgcgcggatcaacatctcggaggggaattgtccggagagaatcatcactctgaccggccccaccaatgccatctttaaggctttcgctatgatcatcgacaagctggaggaagatatcaacagctccatgaccaacagtaccgcggccagcaggcccccggtcaccctgaggctggtggtgccggccacccagtgcggctccctgattgggaaaggcgggtgtaagatcaaagagatccgcgagagtacgggggcgcaggtccaggtggcgggggatatgctgcccaactccaccgagcgggccatcaccatcgctggcgtgccgcagtctgtcaccgagtgtgtcaagcagatttgcctggtcatgctggagacgctctcccagtctccgcaagggagagtcatgaccattccgtaccagcccatgccggccagctccccagtcatctgcgcgggcggccaagatcggtgcagcgacgctgcgggctacccccatgccacccatgacctggagggaccacctctagatgcctactcgattcaaggacaacacaccatttctccgctcgatctggccaagctgaaccaggtggcaagacaacagtctcactttgccatgatgcacggcgggaccggattcgccggaattgactccagctctccagaggtgaaaggctattgggcaagtttggatgcatctactcaaaccacccatgaactcaccattccaaataacttaattggctgcataatcgggcgccaaggcgccaacattaatgagatccgccagatgtccggggcccagatcaaaattgccaacccagtggaaggctcctctggtaggcaggttactatcactggctctgctgccagtattagtctggcccagtatctaatcaatgccaggctttcctctgagaagggcatggggtgcagctagaacagtgtaggttccctcaataacccctttctgctgttctcccatgatccaactgtgtaatttctggtcagtgattccaggttttaaataatttgtaagtgttcagtttctacacaactttatcatccgctaagaatttaaaaatcacattctctgttcagctgttaatgctgggatccatatttagttttataagcttttccctgtttttagttttgttttgggttttttggctcatgaattttatttctgtttgtcgataagaaatgtaagagtggaatgttaataaatttcagtttagttctgtaatgtcaagaatttaagaattaaaaaacggattggttaaaaaatgcttcatatttgaaaaagctgggaattgctgtcttaaa

SEQ ID NO: 14994 - DNA, 4793 bp, Homo sapiens
  source 1..4793: mol_type = unassigned DNA
acacactcggggagcgggagcgcggcgcggacgcaaagccgccgggctgctgcgcccagagccagccggagccggagccggagcccgaactgcagctccagccccagccgtgcggagccgcagcccaggccggggccggcggcggctcatggacagcggggcgggcggccggcgctgcccggaggcggccctcctgattctggggcctcccaggatggagcacctgaggcacagcccaggccctggggggcaacggctactgctgccctccatgctgctagcactgctgctcctgctggctccatccccaggccacgccactcgggtagtgtacaaggtgccggaggaacagccacccaacaccctcattgggagcctcgcagccgactatggttttccagatgtggggcacctgtacaagctagaggtgggtgccccgtaccttcgcgtggatggcaagacaggtgacattttcaccaccgagacctccatcgaccgtgaggggctccgtgaatgccagaaccagctccctggtgatccctgcatcctggagtttgaggtatctatcacagacctcgtgcagaatggcagcccccggctgctagagggccagatagaagtacaagacatcaatgacaacacacccaacttcgcctcaccagtcatcactctggccatccctgagaacaccaacatcggctcactcttccccatcccgctggcttcagaccgtgatgctggtcccaacggtgtggcatcctatgagctgcaggctgggcctgaggcccaggagctatttgggctgcaggtggcagaggaccaggaggagaagcaaccacagctcattgtgatgggcaacctggaccgtgagcgctgggactcctatgacctcaccatcaaggtgcaggatggcggcagccccccacgcgccagcagtgccctgctgcgtgtcaccgtgcttgacaccaatgacaacgcccccaagtttgagcggccctcctatgaggccgaactatctgagaatagccccataggccactcggtcatccaggtgaaggccaatgactcagaccaaggtgccaatgcagaaatcgaatacacattccaccaggcgcccgaagttgtgaggcgtcttcttcgactggacaggaacactggacttatcactgttcagggcccggtggaccgtgaggacctaagcaccctgcgcttctcagtgcttgctaaggaccgaggcaccaaccccaagagtgcccgtgcccaggtggttgtgaccgtgaaggacatgaatgacaatgcccccaccattgagatccggggcatagggctagtgactcatcaagatgggatggctaacatctcagaggatgtggcagaggagacagctgtggccctggtgcaggtgtctgaccgagatgagggagagaatgcagctgtcacctgtgtggtggcaggtgatgtgcccttccagctgcgccaggccagtgagacaggcagtgacagcaagaagaagtatttcctgcagactaccaccccgctagactacgagaaggtcaaagactacaccattgagattgtggctgtggactctggcaaccccccactctccagcactaactccctcaaggtgcaggtggtggacgtcaatgacaacgcacctgtcttcactcagagtgtcactgaggtcgccttcccggaaaacaacaagcctggtgaagtgattgctgagatcactgccagtgatgctgactctggctctaatgctgagctggtttactctctggagcctgagccggctgctaagggcctcttcaccatctcacccgagactggagagatccaggtgaagacatctctggatcgggaacagcgggagagctatgagttgaaggtggtggcagctgaccggggcagtcctagcctccagggcacagccactgtccttgtcaatgtgctggactgcaatgacaatgaccccaaatttatgctgagtggctacaacttctcagtgatggagaacatgccagcactgagtccagtgggcatggtgactgtcattgatggagacaagggggagaatgcccaggtgcagctctcagtggagcaggacaacggtgactttgttatccagaatggcacaggcaccatcctatccagcctgagctttgatcgagagcaacaaagcacctacaccttccagctgaaggcagtggatggtggcgtcccacctcgctcagcttacgttggtgtcaccatcaatgtgctggacgagaatgacaacgcaccctatatcactgccccttctaacacctctcacaagctgctgaccccccagacacgtcttggtgagacggtcagccaggtggcagccgaggactttgactctggtgtcaatgctgagctgatctacagcattgcaggtggcaacccttatggactcttccagattgggtcacattcaggtgccatcaccctggagaaggagattgagcggcgccaccatgggctacaccgcctggtggtgaaggtcagtgaccgcggcaagcccccacgctatggcacagccttggtccatctttatgtcaatgagactctggccaaccgcacgctgctggagaccctcctgggccacagcctggacacgccgctggatattgacattgctggggatccagaatatgagcgctccaagcagcgtggcaacattctctttggtgtggtggctggtgtggtggccgtggccttgctcatcgccctggcggttcttgtgcgctactgcagacagcgggaggccaaaagtggttaccaggctggtaagaaggagaccaaggacctgtatgcccccaagcccagtggcaaggcctccaagggaaacaaaagcaaaggcaagaagagcaagtccccaaagcccgtgaagccagtggaggacgaggatgaggccgggctgcagaagtccctcaagttcaacctgatgagcgatgcccctggggacagtccccgcatccacctgcccctcaactacccaccaggcagccctgacctgggccgccactatcgctctaactccccactgccttccatccagctgcagccccagtcaccctcagcctccaagaagcaccaggtggtacaggacctgccacctgcaaacacattcgtgggcaccggggacaccacgtccacgggctctgagcagtactccgactacagctaccgcaccaacccccccaaataccccagcaagcagttacctcaccgccgcgtcaccttctcggccaccagccaggcccaggagctgcaggacccatcccagcacagttactatgacagtggcctggaggagtctgagacgccgtccagcaagtcatcctcagggcctcgactcggtcccctggccctgcctgaggatcactatgagcgcaccacccctgatggcagcataggagagatggagcaccccgagaatgaccttcgccctttgcctgatgtcgccatgacaggcacatgtacccgggagtgcagtgagtttggccactctgacacatgctggatgcctggccagtcatctcccagccgccggaccaagagcagcgccctcaaactctccaccttcgtgccttaccaggaccgaggagggcaggagcctgcgggcgccggcagccccagccccccggaagaccggaacaccaaaacggcccccgtgcgcctcctgccctcctacagtgccttctcccacagtagccatgattcctgcaaggactcggccaccttggaggaaatccccctgacccagacctcggacttcccacccgcagccacaccggcatctgcccagacggccaagcgcgagatctacctgtgagccccctactggccggccggcccccctcccccagccgccggccagctcccaaatggcccattccagggcctcactctccaccccttcagcgtggacttcctggccagggccccaagtgggggtatcactgacctcatgaccacgctggcccttctcccatgcagggtccaggtcctctcccctcatttccatctcccagcccccaggggccccttcccctttatggggcttcccccatctgatgcccaagagggctcctctgcaatgactgggctccttcccttgacttccagggagcaccccctcgatttgggcagatggtggagtcaagggtgggcagcgtacttctaactcattgtttccctcatggccgaccagggcggggatagcatgcccaattttagccctgaagcagggctgaactggggagcccctttccctgggagctcccagaggaaactcttgaccaccagtggctccctgaagggcttttgttaccaaaggtggggtagggacgggggtgggagtggagcggaggccttgttttcccgtgctgctcctggactggcccacctgcctgccacatgcccacgcctagtcccatctgggcccccattccctgctggtcatgcagtgtctgtatataaggaccttggaatgacgtccccatttctgcctgatttgcaacttttcttgttgatgtcgtgttgtcttgggggacccctctggggggggacctgccctgtgccccctcctccctgccgcagtgccccccaacccaggcctctattgttccatgttgtaaatacccctggggccatggtgggatgggggtgcaggccagggaaacaacgggtgggtgggggtggggacgggggtaacatttgcctatcagcagagctgggcttttatttaatttttcttaaaaata

SEQ ID NO: 14995 - DNA, 2373 bp, Homo sapiens
  source 1..2373: mol_type = unassigned DNA
cacactcggggagcgggagcgcggcgcggacgcaaagccgccgggctgctgcgcccagagccagccggagccggagccggagcccgaactgcagctccagccccagccgtgcggagccgcagcccaggccggggccggcggcggctcatggacagcggggcgggcggccggcgctgcccggaggcggccctcctgattctggggcctcccaggatggagcacctgaggcacagcccaggccctggggggcaacggctactgctgccctccatgctgctagcactgctgctcctgctggctccatccccaggccacgccactcgggtagtgtacaaggtgccggaggaacagccacccaacaccctcattgggagcctcgcagccgactatggttttccagatgtggggcacctgtacaagctagaggtgggtgccccgtaccttcgcgtggatggcaagacaggtgacattttcaccaccgagacctccatcgaccgtgaggggctccgtgaatgccagaaccagctccctggtgatccctgcatcctggagtttgaggtatctatcacagacctcgtgcagaatggcagcccccggctgctagagggccagatagaagtacaagacatcaatgacaacacacccaacttcgcctcaccagtcatcactctggccatccctgagaacaccaacatcggctcactcttccccatcccgctggcttcagaccgtgatgctggtcccaacggtgtggcatcctatgagctgcaggctgggcctgaggcccaggagctatttgggctgcaggtggcagaggaccaggaggagaagcaaccacagctcattgtgatgggcaacctggaccgtgagcgctgggactcctatgacctcaccatcaaggtgcaggatggcggcagccccccacgcgccagcagtgccctgctgcgtgtcaccgtgcttgacaccaatgacaacgcccccaagtttgagcggccctcctatgaggccgaactatctgagaatagccccataggccactcggtcatccagttacctcaccgccgcgtcaccttctcggccaccagccaggcccaggagctgcaggacccatcccagcacagttactatgacagtggcctggaggagtctgagacgccgtccagcaagtcatcctcagggcctcgactcggtcccctggccctgcctgaggatcactatgagcgcaccacccctgatggcagcataggagagatggagcaccccgagaatgagccggctggccggagcaggccctgaggcagagtgccagaccttcgccctttgcctgatgtcgccatgacaggcacatgtacccgggagtgcagtgagtttggccactctgacacatgctggatgcctggccagtcatctcccagccgccggaccaagagcagcgccctcaaactctccaccttcgtgccttaccaggaccgaggagggcaggagcctgcgggcgccggcagccccagccccccggaagaccggaacaccaaaacggcccccgtgcgcctcctgccctcctacagtgccttctcccacagtagccatgattcctgcaaggactcggccaccttggaggaaatccccctgacccagacctcggacttcccacccgcagccacaccggcatctgcccagacggccaagcgcgagatctacctgtgagccccctactggccggccggcccccctcccccagccgccggccagctcccaaatggcccattccagggcctcactctccaccccttcagcgtggacttcctggccagggccccaagtgggggtatcactgacctcatgaccacgctggcccttctcccatgcagggtccaggtcctctcccctcatttccatctcccagcccccaggggccccttcccctttatggggcttcccccatctgatgcccaagagggctcctctgcaatgactgggctccttcccttgacttccagggagcaccccctcgatttgggcagatggtggagtcaagggtgggcagcgtacttctaactcattgtttccctcatggccgaccagggcggggatagcatgcccaattttagccctgaagcagggctgaactggggagcccctttccctgggagctcccagaggaaactcttgaccaccagtggctccctgaagggcttttgttaccaaaggtggggtagggacgggggtgggagtggagcggaggccttgttttcccgtgctgctcctggactggcccacctgcctgccacatgcccacgcctagtcccatctgggcccccattccctgctggtcatgcagtgtctgtatataaggaccttggaatgacgtcccca

SEQ ID NO: 14996 - DNA, 3827 bp, Homo sapiens
  source 1..3827: mol_type = unassigned DNA
acacactcggggagcgggagcgcggcgcggacgcaaagccgccgggctgctgcgcccagagccagccggagccggagccggagcccgaactgcagctccagccccagccgtgcggagccgcagcccaggccggggccggcggcggctcatggacagcggggcgggcggccggcgctgcccggaggcggccctcctgattctggggcctcccaggatggagcacctgaggcacagcccaggccctggggggcaacggctactgctgccctccatgctgctagcactgctgctcctgctggctccatccccaggccacgccactcgggtagtgtacaaggtgccggaggaacagccacccaacaccctcattgggagcctcgcagccgactatggttttccagatgtggggcacctgtacaagctagaggtgggtgccccgtaccttcgcgtggatggcaagacaggtgacattttcaccaccgagacctccatcgaccgtgaggggctccgtgaatgccagaaccagctccctggtgatccctgcatcctggagtttgaggtatctatcacagacctcgtgcagaatggcagcccccggctgctagagggccagatagaagtacaagacatcaatgacaacacacccaacttcgcctcaccagtcatcactctggccatccctgagaacaccaacatcggctcactcttccccatcccgctggcttcagaccgtgatgctggtcccaacggtgtggcatcctatgagctgcaggctgggcctgaggcccaggagctatttgggctgcaggtggcagaggaccaggaggagaagcaaccacagctcattgtgatgggcaacctggaccgtgagcgctgggactcctatgacctcaccatcaaggtgcaggatggcggcagccccccacgcgccagcagtgccctgctgcgtgtcaccgtgcttgacaccaatgacaacgcccccaagtttgagcggccctcctatgaggccgaactatctgagaatagccccataggccactcggtcatccaggtgaaggccaatgactcagaccaaggtgccaatgcagaaatcgaatacacattccaccaggcgcccgaagttgtgaggcgtcttcttcgactggacaggaacactggacttatcactgttcagggcccggtggaccgtgaggacctaagcaccctgcgcttctcagtgcttgctaaggaccgaggcaccaaccccaagagtgcccgtgcccaggtggttgtgaccgtgaaggacatgaatgacaatgcccccaccattgagatccggggcatagggctagtgactcatcaagatgggatggctaacatctcagaggatgtggcagaggagacagctgtggccctggtgcaggtgtctgaccgagatgagggagagaatgcagctgtcacctgtgtggtggcaggtgatgtgcccttccagctgcgccaggccagtgagacaggcagtgacagcaagaagaagtatttcctgcagactaccaccccgctagactacgagaaggtcaaagactacaccattgagattgtggctgtggactctggcaaccccccactctccagcactaactccctcaaggtgcaggtggtggacgtcaatgacaacgcacctgtcttcactcagagtgtcactgaggtcgccttcccggaaaacaacaagcctggtgaagtgattgctgagatcactgccagtgatgctgactctggctctaatgctgagctggtttactctctggagcctgagccggctgctaagggcctcttcaccatctcacccgagactggagagatccaggtgaagacatctctggatcgggaacagcgggagagctatgagttgaaggtggtggcagctgaccggggcagtcctagcctccagggcacagccactgtccttgtcaatgtgctggactgcaatgacaatgaccccaaatttatgctgagtggctacaacttctcagtgatggagaacatgccagcactgagtccagtgggcatggtgactgtcattgatggagacaagggggagaatgcccaggtgcagctctcagtggagcaggacaacggtgactttgttatccagaatggcacaggcaccatcctatccagcctgagctttgatcgagagcaacaaagcacctacaccttccagctgaaggcagtggatggtggcgtcccacctcgctcagcttacgttggtgtcaccatcaatgtgctggacgagaatgacaacgcaccctatatcactgccccttctaacacctctcacaagctgctgaccccccagacacgtcttggtgagacggtcagccaggtggcagccgaggactttgactctggtgtcaatgctgagctgatctacagcattgcaggtggcaacccttatggactcttccagattgggtcacattcaggtgccatcaccctggagaaggagattgagcggcgccaccatgggctacaccgcctggtggtgaaggtcagtgaccgcggcaagcccccacgctatggcacagccttggtccatctttatgtcaatgagactctggccaaccgcacgctgctggagaccctcctgggccacagcctggacacgccgctggatattgacattgctggggatccagaatatgagcgctccaagcagcgtggcaacattctctttggtgtggtggctggtgtggtggccgtggccttgctcatcgccctggcggttcttgtgcgctactgcagacagcgggaggccaaaagtggttaccaggctggtaagaaggagaccaaggacctgtatgcccccaagcccagtggcaaggcctccaagggaaacaaaagcaaaggcaagaagagcaagtccccaaagcccgtgaagccagtggaggacgaggatgaggccgggctgcagaagtccctcaagttcaacctgatgagcgatgcccctggggacagtccccgcatccacctgcccctcaactacccaccaggcagccctgacctgggccgccactatcgctctaactccccactgccttccatccagctgcagccccagtcaccctcagcctccaagaagcaccaggtggtacaggacctgccacctgcaaacacattcgtgggcaccggggacaccacgtccacgggctctgagcagtactccgactacagctaccgcaccaacccccccaaataccccagcaagcaggtaggccagccctttcagctcagcacaccccagcccctaccccacccctaccacggagccatctggaccgaggtgtgggagtgatggagcaggtttactgtgcctgcccgtgttgggggccagcctgagccagcagtgggaggtggggccttagtgcctcaccgggcacacggattaggctgagtgaagattaagggagggtgtgctctgtggtctcctccctgccctctccccactggggagagacctgtgatttgccaagtccctggaccctggaccagctactgggccttatgggttgggggtggtaggcaggtgagcgtaagtggggagggaaatgggtaagaagtctactccaaacctaggtctctatgtcagaccagacctaggtgcttctctaggagggaaacagggagacctggggtcctgtggataactgagtggggagtctgccaggggagggcaccttcccattgtgccttctgtgtgtattgtgcattaacctcttcctcaccactaggcttctggggctgggtcccacatgcccttgaccctgacaataaagttctctatttttgga

SEQ ID NO: 14997 - DNA, 2674 bp, Homo sapiens
  source 1..2674: mol_type = unassigned DNA
gctgctgaaacaggtttccccggtttgacagagcggtggctggggcccggcctggagggcttctctgacccacaaccctacctgacttctttcaaaagaaatcccccaacctggggccttcagatgggcatgtgaaggccaatgactcagaccaaggtgccaatgcagaaatcgaatacacattccaccaggcgcccgaagttgtgaggcgtcttcttcgactggacaggaacactggacttatcactgttcagggcccggtggaccgtgaggacctaagcaccctgcgcttctcagtgcttgctaaggaccgaggcaccaaccccaagagtgcccgtgcccaggtggttgtgaccgtgaaggacatgaatgacaatgcccccaccattgagatccggggcatagggctagtgactcatcaagatgggatggctaacatctcagaggatgtggcagaggagacagctgtggccctggtgcaggtgtctgaccgagatgagggagagaatgcagctgtcacctgtgtggtggcaggtgatgtgcccttccagctgcgccaggccagtgagacaggcagtgacagcaagaagaagtatttcctgcagactaccaccccgctagactacgagaaggtcaaagactacaccattgagattgtggctgtggactctggcaaccccccactctccagcactaactccctcaaggtgcaggtggtggacgtcaatgacaacgcacctgtcttcactcagagtgtcactgaggtcgccttcccggaaaacaacaagcctggtgaagtgattgctgagatcactgccagtgatgctgactctggctctaatgctgagctggtttactctctggagcctgagccggctgctaagggcctcttcaccatctcacccgagactggagagatccaggtgaagacatctctggatcgggaacagcgggagagctatgagttgaaggtggtggcagctgaccggggcagtcctagcctccagggcacagccactgtccttgtcaatgtgctggactgcaatgacaatgaccccaaatttatgctgagtggctacaacttctcagtgatggagaacatgccagcactgagtccagtgggcatggtgactgtcattgatggagacaagggggagaatgcccaggtgcagctctcagtggagcaggacaacggtgactttgttatccagaatggcacaggcaccatcctatccagcctgagctttgatcgagagcaacaaagcacctacaccttccagctgaaggcagtggatggtggcgtcccacctcgctcagcttacgttggtgtcaccatcaatgtgctggacgagaatgacaacgcaccctatatcactgccccttctaacacctctcacaagctgctgaccccccagacacgtcttggtgagacggtcagccaggtggcagccgaggactttgactctggtgtcaatgctgagctgatctacagcattgcaggtggcaacccttatggactcttccagattgggtcacattcaggtgccatcaccctggagaaggagattgagcggcgccaccatgggctacaccgcctggtggtgaaggtcagtgaccgcggcaagcccccacgctatggcacagccttggtccatctttatgtcaatgagactctggccaaccgcacgctgctggagaccctcctgggccacagcctggacacgccgctggatattgacattgctggggatccagaatatgagcgctccaagcagcgtggcaacattctctttggtgtggtggctggtgtggtggccgtggccttgctcatcgccctggcggttcttgtgcgctactgcagacagcgggaggccaaaagtggttaccaggctggtaagaaggagaccaaggacctgtatgcccccaagcccagtggcaaggcctccaagggaaacaaaagcaaaggcaagaagagcaagtccccaaagcccgtgaagccagtggaggacgaggatgaggccgggctgcagaagtccctcaagttcaacctgatgagcgatgcccctggggacagtccccgcatccacctgcccctcaactacccaccaggcagccctgacctgggccgccactatcgctctaactccccactgccttccatccagctgcagccccagtcaccctcagcctccaagaagcaccaggtggtacaggacctgccacctgcaaacacattcgtgggcaccggggacaccacgtccacgggctctgagcagtactccgactacagctaccgcaccaacccccccaaataccccagcaagcaggtaggccagccctttcagctcagcacaccccagcccctaccccacccctaccacggagccatctggaccgaggtgtgggagtgatggagcaggtttactgtgcctgcccgtgttgggggccagcctgagccagcagtgggaggtggggccttagtgcctcaccgggcacacggattaggctgagtgaagattaagggagggtgtgctctgtggtctcctccctgccctctccccactggggagagacctgtgatttgccaagtccctggaccctggaccagctactgggccttatgggttgggggtggtaggcaggtgagcgtaagtggggagggaaatgggtaaga

SEQ ID NO: 14998 - DNA, 2489 bp, Homo sapiens
  source 1..2489: mol_type = unassigned DNA
catccaggtgagaggccccctccgtataactgtcagggtgacccaccactagaaatgggagcccacccaaccaggtgaaggccaatgactcagaccaaggtgccaatgcagaaatcgaatacacattccaccaggcgcccgaagttgtgaggcgtcttcttcgactggacaggaacactggacttatcactgttcagggcccggtggaccgtgaggacctaagcaccctgcgcttctcagtgcttgctaaggaccgaggcaccaaccccaagagtgcccgtgcccaggtggttgtgaccgtgaaggacatgaatgacaatgcccccaccattgagatccggggcatagggctagtgactcatcaagatgggatggctaacatctcagaggatgtggcagaggagacagctgtggccctggtgcaggtgtctgaccgagatgagggagagaatgcagctgtcacctgtgtggtggcaggtgatgtgcccttccagctgcgccaggccagtgagacaggcagtgacagcaagaagaagtatttcctgcagactaccaccccgctagactacgagaaggtcaaagactacaccattgagattgtggctgtggactctggcaaccccccactctccagcactaactccctcaaggtgcaggtggtggacgtcaatgacaacgcacctgtcttcactcagagtgtcactgaggtcgccttcccggaaaacaacaagcctggtgaagtgattgctgagatcactgccagtgatgctgactctggctctaatgctgagctggtttactctctggagcctgagccggctgctaagggcctcttcaccatctcacccgagactggagagatccaggtgaagacatctctggatcgggaacagcgggagagctatgagttgaaggtggtggcagctgaccggggcagtcctagcctccagggcacagccactgtccttgtcaatgtgctggactgcaatgacaatgaccccaaatttatgctgagtggctacaacttctcagtgatggagaacatgccagcactgagtccagtgggcatggtgactgtcattgatggagacaagggggagaatgcccaggtgcagctctcagtggagcaggacaacggtgactttgttatccagaatggcacaggcaccatcctatccagcctgagctttgatcgagagcaacaaagcacctacaccttccagctgaaggcagtggatggtggcgtcccacctcgctcagcttacgttggtgtcaccatcaatgtgctggacgagaatgacaacgcaccctatatcactgccccttctaacacctctcacaagctgctgaccccccagacacgtcttggtgagacggtcagccaggtggcagccgaggactttgactctggtgtcaatgctgagctgatctacagcattgcaggtggcaacccttatggactcttccagattgggtcacattcaggtgccatcaccctggagaaggagattgagcggcgccaccatgggctacaccgcctggtggtgaaggtcagtgaccgcggcaagcccccacgctatggcacagccttggtccatctttatgtcaatgagactctggccaaccgcacgctgctggagaccctcctgggccacagcctggacacgccgctggatattgacattgctggggatccagaatatgagcgctccaagcagcgtggcaacattctctttggtgtggtggctggtgtggtggccgtggccttgctcatcgccctggcggttcttgtgcgctactgcagacagcgggaggccaaaagtggttaccaggctggtaagaaggagaccaaggacctgtatgcccccaagcccagtggcaaggcctccaagggaaacaaaagcaaaggcaagaagagcaagtccccaaagcccgtgaagccagtggaggacgaggatgaggccgggctgcagaagtccctcaagttcaacctgatgagcgatgcccctggggacagtccccgcatccacctgcccctcaactacccaccaggcagccctgacctgggccgccactatcgctctaactccccactgccttccatccagctgcagccccagtcaccctcagcctccaagaagcaccaggtggtacaggacctgccacctgcaaacacattcgtgggcaccggggacaccacgtccacgggctctgagcagtactccgactacagctaccgcaccaacccccccaaataccccagcaagcaggtaggccagccctttcagctcagcacaccccagcccctaccccacccctaccacggagccatctggaccgaggtgtgggagtgatggagcaggtttactgtgcctgcccgtgttgggggccagcctgagccagcagtgggaggtggggccttagtgcctcaccgggcacacggattaggctgagtgaagattaagggagggtgtgctctgtggtctcct

SEQ ID NO: 14999 - DNA, 3307 bp, Homo sapiens
  source 1..3307: mol_type = unassigned DNA
ctgagtttctggaatcggggttctgtgctgggactgactgctcttgtggagaatcgtgtgtcagtgggagaggccctcctgattctggggcctcccaggatggagcacctgaggcacagcccaggccctggggggcaacggctactgctgccctccatgctgctagcactgctgctcctgctggctccatccccaggccacgccactcgggtagtgtacaaggtgccggaggaacagccacccaacaccctcattgggagcctcgcagccgactatggttttccagatgtggggcacctgtacaagctagaggtgggtgccccgtaccttcgcgtggatggcaagacaggtgacattttcaccaccgagacctccatcgaccgtgaggggctccgtgaatgccagaaccagctccctggtgatccctgcatcctggagtttgaggtatctatcacagacctcgtgcagaatggcagcccccggctgctagagggccagatagaagtacaagacatcaatgacaacacacccaacttcgcctcaccagtcatcactctggccatccctgagaacaccaacatcggctcactcttccccatcccgctggcttcagaccgtgatgctggtcccaacggtgtggcatcctatgagctgcaggctgggcctgaggcccaggagctatttgggctgcaggtggcagaggaccaggaggagaagcaaccacagctcattgtgatgggcaacctggaccgtgagcgctgggactcctatgacctcaccatcaaggtgcaggatggcggcagccccccacgcgccagcagtgccctgctgcgtgtcaccgtgcttgacaccaatgacaacgcccccaagtttgagcggccctcctatgaggccgaactatctgagaatagccccataggccactcggtcatccaggtgaaggccaatgactcagaccaaggtgccaatgcagaaatcgaatacacattccaccaggcgcccgaagttgtgaggcgtcttcttcgactggacaggaacactggacttatcactgttcagggcccggtggaccgtgaggacctaagcaccctgcgcttctcagtgcttgctaaggaccgaggcaccaaccccaagagtgcccgtgcccaggtggttgtgaccgtgaaggacatgaatgacaatgcccccaccattgagatccggggcatagggctagtgactcatcaagatgggatggctaacatctcagaggatgtggcagaggagacagctgtggccctggtgcaggtgtctgaccgagatgagggagagaatgcagctgtcacctgtgtggtggcaggtgatgtgcccttccagctgcgccaggccagtgagacaggcagtgacagcaagaagaagtatttcctgcagactaccaccccgctagactacgagaaggtcaaagactacaccattgagattgtggctgtggactctggcaaccccccactctccagcactaactccctcaaggtgcaggtggtggacgtcaatgacaacgcacctgtcttcactcagagtgtcactgaggtcgccttcccggaaaacaacaagcctggtgaagtgattgctgagatcactgccagtgatgctgactctggctctaatgctgagctggtttactctctggagcctgagccggctgctaagggcctcttcaccatctcacccgagactggagagatccaggtgaagacatctctggatcgggaacagcgggagagctatgagttgaaggtggtggcagctgaccggggcagtcctagcctccagggcacagccactgtccttgtcaatgtgctggactgcaatgacaatgaccccaaatttatgctgagtggctacaacttctcagtgatggagaacatgccagcactgagtccagtgggcatggtgactgtcattgatggagacaagggggagaatgcccaggtgcagctctcagtggagcaggacaacggtgactttgttatccagaatggcacaggcaccatcctatccagcctgagctttgatcgagagcaacaaagcacctacaccttccagctgaaggcagtggatggtggcgtcccacctcgctcagcttacgttggtgtcaccatcaatgtgctggacgagaatgacaacgcaccctatatcactgccccttctaacacctctcacaagctgctgaccccccagacacgtcttggtgagacggtcagccaggtggcagccgaggactttgactctggtgtcaatgctgagctgatctacagcattgcaggtggcaacccttatggactcttccagattgggtcacattcaggtgccatcaccctggagaaggagattgagcggcgccaccatgggctacaccgcctggtggtgaaggtcagtgaccgcggcaagcccccacgctatggcacagccttggtccatctttatgtcaatgagactctggccaaccgcacgctgctggagaccctcctgggccacagcctggacacgccgctggatattgacattgctggggatccagaatatgagcgctccaagcagcgtggcaacattctctttggtgtggtggctggtgtggtggccgtggccttgctcatcgccctggcggttcttgtgcgctactgcagacagcgggaggccaaaagtggttaccaggctggtaagaaggagaccaaggacctgtatgcccccaagcccagtggcaaggcctccaagggaaacaaaagcaaaggcaagaagagcaagtccccaaagcccgtgaagccagtggaggacgaggatgaggccgggctgcagaagtccctcaagttcaacctgatgagcgatgcccctggggacagtccccgcatccacctgcccctcaactacccaccaggcagccctgacctgggccgccactatcgctctaactccccactgccttccatccagctgcagccccagtcaccctcagcctccaagaagcaccaggtggtacaggacctgccacctgcaaacacattcgtgggcaccggggacaccacgtccacgggctctgagcagtactccgactacagctaccgcaccaacccccccaaataccccagcaagcaggtaggccagccctttcagctcagcacaccccagcccctaccccacccctaccacggagccatctggaccgaggtgtgggagtgatggagcaggtttactgtgcctgcccgtgttgggggccagcctgagccagcagtgggaggtggggccttagtgcctcaccgggcacacggat

SEQ ID NO: 15000 - DNA, 825 bp, Homo sapiens
  source 1..825: mol_type = unassigned DNA
ctggtcccaacggtgtggcatcctatgagctgcaggctgggcctgaggcccaggagctatttgggctgcaggtggcagaggaccaggaggagaagcaaccacagctcattgtgatgggcaacctggaccgtgagcgctgggactcctatgacctcaccatcaaggtgcaggatggcggcagccccccacgcgccagcagtgccctgctgcgtgtcaccgtgcttgacaccaatgacaacgcccccaagtttgagcggccctcctatgaggccgaactatctgagaatagccccataggccactcggtcatccagagcctggtggactgggacctggaaaagagactgagaaagaaaagggagacagacagtcggggatagcaaataataatagcctaggtgccaggcaccgttctaaacacatgatgtgtattatatcatttaatccttacagtacaaggtgaaggccaatgactcagaccaaggtgccaatgcagaaatcgaatacacattccaccaggcgcccgaagttgtgaggcgtcttcttcgactggacaggaacactggacttatcactgttcagggcccggtggaccgtgaggacctaagcaccctgcgcttctcagtgcttgctaaggaccgaggcaccaaccccaagagtgcccgtgcccaggtggttgtgaccgtgaaggacatgaatgacaatgcccccaccattgagatccggggcatagggctagtgactcatcaagatgggatggctaacatctcagaggatgtggcagaggagacagctgtggccctggtgcaggtgtctgaccgagat

SEQ ID NO: 15001 - DNA, 553 bp, Homo sapiens
  source 1..553: mol_type = unassigned DNA
ggcactgcgagggcgtgtgacacaggccgtgacactgcgcggcctcgcggggcagggacccggtgactgtataatccctcctgattctggggcctcccaggatggagcacctgaggcacagcccaggccctggggggcaacggctactgctgccctccatgctgctagcactgctgctcctgctggctccatccccaggccacgccactcgggtagtgtacaaggtgccggaggaacagccacccaacaccctcattgggagcctcgcagccgactatggttttccagatgtggggcacctgtacaagctagaggtgggtgccccgtaccttcgcgtggatggcaagacaggtgacattttcaccaccgagacctccatcgaccgtgaggggctccgtgaatgccagaaccagctccctggtgatccctgcatcctggagtttgaggtatctatcacagacctcgtgcagaatggcagcccccggctgctagagggccagatagaagtacaagacatcaatgacaacacacccaacttcgcctcaccagtcat

SEQ ID NO: 15002 - DNA, 9237 bp, Homo sapiens
  source 1..9237: mol_type = unassigned DNA
caacgtgctgagctaatagcgacagatagagggcagacagattcctgctagcagcttagtgttagttgcttgtggtaactaaggcaggtggcatacatctcagaacgtggagaatgatggtatgctttctgagttaacatgttgaactgttttgcttttctaaaaattttcctagtaacattttcttgatgatatgagagtggatatcaatgcctcacagaaacaagaggtggaacatgtgaatgaatcgtcttggaactagattatgagcactggttctttttaaagggatgtgcaagaggcagccttggcaagaaaacttgctgcataatcttacatggactaaagatgaaactttaaaccgcaaatcagctttgagtgaactttgacagaagatgtttcgacagttttatctctggacatgtttagcttcagggatcatcctgggctctctctttgaaatctgcttgggccagtatgatgatgattgcaaactagctaggggaggaccaccagctaccatagttgctattgatgaagaaagtcggaatggtacaattctggtggacaacatgctgatcaaagggactgctggaggaccagaccccaccatagaactttctttaaaggataatgtggattactgggtgttgatggatcctgttaagcaaatgcttttcctgaacagcaccggaagagttctggatagagatccaccgatgaacatacactccattgtggtgcaggtccagtgcatcaacaaaaaagtgggcactattatctaccatgaagtgcgaatagtggtgagagacaggaatgacaactcacccactttcaagcatgaaagctactatgccacagtgaatgagctcactccagttggtaccacaatattcacaggattttcaggagacaatggagctacagatatagatgatggaccaaatggacagatagagtatgttattcagtataatccagatgatccgacatccaatgacacctttgaaattcccctaatgttgactggaaatatagtgttaaggaagaggctcaactatgaagataagactcgctactttgtcataatccaagctaatgaccgtgcccaaaatctgaatgagaggcgaaccaccaccaccactctcacagtggatgttctggatggagatgacttgggtccaatgtttcttccttgtgtccttgtgccaaacactcgtgattgccgtccactcacttatcaagctgccatacctgagttgagaactccggaagaactgaaccccattattgttacgccaccaatccaagccattgatcaggaccggaatattcaaccgccatcagataggccaggaatcctctattccatccttgttgggactcctgaggattacccacgatttttccatatgcatcctaggacagcagaacttagtctcctggagccagtaaacagagactttcaccagaaatttgatttggttattaaggctgaacaagacaatggtcatcctcttcctgcctttgccggtctacacattgaaatactggatgaaaacaatcaaagtccatattttacaatgcccagttatcaaggctatatcctggaatctgccccagtgggagcaaccatttcggacagtctcaatttgacttcacctttaagaatagtagctctggacaaggacatagaagatacaaaagacccagagcttcacctttttctgaatgactacacctcagtcttcaccgtcacacagactggtattactcgctacctcaccttacttcaaccagtggacagggaagaacagcaaacttacaccttttcgataacagcatttgatggtgtacaagaaagtgagccagtcatcgtcaatattcaagtgatggatgcaaatgataacacgccaaccttccctgaaatatcctatgatgtgtatgtttatacagacatgagacctggggacagtgtcatacagctcactgcagtcgacgcagacgaagggtcaaatggggagatcacatatgaaatccttgttggggctcagggagacttcatcatcaataaaacaacagggcttatcaccatcgctccaggggtggaaatgatagtcgggcggacttacgcactcacggtccaagcagcggataatgctcctcctgcagagcgaaggaactccatctgcactgtgtatattgaagtgcttccaccaaataatcaaagccctcctcgcttcccacagctgatgtatagccttgaaattagtgaagccatgagggttggtgctgttttattaaatctacaggcaactgatcgagagggagactcaataacatatgccattgagaatggagatcctcagagagtttttaatctttcagaaaccacggggattctaaccttagggaaagcactggacagggaaagcactgatcgctacattctgatcatcacagcttcagatggcaggccagatgggacctcaactgccacagtaaacatagtggtgacagatgtcaatgacaatgctccagtgtttgatccttatctgccaagaaatttatctgtggtggaagaagaagccaatgcctttgtgggtcaagtaaaagcaacagaccctgatgctggaataaatggtcaagtgcactacagtttgggtaactttaataatctttttcgtatcacatccaatgggagcatttacacagcagtgaagcttaacagagaagtcagggactactatgaacttgttgttgtggcaacagatggagcagtacaccctcgtcattcaactctaaccttggccatcaaggttttggacattgatgataacagtcctgtgttcaccaattcaacatacactgtccttgttgaagagaatttgccagctgggactaccatccttcaaatagaggccaaagatgtcgaccttggagcaaatgtgtcttaccggataagaagcccagaagtgaagcacttttttgcactacatccatttacaggagaactatcgcttttaaggagtttagattatgaggcatttccagaccaagaagcaagtatcacttttctggtagaggcctttgatatttatggaacaatgccacctggtattgctactgtcacagtgattgtaaaggatatgaatgattatcctcctgtctttagtaaacgaatatacaaagggatggtggctccggatgcagtcaagggtacacctatcacaacagtttatgctgaagatgcagaccctcctggattacctgcaagtcgtgtgaggtatagagtagatgatgtacagtttccttaccctgccagtatttttgaagtggaagaagattctggaagagtaataacacgagtcaatcttaatgaagaacctacaacaatttttaagttggtggtggttgcttttgatgatggggagcctgtgatgtccagcagtgccacagtgaagattcttgtcttacatcctggtgagatcccacgcttcacacaggaggaatatagacctcctccagtaagtgaacttgccaccaaagggaccatggttggtgtaatttctgctgctgccattaatcaaagtattgtgtactccattgtttcaggaaatgaagaagatacatttggaattaataacatcacaggtgttatctatgtgaatggacctctggattatgagaccaggacaagctatgtacttcgagtccaagctgattccctggaagtggtccttgccaatctccgagttccttcaaaaagcaatacagctaaagtatacattgagattcaggatgaaaataatcatcccccagtgtttcagaaaaaattctacatcggaggtgtatctgaagatgcaagaatgtttacttctgtactcagagtgaaggctactgataaagatactggcaattatagtgtcatggcctacagactcataataccaccaattaaagagggaaaagaaggatttgtagtggaaacatatacagggcttatcaaaactgctatgctcttccataatatgaggagatcctacttcaagtttcaagttattgcaactgacgactatgggaagggactgagcggcaaagccgatgtactcgtctccgtggtcaatcagctggatatgcaagtcattgtttccaatgtgcctcctactctagtggaaaaaaagatagaagatcttacagagatcttggatcgctatgttcaggaacaaattcctggtgccaaggtcgtagtggagtccattggagctcgccggcatggagatgccttttccctagaagattacaccaaatgtgacttgactgtctatgcaattgacccccaaaccaacagagccatcgatagaaatgagctttttaaatttttggatggcaaactacttgatatcaataaagactttcagccgtattatggggaaggaggacgcattctggagatccggactccagaggcagtgaccagcattaaaaagagaggagaaagtctaggatacacagaaggggccttgttggctctggccttcatcatcatcctctgctgcattcctgccatcttggtggttttggtcagctacagacagtttaaagtacgtcaagctgagtgtacaaagactgcacgaattcaggccgcattacccgcggctaaaccagcagtgccggctcctgcaccagtggcagcgcccccgccgccgccgccgcctccgccaggtgcgcatctctatgaagaacttggagacagctcaatgcataagtatgaaatgcctcaatatgggagtcgccgtcgattgttaccaccagctggacaggaggaatatggtgaggtggttggtgaagctgaggaagaatatgaggaggaagagtgggcaagaaaaagaatgatcaagttagttgttgatcgagagtatgaaaccagctcaactggagaagacagtgctcctgaatgtcagagaaaccgtcttcaccatcctagtatccacagtaatatcaacggcaatatatatattgcacagaatggttctgtggtgagaacccgccgtgcctgcctcacggacaacttaaaagttgcttcccctgttcgactgggagggccctttaagaaactagacaagttggcagtgacacatgaggagaatgtacctctgaacacattatcaaaggggccattttctactgaaaaaatgaatgcaagaccaactctggttacatttgccccttgccctgtggggactgacaatacagcggtgaagccactaaggaacaggctgaaaagcacagttgaacaggagtccatgattgacagtaagaacatcaaggaggctttggaatttcatagtgaccacacacagtctgatgatgaagagctttggatgggcccctggaacaacctccatataccaatgacaaaactgtgaccaattttttaaaagatattttaattaatttttacttacatttttaataaactgtgctttttattgtcactgagaaaacaatgtatggaatttatatcatgcacacaagctaaaactttgaacaatatgctttaaaattttaagagacagatttgcactcacattgttatcaattaatcgtttttcccagaaaatccttttggacatactttcactaaataacctatcgtttaaacatttagctgttttgttgggtcttgaatttttgttcattttaataaacaagaaataattactaaataatcatttatattttattgattaacatagattatgctttatttctagctccacaaaacatttttagtacatgtaattttattttccatagccaaaagggcaaaaaagaagtaagaggatatttacaggcaatgagtttatacagctgctgtctatactgccctaatttttaaaatgaaagctagaattgcaaagtaaagtaaatgagggaatcacctgtaaataattaattattttaaatcatgagcttgttttctttctttattgtcctgtataaaggttttcacattttaccataaatacatttatatcttgaccctttaggaaaccacttgaagtcgtatgtctttttatcaatattatttacaatattctcttgtcccttcatctcatatcaaatatggtagatactttagtttagtttaatcacttgaggttaaataattgtttggagcaacatggaaatctcacccttagcaaaagcttttagggaagtgagaaaggttcgagtaagcagtaatgcatctagaacgacaatttcataatggaagacatggtgaggttagggaagtctcacattaatgtcactagactttaatagtttgtaaacccagcatatcagagtaaaggaatttggcagggttgaaatgtatataatatataaagcttataaaggctatgaattcataacttcaaatgttgtgtttaacttcttccattttcaggttatttatagaatattttaatgcacatatttatgtgcctaaaatccagaaccaggaaatcattgcctgggcattttttaaaatcaaagaacatggtcttgattttttaccattgaacaaagcacagtgtttcatcataagtagaaatgaaaacagaatatcctttaaaaaacttgccttgtgtgttgcttattttccagatgatgtaaaaagaatgaaacaatatagattaagagaattcagaattctattgaatattacttagtatgatatagatgtagctcacttcaaattttgcacagtattgaccaagttcaggttttaatgaaatttcctcatgcatgcttaatatatggttgaaggactgaataatgcactattatttattcccctcttacatgtttcgcgtcttaaaaattgtttattattatgctatttcctcatttccaaagtgaatgaattgtactgacataaacttgccgacttgtaagagtagtatgtttttacttcagatttccaagaaaatatttgagatcaaatacagtaacatctcatctaccttattttattgagaattaatgcattccatacccttgccaaaaaaacaaaacaaaacaaacaaacaaaaaaaaacctagtggcattagctagattagaaacgtagaatcatgaccacacctcctggcctgccaaacaagcatccacattttcaaaagatcctaaggtggtttatatgcacattaaattttggaagcaatgaagtccggggcttattccttcaggcaccaaagcaatggtttttagtataggatactttgtataggaattagattaagcatatatttccctactaattcaatcagaggtcatcgaatataatttaatattatcttgatacccccagatcatctcagtcagcatcccttgatattctctctatatacagcttcatggctgcgtttttgtcctttgatttctggctgtgacatttaacttattctgttgttgtgcctttctcacatttttttctttcagtttatagcttctagtatcctgatgggaaagtttgtgttttttgtttgttttcttaatgttgaaaaatcatgaagcttaagatgggaattaggtacacggattcaaccaaatgttttgcgactcttagacgctttctttggttaccagtagatttggaaatatgatgttggcagaagtctagtggcctgacatatgagatgtcactgtattttaaactacattttttatgagaaaatatgcaaaattttacaagccacttagcagacacatttcagtaatttaaacttgatcatttcagtaaaaacaatcatgaggtcaatcatctgttacttaatggagatagtataaagagaagcagaatttacacagagcaaccaaaccaaatatttggtcagtatatttttgggtaacgtagagcagcaaaattattactaactaaataaatctggatcaattaaatagttactttcatagaactttcactagtctataaatccctgactcaggattaaaactgtggaacccagaggaaatacccaggtatgtttaatcttaagaatacttcatataaataacgtttcaatgtaaatatttataaagaaattggttgttatttttcctaggaaggtgtaggaaggttttcttgttgttctcaatcagcactagcttcaatcaggcagaagaaacagcaggtcttggctaatcgaggtgagaacagaatgatgtaatgactaatattgcaacccgttgattttagaaggtcttgtgggcattaagggaaagcagaggaagaatgagaaaatatggtcagagtgacataggacatttgtgacttaatgaccatcgaatcacaggtgttaatctccctctctcaatttgtctttctcattaattacagactctgagagttgtcatagaattgcaaccgtaggttggccaaaaccatctttttaaaatacagaagaaagtttgccttgaattttatatgtgatatgtcattcatgttattttaccacattgttcacagggatgttaaagactattatttacttaagtggttgttccaaaggtgattcagtagttaccattaaaatattatttaaaaacatttttatatcatagagccagaagtaattgaatattgactctcgagggaagacattttctgtcttttatttcatgagctttgatttttctctttctctgcttcaccttctgcactttataccttaagtgggatttatataccacttgaatttaattagcaaaataggcaaaaagtgctaataatctattctcagggcagatgcctattggtgcctgcaaattacacagcgataaggctgaaggataggttcaaaataatgttgaggacttacacattttatagatagtttctttctattcccaaatggtatgtgaaatttttgttctattttttttattggttttcaatagttaattttgatctttatcataagaagctttagttatagactggtatttttttcattgcaatctactttaaatttatggtcagttaagcacatgtatggaagattcgaacattgtctatagtttgaaaaatctatcaacaccttcactgctttcccaatttctttatccaaatacctgttcttccttaacaaatattatgttactgtataagaatctgaattagaagttttaagttaaaatgcattgttattcactacacaatgtttcaaaaataaattttcatttgaaaa

SEQ ID NO: 15003 - DNA, 5846 bp, Homo sapiens
  source 1..5846: mol_type = unassigned DNA
caacgtgctgagctaatagcgacagatagagggcagacagattcctgctagcagcttagtgttagttgcttgtggtaactaaggcaggtggcatacatctcagaacgtggagaatgatggtatgctttctgagttaacatgttgaactgttttgcttttctaaaaattttcctagtaacattttcttgatgatatgagagtggatatcaatgcctcacagaaacaagaggtggaacatgtgaatgaatcgtcttggaactagattatgagcactggttctttttaaagggatgtgcaagaggcagccttggcaagaaaacttgctgcataatcttacatggactaaagatgaaactttaaaccgcaaatcagctttgagtgaactttgacagaagatgtttcgacagttttatctctggacatgtttagcttcagggatcatcctgggctctctctttgaaatctgcttgggccagtatgatgatgattgcaaactagctaggggaggaccaccagctaccatagttgctattgatgaagaaagtcggaatggtacaattctggtggacaacatgctgatcaaagggactgctggaggaccagaccccaccatagaactttctttaaaggataatgtggattactgggtgttgatggatcctgttaagcaaatgcttttcctgaacagcaccggaagagttctggatagagatccaccgatgaacatacactccattgtggtgcaggtccagtgcatcaacaaaaaagtgggcactattatctaccatgaagtgcgaatagtggtgagagacaggaatgacaactcacccactttcaagcatgaaagctactatgccacagtgaatgagctcactccagttggtaccacaatattcacaggattttcaggagacaatggagctacagatatagatgatggaccaaatggacagatagagtatgttattcagtataatccagatgatccgacatccaatgacacctttgaaattcccctaatgttgactggaaatatagtgttaaggaagaggctcaactatgaagataagactcgctactttgtcataatccaagctaatgaccgtgcccaaaatctgaatgagaggcgaaccaccaccaccactctcacagtggatgttctggatggagatgacttgggtccaatgtttcttccttgtgtccttgtgccaaacactcgtgattgccgtccactcacttatcaagctgccatacctgagttgagaactccggaagaactgaaccccattattgttacgccaccaatccaagccattgatcaggaccggaatattcaaccgccatcagataggccaggaatcctctattccatccttgttgggactcctgaggattacccacgatttttccatatgcatcctaggacagcagaacttagtctcctggagccagtaaacagagactttcaccagaaatttgatttggttattaaggctgaacaagacaatggtcatcctcttcctgcctttgccggtctacacattgaaatactggatgaaaacaatcaaagtccatattttacaatgcccagttatcaaggctatatcctggaatctgccccagtgggagcaaccatttcggacagtctcaatttgacttcacctttaagaatagtagctctggacaaggacatagaagatacaaaagacccagagcttcacctttttctgaatgactacacctcagtcttcaccgtcacacagactggtattactcgctacctcaccttacttcaaccagtggacagggaagaacagcaaacttacaccttttcgataacagcatttgatggtgtacaagaaagtgagccagtcatcgtcaatattcaagtgatggatgcaaatgataacacgccaaccttccctgaaatatcctatgatgtgtatgtttatacagacatgagacctggggacagtgtcatacagctcactgcagtcgacgcagacgaagggtcaaatggggagatcacatatgaaatccttgttggggctcagggagacttcatcatcaataaaacaacagggcttatcaccatcgctccaggggtggaaatgatagtcgggcggacttacgcactcacggtccaagcagcggataatgctcctcctgcagagcgaaggaactccatctgcactgtgtatattgaagtgcttccaccaaataatcaaagccctcctcgcttcccacagctgatgtatagccttgaaattagtgaagccatgagggttggtgctgttttattaaatctacaggcaactgatcgagagggagactcaataacatatgccattgagaatggagatcctcagagagtttttaatctttcagaaaccacggggattctaaccttagggaaagcactggacagggaaagcactgatcgctacattctgatcatcacagcttcagatggcaggccagatgggacctcaactgccacagtaaacatagtggtgacagatgtcaatgacaatgctccagtgtttgatccttatctgccaagaaatttatctgtggtggaagaagaagccaatgcctttgtgggtcaagtaaaagcaacagaccctgatgctggaataaatggtcaagtgcactacagtttgggtaactttaataatctttttcgtatcacatccaatgggagcatttacacagcagtgaagcttaacagagaagtcagggactactatgaacttgttgttgtggcaacagatggagcagtacaccctcgtcattcaactctaaccttggccatcaaggttttggacattgatgataacagtcctgtgttcaccaattcaacatacactgtccttgttgaagagaatttgccagctgggactaccatccttcaaatagaggccaaagatgtcgaccttggagcaaatgtgtcttaccggataagaagcccagaagtgaagcacttttttgcactacatccatttacaggagaactatcgcttttaaggagtttagattatgaggcatttccagaccaagaagcaagtatcacttttctggtagaggcctttgatatttatggaacaatgccacctggtattgctactgtcacagtgattgtaaaggatatgaatgattatcctcctgtctttagtaaacgaatatacaaagggatggtggctccggatgcagtcaagggtacacctatcacaacagtttatgctgaagatgcagaccctcctggattacctgcaagtcgtgtgaggtatagagtagatgatgtacagtttccttaccctgccagtatttttgaagtggaagaagattctggaagagtaataacacgagtcaatcttaatgaagaacctacaacaatttttaagttggtggtggttgcttttgatgatggggagcctgtgatgtccagcagtgccacagtgaagattcttgtcttacatcctggtgagatcccacgcttcacacaggaggaatatagacctcctccagtaagtgaacttgccaccaaagggaccatggttggtgtaatttctgctgctgccattaatcaaagtattgtgtactccattgtttcaggaaatgaagaagatacatttggaattaataacatcacaggtgttatctatgtgaatggacctctggattatgagaccaggacaagctatgtacttcgagtccaagctgattccctggaagtggtccttgccaatctccgagttccttcaaaaagcaatacagctaaagtatacattgagattcaggatgaaaataatcatcccccagtgtttcagaaaaaattctacatcggaggtgtatctgaagatgcaagaatgtttacttctgtactcagagtgaaggctactgataaagatactggcaattatagtgtcatggcctacagactcataataccaccaattaaagagggaaaagaaggatttgtagtggaaacatatacagggcttatcaaaactgctatgctcttccataatatgaggagatcctacttcaagtttcaagttattgcaactgacgactatgggaagggactgagcggcaaagccgatgtactcgtctccgtggtcaatcagctggatatgcaagtcattgtttccaatgtgcctcctactctagtggaaaaaaagatagaagatcttacagagatcttggatcgctatgttcaggaacaaattcctggtgccaaggtcgtagtggagtccattggagctcgccggcatggagatgccttttccctagaagattacaccaaatgtgacttgactgtctatgcaattgacccccaaaccaacagagccatcgatagaaatgagctttttaaatttttggatggcaaactacttgatatcaataaagactttcagccgtattatggggaaggaggacgcattctggagatccggactccagaggcagtgaccagcattaaaaagagaggagaaagtctaggatacacagaaggggccttgttggctctggccttcatcatcatcctctgctgcattcctgccatcttggtggttttggtcagctacagacagtttaaagtacgtcaagctgagtgtacaaagactgcacgaattcaggccgcattacccgcggctaaaccagcagtgccggctcctgcaccagtggcagcgcccccgccgccgccgccgcctccgccaggtgcgcatctctatgaagaacttggagacagctcaatgtatgaaatgcctcaatatgggagtcgccgtcgattgttaccaccagctggacaggaggaatatggtgaggtggttggtgaagctgaggaagaatatgaggaggaagagtgggcaagaaaaagaatgatcaagttagttgttgatcgagagtatgaaaccagctcaactggagaagacagtgctcctgaatgtcagagaaaccgtcttcaccatcctagtatccacagtaatatcaacggcaatatatatattgcacagaatggttctgtggtgagaacccgccgtgcctgcctcacggacaacttaaaagttgcttcccctgttcgactgggagggccctttaagaaactagacaagttggcagtgacacatgaggagaatgtacctctgaacacattatcaaaggggccattttctactgaaaaaatgaatgcaagaccaactctggttacatttgccccttgccctgtggggactgacaatacagcggtgaagccactaaggaacaggctgaaaagcacagttgaacaggagtccatgattgacagtaagaacatcaaggaggctttggaatttcatagtgaccacacacagtctgatgatgaagagctttggatgggcccctggaacaacctccatataccaatgacaaaactgtgaccaattttttaaaagatattttaattaatttttacttacatttttaataaactgtgctttttattgtcactgagaaaacaatgtatggaatttatatcatgcacacaagctaaaactttgaacaatatgctttaaaattttaagagacagatttgcactcacattgttatcaattaatcgtttttcccagaaaatccttttggacatactttcactaaataacctatcgtttaaacatttagctgttttgttgggtcttgaatttttgttcattttaataaacaagaaataattactaaataatcatttatattttattgattaacatagattatgctttatttctagctccacaaaacatttttagtacatgtaattttattttccatagccaaaagggcaaaaaagaagtaagaggatatt

SEQ ID NO: 15004 - DNA, 5700 bp, Homo sapiens
  source 1..5700: mol_type = unassigned DNA
caacgtgctgagctaatagcgacagatagagggcagacagattcctgctagcagcttagtgttagttgcttgtggtaactaaggcaggtggcatacatctcagaacgtggagaatgatggtatgctttctgagttaacatgttgaactgttttgcttttctaaaaattttcctagtaacattttcttgatgatatgagagtggatatcaatgcctcacagaaacaagaggtggaacatgtgaatgaatcgtcttggaactagattatgagcactggttctttttaaagggatgtgcaagaggcagccttggcaagaaaacttgctgcataatcttacatggactaaagatgaaactttaaaccgcaaatcagctttgagtgaactttgacagaagatgtttcgacagttttatctctggacatgtttagcttcagggatcatcctgggctctctctttgaaatctgcttgggccagtatgatgatgactggcaatatgaggattgcaaactagctaggggaggaccaccagctaccatagttgctattgatgaagaaagtcggaatggtacaattctggtggacaacatgctgatcaaagggactgctggaggaccagaccccaccatagaactttctttaaaggataatgtggattactgggtgttgatggatcctgttaagcaaatgcttttcctgaacagcaccggaagagttctggatagagatccaccgatgaacatacactccattgtggtgcaggtccagtgcatcaacaaaaaagtgggcactattatctaccatgaagtgcgaatagtggtgagagacaggaatgacaactcacccactttcaagcatgaaagctactatgccacagtgaatgagctcactccagttggtaccacaatattcacaggattttcaggagacaatggagctacagatatagatgatggaccaaatggacagatagagtatgttattcagtataatccagatgatccgacatccaatgacacctttgaaattcccctaatgttgactggaaatatagtgttaaggaagaggctcaactatgaagataagactcgctactttgtcataatccaagctaatgaccgtgcccaaaatctgaatgagaggcgaaccaccaccaccactctcacagtggatgttctggatggagatgacttgggtccaatgtttcttccttgtgtccttgtgccaaacactcgtgattgccgtccactcacttatcaagctgccatacctgagttgagaactccggaagaactgaaccccattattgttacgccaccaatccaagccattgatcaggaccggaatattcaaccgccatcagataggccaggaatcctctattccatccttgttgggactcctgaggattacccacgatttttccatatgcatcctaggacagcagaacttagtctcctggagccagtaaacagagactttcaccagaaatttgatttggttattaaggctgaacaagacaatggtcatcctcttcctgcctttgccggtctacacattgaaatactggatgaaaacaatcaaagtccatattttacaatgcccagttatcaaggctatatcctggaatctgccccagtgggagcaaccatttcggacagtctcaatttgacttcacctttaagaatagtagctctggacaaggacatagaagatacaaaagacccagagcttcacctttttctgaatgactacacctcagtcttcaccgtcacacagactggtattactcgctacctcaccttacttcaaccagtggacagggaagaacagcaaacttacaccttttcgataacagcatttgatggtgtacaagaaagtgagccagtcatcgtcaatattcaagtgatggatgcaaatgataacacgccaaccttccctgaaatatcctatgatgtgtatgtttatacagacatgagacctggggacagtgtcatacagctcactgcagtcgacgcagacgaagggtcaaatggggagatcacatatgaaatccttgttggggctcagggagacttcatcatcaataaaacaacagggcttatcaccatcgctccaggggtggaaatgatagtcgggcggacttacgcactcacggtccaagcagcggataatgctcctcctgcagagcgaaggaactccatctgcactgtgtatattgaagtgcttccaccaaataatcaaagccctcctcgcttcccacagctgatgtatagccttgaaattagtgaagccatgagggttggtgctgttttattaaatctacaggcaactgatcgagagggagactcaataacatatgccattgagaatggagatcctcagagagtttttaatctttcagaaaccacggggattctaaccttagggaaagcactggacagggaaagcactgatcgctacattctgatcatcacagcttcagatggcaggccagatgggacctcaactgccacagtaaacatagtggtgacagatgtcaatgacaatgctccagtgtttgatccttatctgccaagaaatttatctgtggtggaagaagaagccaatgcctttgtgggtcaagtaaaagcaacagaccctgatgctggaataaatggtcaagtgcactacagtttgggtaactttaataatctttttcgtatcacatccaatgggagcatttacacagcagtgaagcttaacagagaagtcagggactactatgaacttgttgttgtggcaacagatggagcagtacaccctcgtcattcaactctaaccttggccatcaaggttttggacattgatgataacagtcctgtgttcaccaattcaacatacactgtccttgttgaagagaatttgccagctgggactaccatccttcaaatagaggccaaagatgtcgaccttggagcaaatgtgtcttaccggataagaagcccagaagtgaagcacttttttgcactacatccatttacaggagaactatcgcttttaaggagtttagattatgaggcatttccagaccaagaagcaagtatcacttttctggtagaggcctttgatatttatggaacaatgccacctggtattgctactgtcacagtgattgtaaaggatatgaatgattatcctcctgtctttagtaaacgaatatacaaagggatggtggctccggatgcagtcaagggtacacctatcacaacagtttatgctgaagatgcagaccctcctggattacctgcaagtcgtgtgaggtatagagtagatgatgtacagtttccttaccctgccagtatttttgaagtggaagaagattctggaagagtaataacacgagtcaatcttaatgaagaacctacaacaatttttaagttggtggtggttgcttttgatgatggggagcctgtgatgtccagcagtgccacagtgaagattcttgtcttacatcctggtgagatcccacgcttcacacaggaggaatatagacctcctccagtaagtgaacttgccaccaaagggaccatggttggtgtaatttctgctgctgccattaatcaaagtattgtgtactccattgtttcaggaaatgaagaagatacatttggaattaataacatcacaggtgttatctatgtgaatggacctctggattatgagaccaggacaagctatgtacttcgagtccaagctgattccctggaagtggtccttgccaatctccgagttccttcaaaaagcaatacagctaaagtatacattgagattcaggatgaaaataatcatcccccagtgtttcagaaaaaattctacatcggaggtgtatctgaagatgcaagaatgtttacttctgtactcagagtgaaggctactgataaagatactggcaattatagtgtcatggcctacagactcataataccaccaattaaagagggaaaagaaggatttgtagtggaaacatatacagggcttatcaaaactgctatgctcttccataatatgaggagatcctacttcaagtttcaagttattgcaactgacgactatgggaagggactgagcggcaaagccgatgtactcgtctccgtggtcaatcagctggatatgcaagtcattgtttccaatgtgcctcctactctagtggaaaaaaagatagaagatcttacagagatcttggatcgctatgttcaggaacaaattcctggtgccaaggtcgtagtggagtccattggagctcgccggcatggagatgccttttccctagaagattacaccaaatgtgacttgactgtctatgcaattgacccccaaaccaacagagccatcgatagaaatgagctttttaaatttttggatggcaaactacttgatatcaataaagactttcagccgtattatggggaaggaggacgcattctggagatccggactccagaggcagtgaccagcattaaaaagagaggagaaagtctaggatacacagaaggggccttgttggctctggccttcatcatcatcctctgctgcattcctgccatcttggtggttttggtcagctacagacagtttaaagtacgtcaagctgagtgtacaaagactgcacgaattcaggccgcattacccgcggctaaaccagcagtgccggctcctgcaccagtggcagcgcccccgccgccgccgccgcctccgccaggtgcgcatctctatgaagaacttggagacagctcaatgcataagtatgaaatgcctcaatatgggagtcgccgtcgattgttaccaccagctggacaggaggaatatggtgaggtggttggtgaagctgaggaagaatatgaggaggaagagtgggcaagaaaaagaatgatcaagttagttgttgatcgagagtatgaaaccagctcaactggagaagacagtgctcctgaatgtcagagaaaccgtcttcaccatcctagtatccacagtaatatcaacggcaatatatatattgcacagaatggttctgtggtgagaacccgccgtgcctgcctcacggacaacttaaaagttgcttcccctgttcgactgggagggccctttaagaaactagacaagttggcagtgacacatgaggagaatgtacctctgaacacattatcaaaggggccattttctactgaaaaaatgaatgcaagaccaactctggttacatttgccccttgccctgtggggactgacaatacagcggtgaagccactaaggaacaggctgaaaagcacagttgaacaggagtccatgattgacagtaagaacatcaaggaggctttggaatttcatagtgaccacacacagtctgatgatgaagagctttggatgggcccctggaacaacctccatataccaatgacaaaactgtgaccaattttttaaaagatattttaattaatttttacttacatttttaataaactgtgctttttattgtcactgagaaaacaatgtatggaatttatatcatgcacacaagctaaaactttgaacaatatgctttaaaattttaagagacagatttgcactcacattgttatcaattaatcgtttttcccagaaaatccttttggacatactttcactaaataacctatcgtttaaacatttagctgttttgttgggt

SEQ ID NO: 15005 - DNA, 1896 bp, Homo sapiens
  source 1..1896: mol_type = unassigned DNA
caacgtgctgagctaatagcgacagatagagggcagacagattcctgctagcagcttagtgttagttgcttgtggtaactaaggcaggtggcatacatctcagaacgtggagaatgatggtatgctttctgagttaacatgttgaactgttttgcttttctaaaaattttcctagtaacattttcttgatgatatgagagtggatatcaatgcctcacagaaacaagaggtggaacatgtgaatgaatcgtcttggaactagattatgagcactggttctttttaaagggatgtgcaagaggcagccttggcaagaaaacttgctgcataatcttacatggactaaagatgaaactttaaaccgcaagtctccgtggtcaatcagctggatatgcaagtcattgtttccaatgtgcctcctactctagtggaaaaaaagatagaagatcttacagagatcttggatcgctatgttcaggaacaaattcctggtgccaaggtcgtagtggagtccattggagctcgccggcatggagatgccttttccctagaagattacaccaaatgtgacttgactgtctatgcaattgacccccaaaccaacagagccatcgatagaaatgagctttttaaatttttggatggcaaactacttgatatcaataaagactttcagccgtattatggggaaggaggacgcattctggagatccggactccagaggcagtgaccagcattaaaaagagaggagaaagtctaggatacacagaaggggccttgttggctctggccttcatcatcatcctctgctgcattcctgccatcttggtggttttggtcagctacagacagagaggttatggatcagagcaacagcaactgctgaggccctctcttcttaaaccagaggaattatccatggagtctggaattgatcctggccaggaatatggacaagattattacagttatgagcatgggtatgaaatgcctcaatatgggagtcgccgtcgattgttaccaccagctggacaggaggaatatggtgaggtggttggtgaagctgaggaagaatatgaggaggaagagtgggcaagaaaaagaatgatcaagttagttgttgatcgagagtatgaaaccagctcaactggagaagacagtgctcctgaatgtcagagaaaccgtcttcaccatcctagtatccacagtaatatcaacggcaatatatatattgcacagaatggttctgtggtgagaacccgccgtgcctgcctcacggacaacttaaaagttgcttcccctgttcgactgggagggccctttaagaaactagacaagttggcagtgacacatgaggagaatgtacctctgaacacattatcaaaggggccattttctactgaaaaaatgaatgcaagaccaactctggttacatttgccccttgccctgtggggactgacaatacagcggtgaagccactaaggaacaggctgaaaagcacagttgaacaggagtccatgattgacagtaagaacatcaaggaggctttggaatttcatagtgaccacacacagtctgatgatgaagagctttggatgggcccctggaacaacctccatataccaatgacaaaactgtgaccaattttttaaaagatattttaattaatttttacttacatttttaataaactgtgctttttattgtcactgagaaaacaatgtatggaatttatatcatgcacacaagctaaaactttgaacaatatgctttaaaattttaagagacagatttgcactcacattgttatcaattaatcgtttttcccagaaaatccttttggacatactttcactaaataacctatcgtttaaacatttagctgttttgttgg

SEQ ID NO: 15006 - DNA, 1461 bp, Homo sapiens
  source 1..1461: mol_type = unassigned DNA
ctagtggaaaaaaagatagaagatcttacagagatcttggatcgctatgttcaggaacaaattcctggtgccaaggtcgtagtggagtccattggagctcgccggcatggagatgccttttccctagaagattacaccaaatgtgacttgactgtctatgcaattgacccccaaaccaacagagccatcgatagaaatgagctttttaaatttttggatggcaaactacttgatatcaataaagactttcagccgtattatggggaaggaggacgcattctggagatccggactccagaggcagtgaccagcattaaaaagagaggagaaagtctaggatacacagaaggggccttgttggctctggccttcatcatcatcctctgctgcattcctgccatcttggtggttttggtcagctacagacagtttaaagtacgtcaagctgagtgtacaaagactgcacgaattcaggccgcattacccgcggctaaaccagcagtgccggctcctgcaccagtggcagcgcccccgccgccgccgccgcctccgccaggtgcgcatctctatgaagaacttggagacagctcaatgagaggttatggatcagagcaacagcaactgctgaggccctctcttcttaaaccagaggaattatccatggagtctggaattgatcctggccaggaatatggacaagattattacagttatgagcatgggtatgaaatgcctcaatatgggagtcgccgtcgattgttaccaccagctggacaggaggaatatggtgaggtggttggtgaagctgaggaagaatatgaggaggaagagtgggcaagaaaaagaatgatcaagttagttgttgatcgagagtatgaaaccagctcaactggagaagacagtgctcctgaatgtcagagaaaccgtcttcaccatcctagtatccacagtaatatcaacggcaatatatatattgcacagaatggttctgtggtgagaacccgccgtgcctgcctcacggacaacttaaaagttgcttcccctgttcgactgggagggccctttaagaaactagacaagttggcagtgacacatgaggagaatgtacctctgaacacattatcaaaggggccattttctactgaaaaaatgaatgcaagaccaactctggttacatttgccccttgccctgtggggactgacaatacagcggtgaagccactaaggaacaggctgaaaagcacagttgaacaggagtccatgattgacagtaagaacatcaaggaggctttggaatttcatagtgaccacacacagtctgatgatgaagagctttggatgggcccctggaacaacctccatataccaatgacaaaactgtgaccaattttttaaaagatattttaattaatttttacttacatttttaataaactgtgctttttattgtcactgagaaaa

SEQ ID NO: 15007 - DNA, 754 bp, Homo sapiens
  source 1..754: mol_type = unassigned DNA
ggattagtatatatatcaagacttgtgtataacagagatcatgtataatattttttatccaaattgattgataataatagagtcaaagtttgtcattatacactattgaaataaaatagattttgcatgttttgttgctcatatggaacgaggctctgggttgatcattattttagtaattcaggtgtgaaaccatgatcttcctgttttgataattccacaaaatatacttcccactgagatagtgtttagtagaaattgtcttctcagttttactcagacattttttaaagcccttatctgtcagtcattttgtttaataacgaaaatctaagatgtttaatactgatttatttatttctgccttgcaggagaggttatggatcagagcaacagcaactgctgaggccctctcttcttaaaccagaggaattatccatggagtctggaattgatcctggccaggaatatggacaagattattacagttatgagcatgggtatgaaatgcctcaatatgggagtcgccgtcgattgttaccaccagctggacaggaggaatatggtgaggtggttggtgaagctgaggaagaatatgaggaggaagagtgggcaagaaaaagaatgatcaagttagttgttgatcgagagtatgaaaccagctcaactggagaagacagtgctcctgaatgtcagagaaaccgtcttcaccatcctagtatccacagtaatatcaacggcaatatatatattg

SEQ ID NO: 15008 - DNA, 2970 bp, Homo sapiens
  source 1..2970: mol_type = unassigned DNA
caacgtgctgagctaatagcgacagatagagggcagacagattcctgctagcagcttagtgttagttgcttgtggtaactaaggcaggtggcatacatctcagaacgtggagaatgatggtatgctttctgagttaacatgttgaactgttttgcttttctaaaaattttcctagtaacattttcttgatgatatgagagtggatatcaatgcctcacagaaacaagaggtggaacatgtgaatgaatcgtcttggaactagattatgagcactggttctttttaaagggatgtgcaagaggcagccttggcaagaaaacttgctgcataatcttacatggactaaagatgaaactttaaaccgcaaatcagctttgagtgaactttgacagaagatgtttcgacagttttatctctggacatgtttagcttcagggatcatcctgggctctctctttgaaatctgcttgggccagtatgatgatgattgcaaactagctaggggaggaccaccagctaccatagttgctattgatgaagaaagtcggaatggtacaattctggtggacaacatgctgatcaaagggactgctggaggaccagaccccaccatagaactttctttaaaggataatgtggattactgggtgttgatggatcctgttaagcaaatgcttttcctgaacagcaccggaagagttctggatagagatccaccgatgaacatacactccattgtggtgcaggtccagtgcatcaacaaaaaagtgggcactattatctaccatgaagtgcgaatagtggtgagagacaggaatgacaactcacccactttcaagcatgaaagctactatgccacagtgaatgagctcactccagttggtaccacaatattcacaggattttcaggagacaatggagctacagatatagatgatggaccaaatggacagatagagtatgttattcagtataatccagatgatccgacatccaatgacacctttgaaattcccctaatgttgactggaaatatagtgttaaggaagaggctcaactatgaagataagactcgctactttgtcataatccaagctaatgaccgtgcccaaaatctgaatgagaggcgaaccaccaccaccactctcacagtggatgttctggatggagatgacttgggtccaatgtttcttccttgtgtccttgtgccaaacactcgtgattgccgtccactcacttatcaagctgccatacctgagttgagaactccggaagaactgaaccccattattgttacgccaccaatccaagccattgatcaggaccggaatattcaaccgccatcagataggccaggaatcctctattccatccttgttgggactcctgaggattacccacgatttttccatatgcatcctaggacagcagaacttagtctcctggagccagtaaacagagactttcaccagaaatttgatttggttattaaggaagagccaaagaaaattaaaaaaccaaaggttgaaattagagagcctagtgaggaggaagaagtagttgtaactatcgaaaaaccaccagcagctgagcctacatacacaacatggaagagagccagaatattccccatgatttttaagaaagttagaggattagctgataaaagaggaatcgttgaccttgagggtgaagagtggcagagacgccttgaggaagaagataaagattatttgaaactcactctggaccaagaggaagcaacagaaagcactgtagaatcagaggaggaatcctccagcgactatactgaatacagtgaagaagagtctgagttcagtgagtctgagactacagaagaggaatctgagtcagagacaccctctgaggaggaggagagttccacccctgaatcagaagaatcggaatccacagagtcagaaggagaaaaagcaaggaaaaacattgtgcttgcaagaagaaggcccatggttgaggaggtcaaggaagtcaagggtaggaaagaggagccacaagaagaacaaaaagaacctaagatggaagaagaagaacactcagaagaagaagaaagtggaccagcccctgtggaagaaagtacagaccctgaagctcaagatatccctgaagagggcagtgcagaatcagcttcggtggaaggaggtgtggaaagtgaggaggaatcagaatcaggtagtagtagcagtagtagcgaaagtcagtctggaggtccatggggctatcaggtaccagcgtatgacagaagcaagaatgcaaaccaaaagaagtcgccaggagcaaactctgaaggttacaacacagcactttgaaagagatcacagtaggtggaagttttgctgtgatgagtgctctcgtgtgcagtgccttctgtgtgttctccaaagtgacacttgaaagggaggaaattgatcaagattttgatatgacttatgatcagaagcatgccagaaaagtgaatatatatgttgtccaaatccatttgtatattagactgtattagagtaaaactgactaatccttcctatattagtaaatcagaacacatgcaatcagctaatcaatatttaatatttactggtaggatttttgttaatgcaatgtggcattatgtattatcagtgacactctgtctattggaatggatggcatatatatatatatatatatatacacacacacactatatatgtttttatatcatctttcaaaataaatactaagacaagcttcaacaaattatatctttaacagtcgtctacttttgcatatatgtacgtttcaactggcaaaggtattataaaaactatcatgaacatgttcaaataagtaagtttgtatctgcaacttcaagtattaggaattcaatgaaataacatttttcaattaattaaaagttattacagcttattttctgttattattagctacagt

SEQ ID NO: 15009 - DNA, 3177 bp, Homo sapiens
  source 1..3177: mol_type = unassigned DNA
caacgtgctgagctaatagcgacagatagagggcagacagattcctgctagcagcttagtgttagttgcttgtggtaactaaggcaggtggcatacatctcagaacgtggagaatgatggtatgctttctgagttaacatgttgaactgttttgcttttctaaaaattttcctagtaacattttcttgatgatatgagagtggatatcaatgcctcacagaaacaagaggtggaacatgtgaatgaatcgtcttggaactagattatgagcactggttctttttaaagggatgtgcaagaggcagccttggcaagaaaacttgctgcataatcttacatggactaaagatgaaactttaaaccgcaaatcagctttgagtgaactttgacagaagatgtttcgacagttttatctctggacatgtttagcttcagggatcatcctgggctctctctttgaaatctgcttgggccagtatgatgatgattgcaaactagctaggggaggaccaccagctaccatagttgctattgatgaagaaagtcggaatggtacaattctggtggacaacatgctgatcaaagggactgctggaggaccagaccccaccatagaactttctttaaaggataatgtggattactgggtgttgatggatcctgttaagcaaatgcttttcctgaacagcaccggaagagttctggatagagatccaccgatgaacatacactccattgtggtgcaggtccagtgcatcaacaaaaaagtgggcactattatctaccatgaagtgcgaatagtggtgagagacaggaatgacaactcacccactttcaagcatgaaagctactatgccacagtgaatgagctcactccagttggtaccacaatattcacaggattttcaggagacaatggagctacagatatagatgatggaccaaatggacagatagagtatgttattcagtataatccagatgatccgacatccaatgacacctttgaaattcccctaatgttgactggaaatatagtgttaaggaagaggctcaactatgaagataagactcgctactttgtcataatccaagctaatgaccgtgcccaaaatctgaatgagaggcgaaccaccaccaccactctcacagtggatgttctggatggagatgacttgggtccaatgtttcttccttgtgtccttgtgccaaacactcgtgattgccgtccactcacttatcaagctgccatacctgagttgagaactccggaagaactgaaccccattattgttacgccaccaatccaagccattgatcaggaccggaatattcaaccgccatcagataggccaggaatcctctattccatccttgttgggactcctgaggattacccacgatttttccatatgcatcctaggacagcagaacttagtctcctggagccagtaaacagagactttcaccagaaatttgatttggttattaaggctgaacaagacaatggtcatcctcttcctgcctttgccggtctacacattgaaatactggatgaaaacaatcaaagtccatattttacaatgcccagttatcaaggctatatcctggaatctgccccagtgggagcaaccatttcggacagtctcaatttgacttcacctttaagaatagtagctctggacaaggacatagaagatgaagagccaaagaaaattaaaaaaccaaaggttgaaattagagagcctagtgaggaggaagaagtagttgtaactatcgaaaaaccaccagcagctgagcctacatacacaacatggaagagagccagaatattccccatgatttttaagaaagttagaggattagctgataaaagaggaatcgttgaccttgagggtgaagagtggcagagacgccttgaggaagaagataaagattatttgaaactcactctggaccaagaggaagcaacagaaagcactgtagaatcagaggaggaatcctccagcgactatactgaatacagtgaagaagagtctgagttcagtgagtctgagactacagaagaggaatctgagtcagagacaccctctgaggaggaggagagttccacccctgaatcagaagaatcggaatccacagagtcagaaggagaaaaagcaaggaaaaacattgtgcttgcaagaagaaggcccatggttgaggaggtcaaggaagtcaagggtaggaaagaggagccacaagaagaacaaaaagaacctaagatggaagaagaagaacactcagaagaagaagaaagtggaccagcccctgtggaagaaagtacagaccctgaagctcaagatatccctgaagagggcagtgcagaatcagcttcggtggaaggaggtgtggaaagtgaggaggaatcagaatcaggtagtagtagcagtagtagcgaaagtcagtctggaggtccatggggctatcaggtaccagcgtatgacagaagcaagaatgcaaaccaaaagaagtcgccaggagcaaactctgaaggttacaacacagcactttgaaagagatcacagtaggtggaagttttgctgtgatgagtgctctcgtgtgcagtgccttctgtgtgttctccaaagtgacacttgaaagggaggaaattgatcaagattttgatatgacttatgatcagaagcatgccagaaaagtgaatatatatgttgtccaaatccatttgtatattagactgtattagagtaaaactgactaatccttcctatattagtaaatcagaacacatgcaatcagctaatcaatatttaatatttactggtaggatttttgttaatgcaatgtggcattatgtattatcagtgacactctgtctattggaatggatggcatatatatatatatatatatatacacacacacactatatatgtttttatatcatctttcaaaataaatactaagacaagcttcaacaaattatatctttaacagtcgtctacttttgcatatatgtacgtttcaactggcaaaggtattataaaaactatcatgaacatgttcaaataagtaagtttgtatctgcaacttcaagtattaggaattcaatgaaataacatttttcaattaattaaaagttattacagcttattttctgttattattagctacagt

SEQ ID NO: 15010 - DNA, 6425 bp, Homo sapiens
  source 1..6425: mol_type = unassigned DNA
caacgtgctgagctaatagcgacagatagagggcagacagattcctgctagcagcttagtgttagttgcttgtggtaactaaggcaggtggcatacatctcagaacgtggagaatgatggtatgctttctgagttaacatgttgaactgttttgcttttctaaaaattttcctagtaacattttcttgatgatatgagagtggatatcaatgcctcacagaaacaagaggtggaacatgtgaatgaatcgtcttggaactagattatgagcactggttctttttaaagggatgtgcaagaggcagccttggcaagaaaacttgctgcataatcttacatggactaaagatgaaactttaaaccgcaaatcagctttgagtgaactttgacagaagatgtttcgacagttttatctctggacatgtttagcttcagggatcatcctgggctctctctttgaaatctgcttgggccagtatgatgatgattgcaaactagctaggggaggaccaccagctaccatagttgctattgatgaagaaagtcggaatggtacaattctggtggacaacatgctgatcaaagggactgctggaggaccagaccccaccatagaactttctttaaaggataatgtggattactgggtgttgatggatcctgttaagcaaatgcttttcctgaacagcaccggaagagttctggatagagatccaccgatgaacatacactccattgtggtgcaggtccagtgcatcaacaaaaaagtgggcactattatctaccatgaagtgcgaatagtggtgagagacaggaatgacaactcacccactttcaagcatgaaagctactatgccacagtgaatgagctcactccagttggtaccacaatattcacaggattttcaggagacaatggagctacagatatagatgatggaccaaatggacagatagagtatgttattcagtataatccagatgatccgacatccaatgacacctttgaaattcccctaatgttgactggaaatatagtgttaaggaagaggctcaactatgaagataagactcgctactttgtcataatccaagctaatgaccgtgcccaaaatctgaatgagaggcgaaccaccaccaccactctcacagtggatgttctggatggagatgacttgggtccaatgtttcttccttgtgtccttgtgccaaacactcgtgattgccgtccactcacttatcaagctgccatacctgagttgagaactccggaagaactgaaccccattattgttacgccaccaatccaagccattgatcaggaccggaatattcaaccgccatcagataggccaggaatcctctattccatccttgttgggactcctgaggattacccacgatttttccatatgcatcctaggacagcagaacttagtctcctggagccagtaaacagagactttcaccagaaatttgatttggttattaaggctgaacaagacaatggtcatcctcttcctgcctttgccggtctacacattgaaatactggatgaaaacaatcaaagtccatattttacaatgcccagttatcaaggctatatcctggaatctgccccagtgggagcaaccatttcggacagtctcaatttgacttcacctttaagaatagtagctctggacaaggacatagaagatacaaaagacccagagcttcacctttttctgaatgactacacctcagtcttcaccgtcacacagactggtattactcgctacctcaccttacttcaaccagtggacagggaagaacagcaaacttacaccttttcgataacagcatttgatggtgtacaagaaagtgagccagtcatcgtcaatattcaagtgatggatgcaaatgataacacgccaaccttccctgaaatatcctatgatgtgtatgtttatacagacatgagacctggggacagtgtcatacagctcactgcagtcgacgcagacgaagggtcaaatggggagatcacatatgaaatccttgttggggctcagggagacttcatcatcaataaaacaacagggcttatcaccatcgctccaggggtggaaatgatagtcgggcggacttacgcactcacggtccaagcagcggataatgctcctcctgcagagcgaaggaactccatctgcactgtgtatattgaagtgcttccaccaaataatcaaagccctcctcgcttcccacagctgatgtatagccttgaaattagtgaagccatgagggttggtgctgttttattaaatctacaggcaactgatcgagagggagactcaataacatatgccattgagaatggagatcctcagagagtttttaatctttcagaaaccacggggattctaaccttagggaaagcactggacagggaaagcactgatcgctacattctgatcatcacagcttcagatggcaggccagatgggacctcaactgccacagtaaacatagtggtgacagatgtcaatgacaatgctccagtgtttgatccttatctgccaagaaatttatctgtggtggaagaagaagccaatgcctttgtgggtcaagtaaaagcaacagaccctgatgctggaataaatggtcaagtgcactacagtttgggtaactttaataatctttttcgtatcacatccaatgggagcatttacacagcagtgaagcttaacagagaagtcagggactactatgaacttgttgttgtggcaacagatggagcagtacaccctcgtcattcaactctaaccttggccatcaaggttttggacattgatgataacagtcctgtgttcaccaattcaacatacactgtccttgttgaagagaatttgccagctgggactaccatccttcaaatagaggccaaagatgtcgaccttggagcaaatgtgtcttaccggataagaagcccagaagtgaagcacttttttgcactacatccatttacaggagaactatcgcttttaaggagtttagattatgaggcatttccagaccaagaagcaagtatcacttttctggtagaggcctttgatatttatggaacaatgccacctggtattgctactgtcacagtgattgtaaaggatatgaatgattatcctcctgtctttagtaaacgaatatacaaagggatggtggctccggatgcagtcaagggtacacctatcacaacagtttatgctgaagatgcagaccctcctggattacctgcaagtcgtgtgaggtatagagtagatgatgtacagtttccttaccctgccagtatttttgaagtggaagaagattctggaagagtaataacacgagtcaatcttaatgaagaacctacaacaatttttaagttggtggtggttgcttttgatgatggggagcctgtgatgtccagcagtgccacagtgaagattcttgtcttacatcctggtgagatcccacgcttcacacaggaggaatatagacctcctccagtaagtgaacttgccaccaaagggaccatggttggtgtaatttctgctgctgccattaatcaaagtattgtgtactccattgtttcaggaaatgaagaagatacatttggaattaataacatcacaggtgttatctatgtgaatggacctctggattatgagaccaggacaagctatgtacttcgagtccaagctgattccctggaagtggtccttgccaatctccgagttccttcaaaaagcaatacagctaaagtatacattgagattcaggatgaaaataatcatcccccagtgtttcagaaaaaattctacatcggaggtgtatctgaagatgcaagaatgtttacttctgtactcagagtgaaggctactgataaagatactggcaattatagtgtcatggcctacagactcataataccaccaattaaagagggaaaagaaggatttgtagtggaaacatatacagggcttatcaaaactgctatgctcttccataatatgaggagatcctacttcaagtttcaagttattgcaactgacgactatgggaagggactgagcggcaaagccgatgtactcgtctccgtggtcaatcagctggatatgcaagtcattgtttccaatgtgcctcctactctagtggaaaaaaagatagaagatcttacagagatcttggatcgctatgttcaggaacaaattcctggtgccaaggtcgtagtggagtccattggagctcgccggcatggagatgccttttccctagaagattacaccaaatgtgacttgactgtctatgcaattgacccccaaaccaacagagccatcgatagaaatgagctttttaaatttttggatggcaaactacttgatatcaataaagactttcagccgtattatggggaaggaggacgcattctggagatccggactccagaggcagtgaccagcattaaaaagagaggagaaagtctaggatacacagaaggggccttgttggctctggccttcatcatcatcctctgctgcattcctgccatcttggtggttttggtcagctacagacagtttaaagtacgtcaagctgagtgtacaaagactgcacgaattcaggccgcattacccgcggctaaaccagcagtgccggctcctgcaccagtggcagcgcccccgccgccgccgccgcctccgccaggtgcgcatctctatgaagaacttggagacagctcaatgcataagaattatccatggagtctggaattgatcctggccaggaatatggacaagattattacagttatgagcatgggtatgaaatgcctcaatatgggagtcgccgtcgattgttaccaccagctggacaggaggaatatggtgaggtggttggtgaagctgaggaagaatatgaggaggaagaggaagagccaaagaaaattaaaaaaccaaaggttgaaattagagagcctagtgaggaggaagaagtagttgtaactatcgaaaaaccaccagcagctgagcctacatacacaacatggaagagagccagaatattccccatgatttttaagaaagttagaggattagctgataaaagaggaatcgttgaccttgagggtgaagagtggcagagacgccttgaggaagaagataaagattatttgaaactcactctggaccaagaggaagcaacagaaagcactgtagaatcagaggaggaatcctccagcgactatactgaatacagtgaagaagagtctgagttcagtgagtctgagactacagaagaggaatctgagtcagagacaccctctgaggaggaggagagttccacccctgaatcagaagaatcggaatccacagagtcagaaggagaaaaagcaaggaaaaacattgtgcttgcaagaagaaggcccatggttgaggaggtcaaggaagtcaagggtaggaaagaggagccacaagaagaacaaaaagaacctaagatggaagaagaagaacactcagaagaagaagaaagtggaccagcccctgtggaagaaagtacagaccctgaagctcaagatatccctgaagagggcagtgcagaatcagcttcggtggaaggaggtgtggaaagtgaggaggaatcagaatcaggtagtagtagcagtagtagcgaaagtcagtctggaggtccatggggctatcaggtaccagcgtatgacagaagcaagaatgcaaaccaaaagaagtcgccaggagcaaactctgaaggttacaacacagcactttgaaagagatcacagtaggtggaagttttgctgtgatgagtgctctcgtgtgcagtgccttctgtgtgttctccaaagtgacacttgaaagggaggaaattgatcaagattttgatatgacttatgatcagaagcatgccagaaaagtgaatatatatgttgtccaaatccatttgtatattagactgtattagagtaaaactgactaatccttcctatattagtaaatcagaacacatgcaatcagctaatcaatatttaatatttactggtaggatttttgttaatgcaatgtggcattatgtattatcagtgacactctgtctattggaatggatggcatatatatatatatatatatatacacacacacactatatatgtttttatatcatctttcaaaataaatactaagacaagcttcaacaaattatatctttaacagtcgtctacttttgcatatatgtacgtttcaactggcaaaggtattataaaaactatcatgaacatgttcaaataagtaagtttgtatctgcaacttcaagtattaggaattcaatgaaataacatttttcaattaattaaaagttattacagcttattttctgttattattagctacagt

SEQ ID NO: 15011 - DNA, 3948 bp, Homo sapiens
  source 1..3948: mol_type = unassigned DNA
caacgtgctgagctaatagcgacagatagagggcagacagattcctgctagcagcttagtgttagttgcttgtggtaactaaggcaggtggcatacatctcagaacgtggagaatgatggtatgctttctgagttaacatgttgaactgttttgcttttctaaaaattttcctagtaacattttcttgatgatatgagagtggatatcaatgcctcacagaaacaagaggtggaacatgtgaatgaatcgtcttggaactagattatgagcactggttctttttaaagggatgtgcaagaggcagccttggcaagaaaacttgctgcataatcttacatggactaaagatgaaactttaaaccgcaaatcagctttgagtgaactttgacagaagatgtttcgacagttttatctctggacatgtttagcttcagggatcatcctgggctctctctttgaaatctgcttgggccagtatgatgatgattgcaaactagctaggggaggaccaccagctaccatagttgctattgatgaagaaagtcggaatggtacaattctggtggacaacatgctgatcaaagggactgctggaggaccagaccccaccatagaactttctttaaaggataatgtggattactgggtgttgatggatcctgttaagcaaatgcttttcctgaacagcaccggaagagttctggatagagatccaccgatgaacatacactccattgtggtgcaggtccagtgcatcaacaaaaaagtgggcactattatctaccatgaagtgcgaatagtggtgagagacaggaatgacaactcacccactttcaagcatgaaagctactatgccacagtgaatgagctcactccagttggtaccacaatattcacaggattttcaggagacaatggagctacagatatagatgatggaccaaatggacagatagagtatgttattcagtataatccagatgatccgacatccaatgacacctttgaaattcccctaatgttgactggaaatatagtgttaaggaagaggctcaactatgaagataagactcgctactttgtcataatccaagctaatgaccgtgcccaaaatctgaatgagaggcgaaccaccaccaccactctcacagtggatgttctggatggagatgacttgggtccaatgtttcttccttgtgtccttgtgccaaacactcgtgattgccgtccactcacttatcaagctgccatacctgagttgagaactccggaagaactgaaccccattattgttacgccaccaatccaagccattgatcaggaccggaatattcaaccgccatcagataggccaggaatcctctattccatccttgttgggactcctgaggattacccacgatttttccatatgcatcctaggacagcagaacttagtctcctggagccagtaaacagagactttcaccagaaatttgatttggttattaaggctgaacaagacaatggtcatcctcttcctgcctttgccggtctacacattgaaatactggatgaaaacaatcaaagtccatattttacaatgcccagttatcaaggctatatcctggaatctgccccagtgggagcaaccatttcggacagtctcaatttgacttcacctttaagaatagtagctctggacaaggacatagaagatacaaaagacccagagcttcacctttttctgaatgactacacctcagtcttcaccgtcacacagactggtattactcgctacctcaccttacttcaaccagtggacagggaagaacagcaaacttacaccttttcgataacagcatttgatggtgtacaagaaagtgagccagtcatcgtcaatattcaagtgatggatgcaaatgataacacgccaaccttccctgaaatatcctatgatgtgtatgtttatacagacatgagacctggggacagtgtcatacagctcactgcagtcgacgcagacgaagggtcaaatggggagatcacatatgaaatccttgttggggctcagggagacttcatcatcaataaaacaacagggcttatcaccatcgctccaggggtggaaatgatagtcgggcggacttacgcactcacggtccaagcagcggataatgctcctcctgcagagcgaaggaactccatctgcactgtgtatattgaagtgcttccaccaaataatcaaagccctcctcgcttcccacagctgatgtatagccttgaaattagtgaagccatgagggttggtgctgttttattaaatctacaggcaactgatcgagagggagactcaataacatatgccattgagaatggagatcctcagagagtttttaatctttcagaaaccacggggattctaaccttagggaaagcactggacagggaaagcactgatcgctacattctgatcatcacagcttcagatggcaggccagatggggaagagccaaagaaaattaaaaaaccaaaggttgaaattagagagcctagtgaggaggaagaagtagttgtaactatcgaaaaaccaccagcagctgagcctacatacacaacatggaagagagccagaatattccccatgatttttaagaaagttagaggattagctgataaaagaggaatcgttgaccttgagggtgaagagtggcagagacgccttgaggaagaagataaagattatttgaaactcactctggaccaagaggaagcaacagaaagcactgtagaatcagaggaggaatcctccagcgactatactgaatacagtgaagaagagtctgagttcagtgagtctgagactacagaagaggaatctgagtcagagacaccctctgaggaggaggagagttccacccctgaatcagaagaatcggaatccacagagtcagaaggagaaaaagcaaggaaaaacattgtgcttgcaagaagaaggcccatggttgaggaggtcaaggaagtcaagggtaggaaagaggagccacaagaagaacaaaaagaacctaagatggaagaagaagaacactcagaagaagaagaaagtggaccagcccctgtggaagaaagtacagaccctgaagctcaagatatccctgaagagggcagtgcagaatcagcttcggtggaaggaggtgtggaaagtgaggaggaatcagaatcaggtagtagtagcagtagtagcgaaagtcagtctggaggtccatggggctatcaggtaccagcgtatgacagaagcaagaatgcaaaccaaaagaagtcgccaggagcaaactctgaaggttacaacacagcactttgaaagagatcacagtaggtggaagttttgctgtgatgagtgctctcgtgtgcagtgccttctgtgtgttctccaaagtgacacttgaaagggaggaaattgatcaagattttgatatgacttatgatcagaagcatgccagaaaagtgaatatatatgttgtccaaatccatttgtatattagactgtattagagtaaaactgactaatccttcctatattagtaaatcagaacacatgcaatcagctaatcaatatttaatatttactggtaggatttttgttaatgcaatgtggcattatgtattatcagtgacactctgtctattggaatggatggcatatatatatatatatatatatacacacacacactatatatgtttttatatcatctttcaaaataaatactaagacaagcttcaacaaattatatctttaacagtcgtctacttttgcatatatgtacgtttcaactggcaaaggtattataaaaactatcatgaacatgttcaaataagtaagtttgtatctgcaacttcaagtattaggaattcaatgaaataacatttttcaattaattaaaagttattacagcttattttctgtt

SEQ ID NO: 15012 - DNA, 5401 bp, Homo sapiens
  source 1..5401: mol_type = unassigned DNA
caacgtgctgagctaatagcgacagatagagggcagacagattcctgctagcagcttagtgttagttgcttgtggtaactaaggcaggtggcatacatctcagaacgtggagaatgatggtatgctttctgagttaacatgttgaactgttttgcttttctaaaaattttcctagtaacattttcttgatgatatgagagtggatatcaatgcctcacagaaacaagaggtggaacatgtgaatgaatcgtcttggaactagattatgagcactggttctttttaaagggatgtgcaagaggcagccttggcaagaaaacttgctgcataatcttacatggactaaagatgaaactttaaaccgcaaatcagctttgagtgaactttgacagaagatgtttcgacagttttatctctggacatgtttagcttcagggatcatcctgggctctctctttgaaatctgcttgggccagtatgatgatggctgaacaagacaatggtcatcctcttcctgcctttgccggtctacacattgaaatactggatgaaaacaatcaaagtccatattttacaatgcccagttatcaaggctatatcctggaatctgccccagtgggagcaaccatttcggacagtctcaatttgacttcacctttaagaatagtagctctggacaaggacatagaagatgttccacccagtggagttcctacaaaagacccagagcttcacctttttctgaatgactacacctcagtcttcaccgtcacacagactggtattactcgctacctcaccttacttcaaccagtggacagggaagaacagcaaacttacaccttttcgataacagcatttgatggtgtacaagaaagtgagccagtcatcgtcaatattcaagtgatggatgcaaatgataacacgccaaccttccctgaaatatcctatgatgtgtatgtttatacagacatgagacctggggacagtgtcatacagctcactgcagtcgacgcagacgaagggtcaaatggggagatcacatatgaaatccttgttggggctcagggagacttcatcatcaataaaacaacagggcttatcaccatcgctccaggggtggaaatgatagtcgggcggacttacgcactcacggtccaagcagcggataatgctcctcctgcagagcgaaggaactccatctgcactgtgtatattgaagtgcttccaccaaataatcaaagccctcctcgcttcccacagctgatgtatagccttgaaattagtgaagccatgagggttggtgctgttttattaaatctacaggcaactgatcgagagggagactcaataacatatgccattgagaatggagatcctcagagagtttttaatctttcagaaaccacggggattctaaccttagggaaagcactggacagggaaagcactgatcgctacattctgatcatcacagcttcagatggcaggccagatgggacctcaactgccacagtaaacatagtggtgacagatgtcaatgacaatgctccagtgtttgatccttatctgccaagaaatttatctgtggtggaagaagaagccaatgcctttgtgggtcaagtaaaagcaacagaccctgatgctggaataaatggtcaagtgcactacagtttgggtaactttaataatctttttcgtatcacatccaatgggagcatttacacagcagtgaagcttaacagagaagtcagggactactatgaacttgttgttgtggcaacagatggagcagtacaccctcgtcattcaactctaaccttggccatcaaggttttggacattgatgataacagtcctgtgttcaccaattcaacatacactgtccttgttgaagagaatttgccagctgggactaccatccttcaaatagaggccaaagatgtcgaccttggagcaaatgtgtcttaccggataagaagcccagaagtgaagcacttttttgcactacatccatttacaggagaactatcgcttttaaggagtttagattatgaggcatttccagaccaagaagcaagtatcacttttctggtagaggcctttgatatttatggaacaatgccacctggtattgctactgtcacagtgattgtaaaggatatgaatgattatcctcctgtctttagtaaacgaatatacaaagggatggtggctccggatgcagtcaagggtacacctatcacaacagtttatgctgaagatgcagaccctcctggattacctgcaagtcgtgtgaggtatagagtagatgatgtacagtttccttaccctgccagtatttttgaagtggaagaagattctggaagagtaataacacgagtcaatcttaatgaagaacctacaacaatttttaagttggtggtggttgcttttgatgatggggagcctgtgatgtccagcagtgccacagtgaagattcttgtcttacatcctggtgagatcccacgcttcacacaggaggaatatagacctcctccagtaagtgaacttgccaccaaagggaccatggttggtgtaatttctgctgctgccattaatcaaagtattgtgtactccattgtttcaggaaatgaagaagatacatttggaattaataacatcacaggtgttatctatgtgaatggacctctggattatgagaccaggacaagctatgtacttcgagtccaagctgattccctggaagtggtccttgccaatctccgagttccttcaaaaagcaatacagctaaagtatacattgagattcaggatgaaaataatcatcccccagtgtttcagaaaaaattctacatcggaggtgtatctgaagatgcaagaatgtttacttctgtactcagagtgaaggctactgataaagatactggcaattatagtgtcatggcctacagactcataataccaccaattaaagagggaaaagaaggatttgtagtggaaacatatacagggcttatcaaaactgctatgctcttccataatatgaggagatcctacttcaagtttcaagttattgcaactgacgactatgggaagggactgagcggcaaagccgatgtactcgtctccgtggtcaatcagctggatatgcaagtcattgtttccaatgtgcctcctactctagtggaaaaaaagatagaagatcttacagagatcttggatcgctatgttcaggaacaaattcctggtgccaaggtcgtagtggagtccattggagctcgccggcatggagatgccttttccctagaagattacaccaaatgtgacttgactgtctatgcaattgacccccaaaccaacagagccatcgatagaaatgagctttttaaatttttggatggcaaactacttgatatcaataaagactttcagccgtattatggggaaggaggacgcattctggagatccggactccagaggcagtgaccagcattaaaaagagaggagaaagtctaggatacacagaaggggccttgttggctctggccttcatcatcatcctctgctgcattcctgccatcttggtggttttggtcagctacagacagtttaaagtacgtcaagctgagtgtacaaagactgcacgaattcaggccgcattacccgcggctaaaccagcagtgccggctcctgcaccagtggcagcgcccccgccgccgccgccgcctccgccaggtgcgcatctctatgaagaacttggagacagctcaatgcataagaattatccatggagtctggaattgatcctggccaggaatatggacaagattattacagttatgagcatgggtatgaaatgcctcaatatgggagtcgccgtcgattgttaccaccagctggacaggaggaatatggtgaggtggttggtgaagctgaggaagaatatgaggaggaagaggaagagccaaagaaaattaaaaaaccaaaggttgaaattagagagcctagtgaggaggaagaagtagttgtaactatcgaaaaaccaccagcagctgagcctacatacacaacatggaagagagccagaatattccccatgatttttaagaaagttagaggattagctgataaaagaggaatcgttgaccttgagggtgaagagtggcagagacgccttgaggaagaagataaagattatttgaaactcactctggaccaagaggaagcaacagaaagcactgtagaatcagaggaggaatcctccagcgactatactgaatacagtgaagaagagtctgagttcagtgagtctgagactacagaagaggaatctgagtcagagacaccctctgaggaggaggagagttccacccctgaatcagaagaatcggaatccacagagtcagaaggagaaaaagcaaggaaaaacattgtgcttgcaagaagaaggcccatggttgaggaggtcaaggaagtcaagggtaggaaagaggagccacaagaagaacaaaaagaacctaagatggaagaagaagaacactcagaagaagaagaaagtggaccagcccctgtggaagaaagtacagaccctgaagctcaagatatccctgaagagggcagtgcagaatcagcttcggtggaaggaggtgtggaaagtgaggaggaatcagaatcaggtagtagtagcagtagtagcgaaagtcagtctggaggtccatggggctatcaggtaccagcgtatgacagaagcaagaatgcaaaccaaaagaagtcgccaggagcaaactctgaaggttacaacacagcactttgaaagagatcacagtaggtggaagttttgctgtgatgagtgctctcgtgtgcagtgccttctgtgtgttctccaaagtgacacttgaaagggaggaaattgatcaagattttgatatgacttatgatcagaagcatgccagaaaagtgaatatatatgttgtccaaatccatttgtatattagactgtattagagtaaaactgactaatccttcctatattagtaaatcagaacacatgcaatcagctaatcaatatttaatatttactggtaggatttttgttaatgcaatgtggcattatgtattatcagtgacactctgtctattggaatggatggcatatatatatatatatatatatacacacacacactatatatgtttttatatcatctttcaaaataaatactaagacaagcttcaacaaattatatctttaacagtcgtctacttttgcatatatgtacgtttcaactggcaaaggtattataaaaactatcatgaacatgttcaaataagtaagtttgtatctgcaacttcaagtattaggaattcaatgaaataacatttttcaattaattaaaa

SEQ ID NO: 15013 - DNA, 3357 bp, Homo sapiens
  source 1..3357: mol_type = unassigned DNA
caacgtgctgagctaatagcgacagatagagggcagacagattcctgctagcagcttagtgttagttgcttgtggtaactaaggcaggtggcatacatctcagaacgtggagaatgatggtatgctttctgagttaacatgttgaactgttttgcttttctaaaaattttcctagtaacattttcttgatgatatgagagtggatatcaatgcctcacagaaacaagaggtggaacatgtgaatgaatcgtcttggaactagattatgagcactggttctttttaaagggatgtgcaagaggcagccttggcaagaaaacttgctgcataatcttacatggactaaagatgaaactttaaaccgcaaatcagctttgagtgaactttgacagaagatgtttcgacagttttatctctggacatgtttagcttcagggatcatcctgggctctctctttgaaatctgcttgggccagtatgatgatgattgcaaactagctaggggaggaccaccagctaccatagttgctattgatgaagaaagtcggaatggtacaattctggtggacaacatgctgatcaaagggactgctggaggaccagaccccaccatagaactttctttaaaggataatgtggattactgggtgttgatggatcctgttaagcaaatgcttttcctgaacagcaccggaagagttctggatagagatccaccgatgaacatacactccattgtggtgcaggtccagtgcatcaacaaaaaagtgggcactattatctaccatgaagtgcgaatagtggtgagagacaggaatgacaactcacccactttcaagcatgaaagctactatgccacagtgaatgagctcactccagttggtaccacaatattcacaggattttcaggagacaatggagctacagatatagatgatggaccaaatggacagatagagtatgttattcagtataatccagatgatccgacatccaatgacacctttgaaattcccctaatgttgactggaaatatagtgttaaggaagaggctcaactatgaagataagactcgctactttgtcataatccaagctaatgaccgtgcccaaaatctgaatgagaggcgaaccaccaccaccactctcacagtggatgttctggatggagatgacttgggtccaatgtttcttccttgtgtccttgtgccaaacactcgtgattgccgtccactcacttatcaagctgccatacctgagttgagaactccggatcttggatcgctatgttcaggaacaaattcctggtgccaaggtcgtagtggagtccattggagctcgccggcatggagatgccttttccctagaagattacaccaaatgtgacttgactgtctatgcaattgacccccaaaccaacagagccatcgatagaaatgagctttttaaatttttggatggcaaactacttgatatcaataaagactttcagccgtattatggggaaggaggacgcattctggagatccggactccagaggcagtgaccagcattaaaaagagaggagaaagtctaggatacacagaaggggccttgttggctctggccttcatcatcatcctctgctgcattcctgccatcttggtggttttggtcagctacagacagtttaaagtacgtcaagctgagtgtacaaagactgcacgaattcaggccgcattacccgcggctaaaccagcagtgccggctcctgcaccagtggcagcgcccccgccgccgccgccgcctccgccaggtgcgcatctctatgaagaacttggagacagctcaatgtatgaaatgcctcaatatgggagtcgccgtcgattgttaccaccagctggacaggaggaatatggtgaggtggttggtgaagctgaggaagaatatgaggaggaagaggaagagccaaagaaaattaaaaaaccaaaggttgaaattagagagcctagtgaggaggaagaagtagttgtaactatcgaaaaaccaccagcagctgagcctacatacacaacatggaagagagccagaatattccccatgatttttaagaaagttagaggattagctgataaaagaggaatcgttgaccttgagggtgaagagtggcagagacgccttgaggaagaagataaagattatttgaaactcactctggaccaagaggaagcaacagaaagcactgtagaatcagaggaggaatcctccagcgactatactgaatacagtgaagaagagtctgagttcagtgagtctgagactacagaagaggaatctgagtcagagacaccctctgaggaggaggagagttccacccctgaatcagaagaatcggaatccacagagtcagaaggagaaaaagcaaggaaaaacattgtgcttgcaagaagaaggcccatggttgaggaggtcaaggaagtcaagggtaggaaagaggagccacaagaagaacaaaaagaacctaagatggaagaagaagaacactcagaagaagaagaaagtggaccagcccctgtggaagaaagtacagaccctgaagctcaagatatccctgaagagggcagtgcagaatcagcttcggtggaaggaggtgtggaaagtgaggaggaatcagaatcaggtagtagtagcagtagtagcgaaagtcagtctggaggtccatggggctatcaggtaccagcgtatgacagaagcaagaatgcaaaccaaaagaagtcgccaggagcaaactctgaaggttacaacacagcactttgaaagagatcacagtaggtggaagttttgctgtgatgagtgctctcgtgtgcagtgccttctgtgtgttctccaaagtgacacttgaaagggaggaaattgatcaagattttgatatgacttatgatcagaagcatgccagaaaagtgaatatatatgttgtccaaatccatttgtatattagactgtattagagtaaaactgactaatccttcctatattagtaaatcagaacacatgcaatcagctaatcaatatttaatatttactggtaggatttttgttaatgcaatgtggcattatgtattatcagtgacactctgtctattggaatggatggcatatatatatatatatatatatacacacacacactatatatgtttttatatcatctttcaaaataaatactaagacaagcttcaacaaattatatctttaacagtcgtctacttttgcatatatgtacgtttcaactggcaaaggtattataaaaactatcatgaacatgttcaaataagtaagtttgtatctgcaacttcaagtattaggaattcaatgaaa

SEQ ID NO: 15014 - DNA, 6329 bp, Homo sapiens
  source 1..6329: mol_type = unassigned DNA
caacgtgctgagctaatagcgacagatagagggcagacagattcctgctagcagcttagtgttagttgcttgtggtaactaaggcaggtggcatacatctcagaacgtggagaatgatggtatgctttctgagttaacatgttgaactgttttgcttttctaaaaattttcctagtaacattttcttgatgatatgagagtggatatcaatgcctcacagaaacaagaggtggaacatgtgaatgaatcgtcttggaactagattatgagcactggttctttttaaagggatgtgcaagaggcagccttggcaagaaaacttgctgcataatcttacatggactaaagatgaaactttaaaccgcaaatcagctttgagtgaactttgacagaagatgtttcgacagttttatctctggacatgtttagcttcagggatcatcctgggctctctctttgaaatctgcttgggccagtatgatgatgactggcaatatgaggattgcaaactagctaggggaggaccaccagctaccatagttgctattgatgaagaaagtcggaatggtacaattctggtggacaacatgctgatcaaagggactgctggaggaccagaccccaccatagaactttctttaaaggataatgtggattactgggtgttgatggatcctgttaagcaaatgcttttcctgaacagcaccggaagagttctggatagagatccaccgatgaacatacactccattgtggtgcaggtccagtgcatcaacaaaaaagtgggcactattatctaccatgaagtgcgaatagtggtgagagacaggaatgacaactcacccactttcaagcatgaaagctactatgccacagtgaatgagctcactccagttggtaccacaatattcacaggattttcaggagacaatggagctacagatatagatgatggaccaaatggacagatagagtatgttattcagtataatccagatgatccgacatccaatgacacctttgaaattcccctaatgttgactggaaatatagtgttaaggaagaggctcaactatgaagataagactcgctactttgtcataatccaagctaatgaccgtgcccaaaatctgaatgagaggcgaaccaccaccaccactctcacagtggatgttctggatggagatgacttgggtccaatgtttcttccttgtgtccttgtgccaaacactcgtgattgccgtccactcacttatcaagctgccatacctgagttgagaactccggaagaactgaaccccattattgttacgccaccaatccaagccattgatcaggaccggaatattcaaccgccatcagataggccaggaatcctctattccatccttgttgggactcctgaggattacccacgatttttccatatgcatcctaggacagcagaacttagtctcctggagccagtaaacagagactttcaccagaaatttgatttggttattaaggctgaacaagacaatggtcatcctcttcctgcctttgccggtctacacattgaaatactggatgaaaacaatcaaagtccatattttacaatgcccagttatcaaggctatatcctggaatctgccccagtgggagcaaccatttcggacagtctcaatttgacttcacctttaagaatagtagctctggacaaggacatagaagatgttccacccagtggagttcctacaaaagacccagagcttcacctttttctgaatgactacacctcagtcttcaccgtcacacagactggtattactcgctacctcaccttacttcaaccagtggacagggaagaacagcaaacttacaccttttcgataacagcatttgatggtgtacaagaaagtgagccagtcatcgtcaatattcaagtgatggatgcaaatgataacacgccaaccttccctgaaatatcctatgatgtgtatgtttatacagacatgagacctggggacagtgtcatacagctcactgcagtcgacgcagacgaagggtcaaatggggagatcacatatgaaatccttgttggggctcagggagacttcatcatcaataaaacaacagggcttatcaccatcgctccaggggtggaaatgatagtcgggcggacttacgcactcacggtccaagcagcggataatgctcctcctgcagagcgaaggaactccatctgcactgtgtatattgaagtgcttccaccaaataatcaaagccctcctcgcttcccacagctgatgtatagccttgaaattagtgaagccatgagggttggtgctgttttattaaatctacaggcaactgatcgagagggagactcaataacatatgccattgagaatggagatcctcagagagtttttaatctttcagaaaccacggggattctaaccttagggaaagcactggacagggaaagcactgatcgctacattctgatcatcacagcttcagatggcaggccagatgggacctcaactgccacagtaaacatagtggtgacagatgtcaatgacaatgctccagtgtttgatccttatctgccaagaaatttatctgtggtggaagaagaagccaatgcctttgtgggtcaagtaaaagcaacagaccctgatgctggaataaatggtcaagtgcactacagtttgggtaactttaataatctttttcgtatcacatccaatgggagcatttacacagcagtgaagcttaacagagaagtcagggactactatgaacttgttgttgtggcaacagatggagcagtacaccctcgtcattcaactctaaccttggccatcaaggttttggacattgatgataacagtcctgtgttcaccaattcaacatacactgtccttgttgaagagaatttgccagctgggactaccatccttcaaatagaggccaaagatgtcgaccttggagcaaatgtgtcttaccggataagaagcccagaagtgaagcacttttttgcactacatccatttacaggagaactatcgcttttaaggagtttagattatgaggcatttccagaccaagaagcaagtatcacttttctggtagaggcctttgatatttatggaacaatgccacctggtattgctactgtcacagtgattgtaaaggatatgaatgattatcctcctgtctttagtaaacgaatatacaaagggatggtggctccggatgcagtcaagggtacacctatcacaacagtttatgctgaagatgcagaccctcctggattacctgcaagtcgtgtgaggtatagagtagatgatgtacagtttccttaccctgccagtatttttgaagtggaagaagattctggaagagtaataacacgagtcaatcttaatgaagaacctacaacaatttttaagttggtggtggttgcttttgatgatggggagcctgtgatgtccagcagtgccacagtgaagattcttgtcttacatcctggtgagatcccacgcttcacacaggaggaatatagacctcctccagtaagtgaacttgccaccaaagggaccatggttggtgtaatttctgctgctgccattaatcaaagtattgtgtactccattgtttcaggaaatgaagaagatacatttggaattaataacatcacaggtgttatctatgtgaatggacctctggattatgagaccaggacaagctatgtacttcgagtccaagctgattccctggaagtggtccttgccaatctccgagttccttcaaaaagcaatacagctaaagtatacattgagattcaggatgaaaataatcatcccccagtgtttcagaaaaaattctacatcggaggtgtatctgaagatgcaagaatgtttacttctgtactcagagtgaaggctactgataaagatactggcaattatagtgtcatggcctacagactcataataccaccaattaaagagggaaaagaaggatttgtagtggaaacatatacagggcttatcaaaactgctatgctcttccataatatgaggagatcctacttcaagtttcaagttattgcaactgacgactatgggaagggactgagcggcaaagccgatgtactcgtctccgtggtcaatcagctggatatgcaagtcattgtttccaatgtgcctcctactctagtggaaaaaaagatagaagatcttacagagatcttggatcgctatgttcaggaacaaattcctggtgccaaggtcgtagtggagtccattggagctcgccggcatggagatgccttttccctagaagattacaccaaatgtgacttgactgtctatgcaattgacccccaaaccaacagagccatcgatagaaatgagctttttaaatttttggatggcaaactacttgatatcaataaagactttcagccgtattatggggaaggaggacgcattctggagatccggactccagaggcagtgaccagcattaaaaagagaggagaaagtctaggatacacagaaggggccttgttggctctggccttcatcatcatcctctgctgcattcctgccatcttggtggttttggtcagctacagacagtttaaagtacgtcaagctgagtgtacaaagactgcacgaattcaggccgcattacccgcggctaaaccagcagtgccggctcctgcaccagtggcagcgcccccgccgccgccgccgcctccgccaggtgcgcatctctatgaagaacttggagacagctcaatgcataagtatgaaatgcctcaatatgggagtcgccgtcgattgttaccaccagctggacaggaggaatatggtgaggtggttggtgaagctgaggaagaatatgaggaggaagaggaagagccaaagaaaattaaaaaaccaaaggttgaaattagagagcctagtgaggaggaagaagtagttgtaactatcgaaaaaccaccagcagctgagcctacatacacaacatggaagagagccagaatattccccatgatttttaagaaagttagaggattagctgataaaagaggaatcgttgaccttgagggtgaagagtggcagagacgccttgaggaagaagataaagattatttgaaactcactctggaccaagaggaagcaacagaaagcactgtagaatcagaggaggaatcctccagcgactatactgaatacagtgaagaagagtctgagttcagtgagtctgagactacagaagaggaatctgagtcagagacaccctctgaggaggaggagagttccacccctgaatcagaagaatcggaatccacagagtcagaaggagaaaaagcaaggaaaaacattgtgcttgcaagaagaaggcccatggttgaggaggtcaaggaagtcaagggtaggaaagaggagccacaagaagaacaaaaagaacctaagatggaagaagaagaacactcagaagaagaagaaagtggaccagcccctgtggaagaaagtacagaccctgaagctcaagatatccctgaagagggcagtgcagaatcagcttcggtggaaggaggtgtggaaagtgaggaggaatcagaatcaggtagtagtagcagtagtagcgaaagtcagtctggaggtccatggggctatcaggtaccagcgtatgacagaagcaagaatgcaaaccaaaagaagtcgccaggagcaaactctgaaggttacaacacagcactttgaaagagatcacagtaggtggaagttttgctgtgatgagtgctctcgtgtgcagtgccttctgtgtgttctccaaagtgacacttgaaagggaggaaattgatcaagattttgatatgacttatgatcagaagcatgccagaaaagtgaatatatatgttgtccaaatccatttgtatattagactgtattagagtaaaactgactaatccttcctatattagtaaatcagaacacatgcaatcagctaatcaatatttaatatttactggtaggatttttgttaatgcaatgtggcattatgtattatcagtgacactctgtctattggaatggatggcatatatatatatatatatatatacacacacacactatatatgtttttatatcatctttcaaaataaatactaagacaagcttcaacaaattatatctttaacagtcgtctacttttgcatatatgtacgtttcaactggcaaaggtattataaaaactatcatgaacatgttcaaataagtaagtttgtatctgcaacttcaagtattaggaattcaatgaaa

SEQ ID NO: 15015 - DNA, 1143 bp, Homo sapiens
  source 1..1143: mol_type = unassigned DNA
gtatgaaatgcctcaatatgggagtcgccgtcgattgttaccaccagctggacaggaggaatatggtgaggtggttggtgaagctgaggaagaatatgaggaggaagaggtaattactgaagagccaaagaaaattaaaaaaccaaaggttgaaattagagagcctagtgaggaggaagaagtagttgtaactatcgaaaaaccaccagcagctgagcctacatacacaacatggaagagagccagaatattccccatgatttttaagaaagttagaggattagctgataaaagaggaatcgttgaccttgagggtgaagagtggcagagacgccttgaggaagaagataaagattatttgaaactcactctggaccaagaggaagcaacagaaagcactgtagaatcagaggaggaatcctccagcgactatactgaatacagtgaagaagagtctgagttcagtgagtctgagactacagaagaggaatctgagtcagagacaccctctgaggaggaggagagttccacccctgaatcagaagaatcggaatccacagagtcagaaggagaaaaagcaaggaaaaacattgtgcttgcaagaagaaggcccatggttgaggaggtcaaggaagtcaagggtaggaaagaggagccacaagaagaacaaaaagaacctaagatggaagaagaagaacactcagaagaagaagaaagtggaccagcccctgtggaagaaagtacagaccctgaagctcaagatatccctgaagagggcagtgcagaatcagcttcggtggaaggaggtgtggaaagtgaggaggaatcagaatcaggtagtagtagcagtagtagcgaaagtcagtctggaggtccatggggctatcaggtaccagcgtatgacagaagcaagaatgcaaaccaaaagaagtcgccaggagcaaactctgaaggttacaacacagcactttgaaagagatcacagtaggtggaagttttgctgtgatgagtgctctcgtgtgcagtgccttctgtgtgttctccaaagtgacacttgaaagggaggaaattgatcaagattttgatatgacttatgatcagaagcatgccagaaaagtgaatatatatgttgtccaaatccat

SEQ ID NO: 15016 - DNA, 5917 bp, Homo sapiens
  source 1..5917: mol_type = unassigned DNA
caacgtgctgagctaatagcgacagatagagggcagacagattcctgctagcagcttagtgttagttgcttgtggtaactaaggcaggtggcatacatctcagaacgtggagaatgatggtatgctttctgagttaacatgttgaactgttttgcttttctaaaaattttcctagtaacattttcttgatgatatgagagtggatatcaatgcctcacagaaacaagaggtggaacatgtgaatgaatcgtcttggaactagattatgagcactggttctttttaaagggatgtgcaagaggcagccttggcaagaaaacttgctgcataatcttacatggactaaagatgaaactttaaaccgcaaatcagctttgagtgaactttgacagaagatgtttcgacagttttatctctggacatgtttagcttcagggatcatcctgggctctctctttgaaatctgcttgggccagtatgatgatgattgcaaactagctaggggaggaccaccagctaccatagttgctattgatgaagaaagtcggaatggtacaattctggtggacaacatgctgatcaaagggactgctggaggaccagaccccaccatagaactttctttaaaggataatgtggattactgggtgttgatggatcctgttaagcaaatgcttttcctgaacagcaccggaagagttctggatagagatccaccgatgaacatacactccattgtggtgcaggtccagtgcatcaacaaaaaagtgggcactattatctaccatgaagtgcgaatagtggtgagagacaggaatgacaactcacccactttcaagcatgaaagctactatgccacagtgaatgagctcactccagttggtaccacaatattcacaggattttcaggagacaatggagctacagatatagatgatggaccaaatggacagatagagtatgttattcagtataatccagatgatccgacatccaatgacacctttgaaattcccctaatgttgactggaaatatagtgttaaggaagaggctcaactatgaagataagactcgctactttgtcataatccaagctaatgaccgtgcccaaaatctgaatgagaggcgaaccaccaccaccactctcacagtggatgttctggatggagatgacttgggtccaatgtttcttccttgtgtccttgtgccaaacactcgtgattgccgtccactcacttatcaagctgccatacctgagttgagaactccggaagaactgaaccccattattgttacgccaccaatccaagccattgatcaggaccggaatattcaaccgccatcagataggccaggaatcctctattccatccttgttgggactcctgaggattacccacgatttttccatatgcatcctaggacagcagaacttagtctcctggagccagtaaacagagactttcaccagaaatttgatttggttattaaggctgaacaagacaatggtcatcctcttcctgcctttgccggtctacacattgaaatactggatgaaaacaatcaaagtccatattttacaatgcccagttatcaaggctatatcctggaatctgccccagtgggagcaaccatttcggacagtctcaatttgacttcacctttaagaatagtagctctggacaaggacatagaagatgttccacccagtggagttcctacaaaagacccagagcttcacctttttctgaatgactacacctcagtcttcaccgtcacacagactggtattactcgctacctcaccttacttcaaccagtggacagggaagaacagcaaacttacaccttttcgataacagcatttgatggtgtacaagaaagtgagccagtcatcgtcaatattcaagtgatggatgcaaatgataacacgccaaccttccctgaaatatcctatgatgtgtatgtttatacagacatgagacctggggacagtgtcatacagctcactgcagtcgacgcagacgaagggtcaaatggggagatcacatatgaaatccttgttggggctcagggagacttcatcatcaataaaacaacagggcttatcaccatcgctccaggggtggaaatgatagtcgggcggacttacgcactcacggtccaagcagcggataatgctcctcctgcagagcgaaggaactccatctgcactgtgtatattgaagtgcttccaccaaataatcaaagccctcctcgcttcccacagctgatgtatagccttgaaattagtgaagccatgagggttggtgctgttttattaaatctacaggcaactgatcgagagggagactcaataacatatgccattgagaatggagatcctcagagagtttttaatctttcagaaaccacggggattctaaccttagggaaagcactggacagggaaagcactgatcgctacattctgatcatcacagcttcagatggcaggccagatgggacctcaactgccacagtaaacatagtggtgacagatgtcaatgacaatgctccagtgtttgatccttatctgccaagaaatttatctgtggtggaagaagaagccaatgcctttgtgggtcaagtaaaagcaacagaccctgatgctggaataaatggtcaagtgcactacagtttgggtaactttaataatctttttcgtatcacatccaatgggagcatttacacagcagtgaagcttaacagagaagtcagggactactatgaacttgttgttgtggcaacagatggagcagtacaccctcgtcattcaactctaaccttggccatcaaggttttggacattgatgataacagtcctgtgttcaccaattcaacatacactgtccttgttgaagagaatttgccagctgggactaccatccttcaaatagaggccaaagatgtcgaccttggagcaaatgtgtcttaccggataagaagcccagaagtgaagcacttttttgcactacatccatttacaggagaactatcgcttttaaggagtttagattatgaggcatttccagaccaagaagcaagtatcacttttctggtagaggcctttgatatttatggaacaatgccacctggtattgctactgtcacagtgattgtaaaggatatgaatgattatcctcctgtctttagtaaacgaatatacaaagggatggtggctccggatgcagtcaagggtacacctatcacaacagtttatgctgaagatgcagaccctcctggattacctgcaagtcgtgtgaggtatagagtagatgatgtacagtttccttaccctgccagtatttttgaagtggaagaagattctggaagagtaataacacgagtcaatcttaatgaagaacctacaacaatttttaagttggtggtggttgcttttgatgatggggagcctgtgatgtccagcagtgccacagtgaagattcttgtcttacatcctggtgagatcccacgcttcacacaggaggaatatagacctcctccagtaagtgaacttgccaccaaagggaccatggttggtgtaatttctgctgctgccattaatcaaagtattgtgtactccattgtttcaggaaatgaagaagatacatttggaattaataacatcacaggtgttatctatgtgaatggacctctggattatgagaccaggacaagctatgtacttcgagtccaagctgattccctggaagtggtccttgccaatctccgagttccttcaaaaagcaatacagctaaagtatacattgagattcaggatgaaaataatcatcccccagtgtttcagaaaaaattctacatcggaggtgtatctgaagatgcaagaatgtttacttctgtactcagagtgaaggctactgataaagatactggcaattatagtgtcatggcctacagactcataataccaccaattaaagagggaaaagaaggatttgtagtggaaacatatacagggcttatcaaaactgctatgctcttccataatatgaggagatcctacttcaagtttcaagttattgcaactgacgactatgggaagggactgagcggcaaagccgatgtactcgtctccgtggtcaatcagctggatatgcaagtcattgtttccaatgtgcctcctactctagtggaaaaaaagatagaagatcttacagagatcttggatcgctatgttcaggaacaaattcctggtgccaaggtcgtagtggagtccattggagctcgccggcatggagatgccttttccctagaagattacaccaaatgtgacttgactgtctatgcaattgacccccaaaccaacagagccatcgatagaaatgagctttttaaatttttggatggcaaactacttgatatcaataaagactttcagccgtattatggggaaggaggacgcattctggagatccggactccagaggcagtgaccagcattaaaaagagaggagaaagtctaggatacacagaaggggccttgttggctctggccttcatcatcatcctctgctgcattcctgccatcttggtggttttggtcagctacagacagtttaaagtacgtcaagctgagtgtacaaagactgcacgaattcaggccgcattacccgcggctaaaccagcagtgccggctcctgcaccagtggcagcgcccccgccgccgccgccgcctccgccaggtgcgcatctctatgaagaacttggagacagctcaatgtatgaaatgcctcaatatgggagtcgccgtcgattgttaccaccagctggacaggaggaatatggtgaggtggttggtgaagctgaggaagaatatgaggaggaagaggaagagccaaagaaaattaaaaaaccaaaggttgaaattagagagcctagtgaggaggaagaagtagttgtaactatcgaaaaaccaccagcagctgagcctacatacacaacatggaagagagccagaatattccccatgatttttaagaaagttagaggattagctgataaaagaggaatcgttgaccttgagggtgaagagtggcagagacgccttgaggaagaagataaagattatttgaaactcactctggaccaagaggaagcaacagaaagcactgtagaatcagaggaggaatcctccagcgactatactgaatacagtgaagaagagtctgagttcagtgagtctgagactacagaagaggaatctgagtcagagacaccctctgaggaggaggagagttccacccctgaatcagaagaatcggaatccacagagtcagaaggagaaaaagcaaggaaaaacattgtgcttgcaagaagaaggcccatggttgaggaggtcaaggaagtcaagggtaggaaagaggagccacaagaagaacaaaaagaacctaagatggaagaagaagaacactcagaagaagaagaaagtggaccagcccctgtggaagaaagtacagaccctgaagctcaagatatccctgaagagggcagtgcagaatcagcttcggtggaaggaggtgtggaaagtgaggaggaatcagaatcaggtagtagtagcagtagtagcgaaagtcagtctggaggtccatggggctatcaggtaccagcgtatgacagaagcaagaatgcaaaccaaaagaagtcgccaggagcaaactctgaaggttacaacacagcactttgaaagagatcacagtaggtggaagttttgctgtgatgagtgctctcgtgtgcagtgccttctgtgtgttctccaaagtgacacttgaaagggaggaaattgatcaagattttgatatgacttatgatcagaagcatgccagaaaagtgaatatatatgttgtccaaatccat

SEQ ID NO: 15017 - DNA, 7017 bp, Homo sapiens
  source 1..7017: mol_type = unassigned DNA
caacgtgctgagctaatagcgacagatagagggcagacagattcctgctagcagcttagtgttagttgcttgtggtaactaaggcaggtggcatacatctcagaacgtggagaatgatggtatgctttctgagttaacatgttgaactgttttgcttttctaaaaattttcctagtaacattttcttgatgatatgagagtggatatcaatgcctcacagaaacaagaggtggaacatgtgaatgaatcgtcttggaactagattatgagcactggttctttttaaagggatgtgcaagaggcagccttggcaagaaaacttgctgcataatcttacatggactaaagatgaaactttaaaccgcaaatcagctttgagtgaactttgacagaagatgtttcgacagttttatctctggacatgtttagcttcagggatcatcctgggctctctctttgaaatctgcttgggccagtatgatgatgattgcaaactagctaggggaggaccaccagctaccatagttgctattgatgaagaaagtcggaatggtacaattctggtggacaacatgctgatcaaagggactgctggaggaccagaccccaccatagaactttctttaaaggataatgtggattactgggtgttgatggatcctgttaagcaaatgcttttcctgaacagcaccggaagagttctggatagagatccaccgatgaacatacactccattgtggtgcaggtccagtgcatcaacaaaaaagtgggcactattatctaccatgaagtgcgaatagtggtgagagacaggaatgacaactcacccactttcaagcatgaaagctactatgccacagtgaatgagctcactccagttggtaccacaatattcacaggattttcaggagacaatggagctacagatatagatgatggaccaaatggacagatagagtatgttattcagtataatccagatgatccgacatccaatgacacctttgaaattcccctaatgttgactggaaatatagtgttaaggaagaggctcaactatgaagataagactcgctactttgtcataatccaagctaatgaccgtgcccaaaatctgaatgagaggcgaaccaccaccaccactctcacagtggatgttctggatggagatgacttgggtccaatgtttcttccttgtgtccttgtgccaaacactcgtgattgccgtccactcacttatcaagctgccatacctgagttgagaactccggaagaactgaaccccattattgttacgccaccaatccaagccattgatcaggaccggaatattcaaccgccatcagataggccaggaatcctctattccatccttgttgggactcctgaggattacccacgatttttccatatgcatcctaggacagcagaacttagtctcctggagccagtaaacagagactttcaccagaaatttgatttggttattaaggctgaacaagacaatggtcatcctcttcctgcctttgccggtctacacattgaaatactggatgaaaacaatcaaagtccatattttacaatgcccagttatcaaggctatatcctggaatctgccccagtgggagcaaccatttcggacagtctcaatttgacttcacctttaagaatagtagctctggacaaggacatagaagatacaaaagacccagagcttcacctttttctgaatgactacacctcagtcttcaccgtcacacagactggtattactcgctacctcaccttacttcaaccagtggacagggaagaacagcaaacttacaccttttcgataacagcatttgatggtgtacaagaaagtgagccagtcatcgtcaatattcaagtgatggatgcaaatgataacacgccaaccttccctgaaatatcctatgatgtgtatgtttatacagacatgagacctggggacagtgtcatacagctcactgcagtcgacgcagacgaagggtcaaatggggagatcacatatgaaatccttgttggggctcagggagacttcatcatcaataaaacaacagggcttatcaccatcgctccaggggtggaaatgatagtcgggcggacttacgcactcacggtccaagcagcggataatgctcctcctgcagagcgaaggaactccatctgcactgtgtatattgaagtgcttccaccaaataatcaaagccctcctcgcttcccacagctgatgtatagccttgaaattagtgaagccatgagggttggtgctgttttattaaatctacaggcaactgatcgagagggagactcaataacatatgccattgagaatggagatcctcagagagtttttaatctttcagaaaccacggggattctaaccttagggaaagcactggacagggaaagcactgatcgctacattctgatcatcacagcttcagatggcaggccagatgggacctcaactgccacagtaaacatagtggtgacagatgtcaatgacaatgctccagtgtttgatccttatctgccaagaaatttatctgtggtggaagaagaagccaatgcctttgtgggtcaagtaaaagcaacagaccctgatgctggaataaatggtcaagtgcactacagtttgggtaactttaataatctttttcgtatcacatccaatgggagcatttacacagcagtgaagcttaacagagaagtcagggactactatgaacttgttgttgtggcaacagatggagcagtacaccctcgtcattcaactctaaccttggccatcaaggttttggacattgatgataacagtcctgtgttcaccaattcaacatacactgtccttgttgaagagaatttgccagctgggactaccatccttcaaatagaggccaaagatgtcgaccttggagcaaatgtgtcttaccggataagaagcccagaagtgaagcacttttttgcactacatccatttacaggagaactatcgcttttaaggagtttagattatgaggcatttccagaccaagaagcaagtatcacttttctggtagaggcctttgatatttatggaacaatgccacctggtattgctactgtcacagtgattgtaaaggatatgaatgattatcctcctgtctttagtaaacgaatatacaaagggatggtggctccggatgcagtcaagggtacacctatcacaacagtttatgctgaagatgcagaccctcctggattacctgcaagtcgtgtgaggtatagagtagatgatgtacagtttccttaccctgccagtatttttgaagtggaagaagattctggaagagtaataacacgagtcaatcttaatgaagaacctacaacaatttttaagttggtggtggttgcttttgatgatggggagcctgtgatgtccagcagtgccacagtgaagattcttgtcttacatcctggtgagatcccacgcttcacacaggaggaatatagacctcctccagtaagtgaacttgccaccaaagggaccatggttggtgtaatttctgctgctgccattaatcaaagtattgtgtactccattgtttcaggaaatgaagaagatacatttggaattaataacatcacaggtgttatctatgtgaatggacctctggattatgagaccaggacaagctatgtacttcgagtccaagctgattccctggaagtggtccttgccaatctccgagttccttcaaaaagcaatacagctaaagtatacattgagattcaggatgaaaataatcatcccccagtgtttcagaaaaaattctacatcggaggtgtatctgaagatgcaagaatgtttacttctgtactcagagtgaaggctactgataaagatactggcaattatagtgtcatggcctacagactcataataccaccaattaaagagggaaaagaaggatttgtagtggaaacatatacagggcttatcaaaactgctatgctcttccataatatgaggagatcctacttcaagtttcaagttattgcaactgacgactatgggaagggactgagcggcaaagccgatgtactcgtctccgtggtcaatcagctggatatgcaagtcattgtttccaatgtgcctcctactctagtggaaaaaaagatagaagatcttacagagatcttggatcgctatgttcaggaacaaattcctggtgccaaggtcgtagtggagtccattggagctcgccggcatggagatgccttttccctagaagattacaccaaatgtgacttgactgtctatgcaattgacccccaaaccaacagagccatcgatagaaatgagctttttaaatttttggatggcaaactacttgatatcaataaagactttcagccgtattatggggaaggaggacgcattctggagatccggactccagaggcagtgaccagcattaaaaagagaggagaaagtctaggatacacagaaggggccttgttggctctggccttcatcatcatcctctgctgcattcctgccatcttggtggttttggtcagctacagacagtttaaagtacgtcaagctgagtgtacaaagactgcacgaattcaggccgcattacccgcggctaaaccagcagtgccggctcctgcaccagtggcagcgcccccgccgccgccgccgcctccgccaggtgcgcatctctatgaagaacttggagacagctcaatgcataatcttttccttctctaccattttcaacaaagcaggggaaataactcagtctcagaagacaggaaacatcaacaagttgtgatgcccttttcttccaatactattgaggctcacaagtcagctcatgtagacggatcacttaagagcaacaaactgaagtctgcaagaaaattcacatttctatctgatgaggatgacttaagtgcccataatcccctttataaggaaaacataagtcaagtatcaacaaattcagacatttcacagagaacagattttgtagacccattttcacccaaaatacaagccaagagtaagtctctgaggggcccaagagaaaagattcagaggctgtggagtcagtcagtcagcttacccaggaggctgatgaggaaagttccaaatagaccagagatcatagatctgcagcagtggcaaggcaccaggcagaaagctgaaaatgaaaacactggaatctgtacaaacaaaagaggtagcagcaatccattgcttacaactgaagaggcaaatttgacagagaaagaggaaataaggcaaggtgaaacactgatgatagaaggaacagaacagttgaaatctctctcttcagactcttcattttgctttcccaggcctcacttctcattctccactttgccaactgtttcaagaactgtggaactcaaatcagaacctaatgtcatcagttctcctgctgagtgttccttggaactttctccttcaaggccttgtgttttacattcttcactctctaggagagagacacctatttgtatgttacctattgaaaccgaaagaaatatttttgaaaattttgcccatccaccaaacatctctccttctgcctgtccccttccccctcctcctcctatttctcctccttctcctcctcctgctcctgctcctcttgctcctcctcctgacatttctcctttttctcttttttgtcctcctccctctcctccttctatccctcttcctcttcctcctcctacattttttccactttccgtttcaacgtctggtcccccaacaccacctcttctacctccatttccaactcctcttcctccaccacctccttctattccttgccctccacctccttcagcttcatttctgtccacagagtgtgtctgtataacaggtgttaaatgcacgaccaacttgatgcctgccgagaaaattaagtcctctatgacacagctatcaacaacgacagtgtgtaaaacagaccctcagagagaaccaaaaggcatcctcagacacgttaaaaacttagcagaacttgaaaaatcagtagctaacatgtacagtcaaatagaaaaaaactatctacgcacaaatgtttcagaacttcaaactatgtgcccttcagaagtaacaaatatggaaatcacatctgaacaaaacaaggggagtttgaacaatattgtcgagggaactgaaaaacaatctcacagtcaatctacttcactgtaatgttgcttttcttattttagtcgggcaaacctcttgttgatcatagtcttcaagttgaacatcaaatttgaacgtcaaagaagactctattattttaccccaaattcaatgaaatgcagttttttttctcgtttttaatttaaaaagatattaacctcatcactactaactcactcatataatagatttaccttactttttaaaaactacaaagtagcataatttgttctacatttatttgaaaagtaagtaattttaatctcttttttagtgggaatatgtgggcatgaaaattagatacccaacttaaaccaaaggcatgtctatcatgtggatgcagtaacatttacatttagtttttgatcgtagttttatatgaatgttccaagaaaaaagcagactgttacaaataagttaaaactgatatgattgataggttctgttttttcttgaagcctatgtatttggtaagaagaaatactaccgaagtaaaatataatgtacctagattgtaggagatgacagacataaggtatttcaaaataaatctcaggtgctataacatgtagtcatctgttttctgataagaacatcttttactctgacttgcttttatcttagtagtatgcttatggatttagtagtatgcttatggatttgataaatcttatactttttcagttgctgtcttattctctttatttctcattgtgctttcccttcccttctttataatgaaaataaatct

SEQ ID NO: 15018 - DNA, 7002 bp, Homo sapiens
  source 1..7002: mol_type = unassigned DNA
caacgtgctgagctaatagcgacagatagagggcagacagattcctgctagcagcttagtgttagttgcttgtggtaactaaggcaggtggcatacatctcagaacgtggagaatgatggtatgctttctgagttaacatgttgaactgttttgcttttctaaaaattttcctagtaacattttcttgatgatatgagagtggatatcaatgcctcacagaaacaagaggtggaacatgtgaatgaatcgtcttggaactagattatgagcactggttctttttaaagggatgtgcaagaggcagccttggcaagaaaacttgctgcataatcttacatggactaaagatgaaactttaaaccgcaaatcagctttgagtgaactttgacagaagatgtttcgacagttttatctctggacatgtttagcttcagggatcatcctgggctctctctttgaaatctgcttgggccagtatgatgatgattgcaaactagctaggggaggaccaccagctaccatagttgctattgatgaagaaagtcggaatggtacaattctggtggacaacatgctgatcaaagggactgctggaggaccagaccccaccatagaactttctttaaaggataatgtggattactgggtgttgatggatcctgttaagcaaatgcttttcctgaacagcaccggaagagttctggatagagatccaccgatgaacatacactccattgtggtgcaggtccagtgcatcaacaaaaaagtgggcactattatctaccatgaagtgcgaatagtggtgagagacaggaatgacaactcacccactttcaagcatgaaagctactatgccacagtgaatgagctcactccagttggtaccacaatattcacaggattttcaggagacaatggagctacagatatagatgatggaccaaatggacagatagagtatgttattcagtataatccagatgatccgacatccaatgacacctttgaaattcccctaatgttgactggaaatatagtgttaaggaagaggctcaactatgaagataagactcgctactttgtcataatccaagctaatgaccgtgcccaaaatctgaatgagaggcgaaccaccaccaccactctcacagtggatgttctggatggagatgacttgggtccaatgtttcttccttgtgtccttgtgccaaacactcgtgattgccgtccactcacttatcaagctgccatacctgagttgagaactccggaagaactgaaccccattattgttacgccaccaatccaagccattgatcaggaccggaatattcaaccgccatcagataggccaggaatcctctattccatccttgttgggactcctgaggattacccacgatttttccatatgcatcctaggacagcagaacttagtctcctggagccagtaaacagagactttcaccagaaatttgatttggttattaaggctgaacaagacaatggtcatcctcttcctgcctttgccggtctacacattgaaatactggatgaaaacaatcaaagtccatattttacaatgcccagttatcaaggctatatcctggaatctgccccagtgggagcaaccatttcggacagtctcaatttgacttcacctttaagaatagtagctctggacaaggacatagaagatacaaaagacccagagcttcacctttttctgaatgactacacctcagtcttcaccgtcacacagactggtattactcgctacctcaccttacttcaaccagtggacagggaagaacagcaaacttacaccttttcgataacagcatttgatggtgtacaagaaagtgagccagtcatcgtcaatattcaagtgatggatgcaaatgataacacgccaaccttccctgaaatatcctatgatgtgtatgtttatacagacatgagacctggggacagtgtcatacagctcactgcagtcgacgcagacgaagggtcaaatggggagatcacatatgaaatccttgttggggctcagggagacttcatcatcaataaaacaacagggcttatcaccatcgctccaggggtggaaatgatagtcgggcggacttacgcactcacggtccaagcagcggataatgctcctcctgcagagcgaaggaactccatctgcactgtgtatattgaagtgcttccaccaaataatcaaagccctcctcgcttcccacagctgatgtatagccttgaaattagtgaagccatgagggttggtgctgttttattaaatctacaggcaactgatcgagagggagactcaataacatatgccattgagaatggagatcctcagagagtttttaatctttcagaaaccacggggattctaaccttagggaaagcactggacagggaaagcactgatcgctacattctgatcatcacagcttcagatggcaggccagatgggacctcaactgccacagtaaacatagtggtgacagatgtcaatgacaatgctccagtgtttgatccttatctgccaagaaatttatctgtggtggaagaagaagccaatgcctttgtgggtcaagtaaaagcaacagaccctgatgctggaataaatggtcaagtgcactacagtttgggtaactttaataatctttttcgtatcacatccaatgggagcatttacacagcagtgaagcttaacagagaagtcagggactactatgaacttgttgttgtggcaacagatggagcagtacaccctcgtcattcaactctaaccttggccatcaaggttttggacattgatgataacagtcctgtgttcaccaattcaacatacactgtccttgttgaagagaatttgccagctgggactaccatccttcaaatagaggccaaagatgtcgaccttggagcaaatgtgtcttaccggataagaagcccagaagtgaagcacttttttgcactacatccatttacaggagaactatcgcttttaaggagtttagattatgaggcatttccagaccaagaagcaagtatcacttttctggtagaggcctttgatatttatggaacaatgccacctggtattgctactgtcacagtgattgtaaaggatatgaatgattatcctcctgtctttagtaaacgaatatacaaagggatggtggctccggatgcagtcaagggtacacctatcacaacagtttatgctgaagatgcagaccctcctggattacctgcaagtcgtgtgaggtatagagtagatgatgtacagtttccttaccctgccagtatttttgaagtggaagaagattctggaagagtaataacacgagtcaatcttaatgaagaacctacaacaatttttaagttggtggtggttgcttttgatgatggggagcctgtgatgtccagcagtgccacagtgaagattcttgtcttacatcctggtgagatcccacgcttcacacaggaggaatatagacctcctccagtaagtgaacttgccaccaaagggaccatggttggtgtaatttctgctgctgccattaatcaaagtattgtgtactccattgtttcaggaaatgaagaagatacatttggaattaataacatcacaggtgttatctatgtgaatggacctctggattatgagaccaggacaagctatgtacttcgagtccaagctgattccctggaagtggtccttgccaatctccgagttccttcaaaaagcaatacagctaaagtatacattgagattcaggatgaaaataatcatcccccagtgtttcagaaaaaattctacatcggaggtgtatctgaagatgcaagaatgtttacttctgtactcagagtgaaggctactgataaagatactggcaattatagtgtcatggcctacagactcataataccaccaattaaagagggaaaagaaggatttgtagtggaaacatatacagggcttatcaaaactgctatgctcttccataatatgaggagatcctacttcaagtttcaagttattgcaactgacgactatgggaagggactgagcggcaaagccgatgtactcgtctccgtggtcaatcagctggatatgcaagtcattgtttccaatgtgcctcctactctagtggaaaaaaagatagaagatcttacagagatcttggatcgctatgttcaggaacaaattcctggtgccaaggtcgtagtggagtccattggagctcgccggcatggagatgccttttccctagaagattacaccaaatgtgacttgactgtctatgcaattgacccccaaaccaacagagccatcgatagaaatgagctttttaaatttttggatggcaaactacttgatatcaataaagactttcagccgtattatggggaaggaggacgcattctggagatccggactccagaggcagtgaccagcattaaaaagagaggagaaagtctaggatacacagaaggggccttgttggctctggccttcatcatcatcctctgctgcattcctgccatcttggtggttttggtcagctacagacaacgtcaagctgagtgtacaaagactgcacgaattcaggccgcattacccgcggctaaaccagcagtgccggctcctgcaccagtggcagcgcccccgccgccgccgccgcctccgccaggtgcgcatctctatgaagaacttggagacagctcaattcttttccttctctaccattttcaacaaagcaggggaaataactcagtctcagaagacaggaaacatcaacaagttgtgatgcccttttcttccaatactattgaggctcacaagtcagctcatgtagacggatcacttaagagcaacaaactgaagtctgcaagaaaattcacatttctatctgatgaggatgacttaagtgcccataatcccctttataaggaaaacataagtcaagtatcaacaaattcagacatttcacagagaacagattttgtagacccattttcacccaaaatacaagccaagagtaagtctctgaggggcccaagagaaaagattcagaggctgtggagtcagtcagtcagcttacccaggaggctgatgaggaaagttccaaatagaccagagatcatagatctgcagcagtggcaaggcaccaggcagaaagctgaaaatgaaaacactggaatctgtacaaacaaaagaggtagcagcaatccattgcttacaactgaagaggcaaatttgacagagaaagaggaaataaggcaaggtgaaacactgatgatagaaggaacagaacagttgaaatctctctcttcagactcttcattttgctttcccaggcctcacttctcattctccactttgccaactgtttcaagaactgtggaactcaaatcagaacctaatgtcatcagttctcctgctgagtgttccttggaactttctccttcaaggccttgtgttttacattcttcactctctaggagagagacacctatttgtatgttacctattgaaaccgaaagaaatatttttgaaaattttgcccatccaccaaacatctctccttctgcctgtccccttccccctcctcctcctatttctcctccttctcctcctcctgctcctgctcctcttgctcctcctcctgacatttctcctttttctcttttttgtcctcctccctctcctccttctatccctcttcctcttcctcctcctacattttttccactttccgtttcaacgtctggtcccccaacaccacctcttctacctccatttccaactcctcttcctccaccacctccttctattccttgccctccacctccttcagcttcatttctgtccacagagtgtgtctgtataacaggtgttaaatgcacgaccaacttgatgcctgccgagaaaattaagtcctctatgacacagctatcaacaacgacagtgtgtaaaacagaccctcagagagaaccaaaaggcatcctcagacacgttaaaaacttagcagaacttgaaaaatcagtagctaacatgtacagtcaaatagaaaaaaactatctacgcacaaatgtttcagaacttcaaactatgtgcccttcagaagtaacaaatatggaaatcacatctgaacaaaacaaggggagtttgaacaatattgtcgagggaactgaaaaacaatctcacagtcaatctacttcactgtaatgttgcttttcttattttagtcgggcaaacctcttgttgatcatagtcttcaagttgaacatcaaatttgaacgtcaaagaagactctattattttaccccaaattcaatgaaatgcagttttttttctcgtttttaatttaaaaagatattaacctcatcactactaactcactcatataatagatttaccttactttttaaaaactacaaagtagcataatttgttctacatttatttgaaaagtaagtaattttaatctcttttttagtgggaatatgtgggcatgaaaattagatacccaacttaaaccaaaggcatgtctatcatgtggatgcagtaacatttacatttagtttttgatcgtagttttatatgaatgttccaagaaaaaagcagactgttacaaataagttaaaactgatatgattgataggttctgttttttcttgaagcctatgtatttggtaagaagaaatactaccgaagtaaaatataatgtacctagattgtaggagatgacagacataaggtatttcaaaataaatctcaggtgctataacatgtagtcatctgttttctgataagaacatcttttactctgacttgcttttatcttagtagtatgcttatggatttagtagtatgcttatggatttgataaatcttatactttttcagttgctgtcttattctctttatttctcattgtgctttcccttcccttctttataatgaaaataaatct

SEQ ID NO: 15019 - DNA, 6942 bp, Homo sapiens
  source 1..6942: mol_type = unassigned DNA
caacgtgctgagctaatagcgacagatagagggcagacagattcctgctagcagcttagtgttagttgcttgtggtaactaaggcaggtggcatacatctcagaacgtggagaatgatggtatgctttctgagttaacatgttgaactgttttgcttttctaaaaattttcctagtaacattttcttgatgatatgagagtggatatcaatgcctcacagaaacaagaggtggaacatgtgaatgaatcgtcttggaactagattatgagcactggttctttttaaagggatgtgcaagaggcagccttggcaagaaaacttgctgcataatcttacatggactaaagatgaaactttaaaccgcaaatcagctttgagtgaactttgacagaagatgtttcgacagttttatctctggacatgtttagcttcagggatcatcctgggctctctctttgaaatctgcttgggccagtatgatgatggtacaattctggtggacaacatgctgatcaaagggactgctggaggaccagaccccaccatagaactttctttaaaggataatgtggattactgggtgttgatggatcctgttaagcaaatgcttttcctgaacagcaccggaagagttctggatagagatccaccgatgaacatacactccattgtggtgcaggtccagtgcatcaacaaaaaagtgggcactattatctaccatgaagtgcgaatagtggtgagagacaggaatgacaactcacccactttcaagcatgaaagctactatgccacagtgaatgagctcactccagttggtaccacaatattcacaggattttcaggagacaatggagctacagatatagatgatggaccaaatggacagatagagtatgttattcagtataatccagatgatccgacatccaatgacacctttgaaattcccctaatgttgactggaaatatagtgttaaggaagaggctcaactatgaagataagactcgctactttgtcataatccaagctaatgaccgtgcccaaaatctgaatgagaggcgaaccaccaccaccactctcacagtggatgttctggatggagatgacttgggtccaatgtttcttccttgtgtccttgtgccaaacactcgtgattgccgtccactcacttatcaagctgccatacctgagttgagaactccggaagaactgaaccccattattgttacgccaccaatccaagccattgatcaggaccggaatattcaaccgccatcagataggccaggaatcctctattccatccttgttgggactcctgaggattacccacgatttttccatatgcatcctaggacagcagaacttagtctcctggagccagtaaacagagactttcaccagaaatttgatttggttattaaggctgaacaagacaatggtcatcctcttcctgcctttgccggtctacacattgaaatactggatgaaaacaatcaaagtccatattttacaatgcccagttatcaaggctatatcctggaatctgccccagtgggagcaaccatttcggacagtctcaatttgacttcacctttaagaatagtagctctggacaaggacatagaagatacaaaagacccagagcttcacctttttctgaatgactacacctcagtcttcaccgtcacacagactggtattactcgctacctcaccttacttcaaccagtggacagggaagaacagcaaacttacaccttttcgataacagcatttgatggtgtacaagaaagtgagccagtcatcgtcaatattcaagtgatggatgcaaatgataacacgccaaccttccctgaaatatcctatgatgtgtatgtttatacagacatgagacctggggacagtgtcatacagctcactgcagtcgacgcagacgaagggtcaaatggggagatcacatatgaaatccttgttggggctcagggagacttcatcatcaataaaacaacagggcttatcaccatcgctccaggggtggaaatgatagtcgggcggacttacgcactcacggtccaagcagcggataatgctcctcctgcagagcgaaggaactccatctgcactgtgtatattgaagtgcttccaccaaataatcaaagccctcctcgcttcccacagctgatgtatagccttgaaattagtgaagccatgagggttggtgctgttttattaaatctacaggcaactgatcgagagggagactcaataacatatgccattgagaatggagatcctcagagagtttttaatctttcagaaaccacggggattctaaccttagggaaagcactggacagggaaagcactgatcgctacattctgatcatcacagcttcagatggcaggccagatgggacctcaactgccacagtaaacatagtggtgacagatgtcaatgacaatgctccagtgtttgatccttatctgccaagaaatttatctgtggtggaagaagaagccaatgcctttgtgggtcaagtaaaagcaacagaccctgatgctggaataaatggtcaagtgcactacagtttgggtaactttaataatctttttcgtatcacatccaatgggagcatttacacagcagtgaagcttaacagagaagtcagggactactatgaacttgttgttgtggcaacagatggagcagtacaccctcgtcattcaactctaaccttggccatcaaggttttggacattgatgataacagtcctgtgttcaccaattcaacatacactgtccttgttgaagagaatttgccagctgggactaccatccttcaaatagaggccaaagatgtcgaccttggagcaaatgtgtcttaccggataagaagcccagaagtgaagcacttttttgcactacatccatttacaggagaactatcgcttttaaggagtttagattatgaggcatttccagaccaagaagcaagtatcacttttctggtagaggcctttgatatttatggaacaatgccacctggtattgctactgtcacagtgattgtaaaggatatgaatgattatcctcctgtctttagtaaacgaatatacaaagggatggtggctccggatgcagtcaagggtacacctatcacaacagtttatgctgaagatgcagaccctcctggattacctgcaagtcgtgtgaggtatagagtagatgatgtacagtttccttaccctgccagtatttttgaagtggaagaagattctggaagagtaataacacgagtcaatcttaatgaagaacctacaacaatttttaagttggtggtggttgcttttgatgatggggagcctgtgatgtccagcagtgccacagtgaagattcttgtcttacatcctggtgagatcccacgcttcacacaggaggaatatagacctcctccagtaagtgaacttgccaccaaagggaccatggttggtgtaatttctgctgctgccattaatcaaagtattgtgtactccattgtttcaggaaatgaagaagatacatttggaattaataacatcacaggtgttatctatgtgaatggacctctggattatgagaccaggacaagctatgtacttcgagtccaagctgattccctggaagtggtccttgccaatctccgagttccttcaaaaagcaatacagctaaagtatacattgagattcaggatgaaaataatcatcccccagtgtttcagaaaaaattctacatcggaggtgtatctgaagatgcaagaatgtttacttctgtactcagagtgaaggctactgataaagatactggcaattatagtgtcatggcctacagactcataataccaccaattaaagagggaaaagaaggatttgtagtggaaacatatacagggcttatcaaaactgctatgctcttccataatatgaggagatcctacttcaagtttcaagttattgcaactgacgactatgggaagggactgagcggcaaagccgatgtactcgtctccgtggtcaatcagctggatatgcaagtcattgtttccaatgtgcctcctactctagtggaaaaaaagatagaagatcttacagagatcttggatcgctatgttcaggaacaaattcctggtgccaaggtcgtagtggagtccattggagctcgccggcatggagatgccttttccctagaagattacaccaaatgtgacttgactgtctatgcaattgacccccaaaccaacagagccatcgatagaaatgagctttttaaatttttggatggcaaactacttgatatcaataaagactttcagccgtattatggggaaggaggacgcattctggagatccggactccagaggcagtgaccagcattaaaaagagaggagaaagtctaggatacacagaaggggccttgttggctctggccttcatcatcatcctctgctgcattcctgccatcttggtggttttggtcagctacagacaacgtcaagctgagtgtacaaagactgcacgaattcaggccgcattacccgcggctaaaccagcagtgccggctcctgcaccagtggcagcgcccccgccgccgccgccgcctccgccaggtgcgcatctctatgaagaacttggagacagctcaatgcataatcttttccttctctaccattttcaacaaagcaggggaaataactcagtctcagaagacaggaaacatcaacaagttgtgatgcccttttcttccaatactattgaggctcacaagtcagctcatgtagacggatcacttaagagcaacaaactgaagtctgcaagaaaattcacatttctatctgatgaggatgacttaagtgcccataatcccctttataaggaaaacataagtcaagtatcaacaaattcagacatttcacagagaacagattttgtagacccattttcacccaaaatacaagccaagagtaagtctctgaggggcccaagagaaaagattcagaggctgtggagtcagtcagtcagcttacccaggaggctgatgaggaaagttccaaatagaccagagatcatagatctgcagcagtggcaaggcaccaggcagaaagctgaaaatgaaaacactggaatctgtacaaacaaaagaggtagcagcaatccattgcttacaactgaagaggcaaatttgacagagaaagaggaaataaggcaaggtgaaacactgatgatagaaggaacagaacagttgaaatctctctcttcagactcttcattttgctttcccaggcctcacttctcattctccactttgccaactgtttcaagaactgtggaactcaaatcagaacctaatgtcatcagttctcctgctgagtgttccttggaactttctccttcaaggccttgtgttttacattcttcactctctaggagagagacacctatttgtatgttacctattgaaaccgaaagaaatatttttgaaaattttgcccatccaccaaacatctctccttctgcctgtccccttccccctcctcctcctatttctcctccttctcctcctcctgctcctgctcctcttgctcctcctcctgacatttctcctttttctcttttttgtcctcctccctctcctccttctatccctcttcctcttcctcctcctacattttttccactttccgtttcaacgtctggtcccccaacaccacctcttctacctccatttccaactcctcttcctccaccacctccttctattccttgccctccacctccttcagcttcatttctgtccacagagtgtgtctgtataacaggtgttaaatgcacgaccaacttgatgcctgccgagaaaattaagtcctctatgacacagctatcaacaacgacagtgtgtaaaacagaccctcagagagaaccaaaaggcatcctcagacacgttaaaaacttagcagaacttgaaaaatcagtagctaacatgtacagtcaaatagaaaaaaactatctacgcacaaatgtttcagaacttcaaactatgtgcccttcagaagtaacaaatatggaaatcacatctgaacaaaacaaggggagtttgaacaatattgtcgagggaactgaaaaacaatctcacagtcaatctacttcactgtaatgttgcttttcttattttagtcgggcaaacctcttgttgatcatagtcttcaagttgaacatcaaatttgaacgtcaaagaagactctattattttaccccaaattcaatgaaatgcagttttttttctcgtttttaatttaaaaagatattaacctcatcactactaactcactcatataatagatttaccttactttttaaaaactacaaagtagcataatttgttctacatttatttgaaaagtaagtaattttaatctcttttttagtgggaatatgtgggcatgaaaattagatacccaacttaaaccaaaggcatgtctatcatgtggatgcagtaacatttacatttagtttttgatcgtagttttatatgaatgttccaagaaaaaagcagactgttacaaataagttaaaactgatatgattgataggttctgttttttcttgaagcctatgtatttggtaagaagaaatactaccgaagtaaaatataatgtacctagattgtaggagatgacagacataaggtatttcaaaataaatctcaggtgctataacatgtagtcatctgttttctgataagaacatcttttactctgacttgcttttatcttagtagtatgcttatggatttagtagtatgcttatggatttgataaatcttatactttttcagttgctgtcttattctctttatttctcattgtgctttcccttcccttctttataatgaaaataaatct

SEQ ID NO: 15020 - DNA, 6931 bp, Homo sapiens
  source 1..6931: mol_type = unassigned DNA
caacgtgctgagctaatagcgacagatagagggcagacagattcctgctagcagcttagtgttagttgcttgtggtaactaaggcaggtggcatacatctcagaacgtggagaatgatggtatgctttctgagttaacatgttgaactgttttgcttttctaaaaattttcctagtaacattttcttgatgatatgagagtggatatcaatgcctcacagaaacaagaggtggaacatgtgaatgaatcgtcttggaactagattatgagcactggttctttttaaagggatgtgcaagaggcagccttggcaagaaaacttgctgcataatcttacatggactaaagatgaaactttaaaccgcaaatcagctttgagtgaactttgacagaagatgtttcgacagttttatctctggacatgtttagcttcagggatcatcctgggctctctctttgaaatctgcttgggccagtatgatgatgattgcaaactagctaggggaggaccaccagctaccatagttgctattgatgaagaaagtcggaatggtacaattctggtggacaacatgctgatcaaagggactgctggaggaccagaccccaccatagaactttctttaaaggataatgtggattactgggtgttgatggatcctgttaagcaaatgcttttcctgaacagcaccggaagagttctggatagagatccaccgatgaacatacactccattgtggtgcaggtccagtgcatcaacaaaaaagtgggcactattatctaccatgaagtgcgaatagtggtgagagacaggaatgacaactcacccactttcaagcatgaaagctactatgccacagtgaatgagctcactccagttggtaccacaatattcacaggattttcaggagacaatggagctacagatatagatgatggaccaaatggacagatagagtatgttattcagtataatccagatgatccgacatccaatgacacctttgaaattcccctaatgttgactggaaatatagtgttaaggaagaggctcaactatgaagataagactcgctactttgtcataatccaagctaatgaccgtgcccaaaatctgaatgagaggcgaaccaccaccaccactctcacagtggatgttctggatggagatgacttgggtccaatgtttcttccttgtgtccttgtgccaaacactcgtgattgccgtccactcacttatcaagctgccatacctgagttgagaactccggaagaactgaaccccattattgttacgccaccaatccaagccattgatcaggaccggaatattcaaccgccatcagataggccaggaatcctctattccatccttgttgggactcctgaggattacccacgatttttccatatgcatcctaggacagcagaacttagtctcctggagccagtaaacagagactttcaccagaaatttgatttggttattaaggctgaacaagacaatggtcatcctcttcctgcctttgccggtctacacattgaaatactggatgaaaacaatcaaagtccatattttacaatgcccagttatcaaggctatatcctggaatctgccccagtgggagcaaccatttcggacagtctcaatttgacttcacctttaagaatagtagctctggacaaggacatagaagatacaaaagacccagagcttcacctttttctgaatgactacacctcagtcttcaccgtcacacagactggtattactcgctacctcaccttacttcaaccagtggacagggaagaacagcaaacttacaccttttcgataacagcatttgatggtgtacaagaaagtgagccagtcatcgtcaatattcaagtgatggatgcaaatgataacacgccaaccttccctgaaatatcctatgatgtgtatgtttatacagacatgagacctggggacagtgtcatacagctcactgcagtcgacgcagacgaagggtcaaatggggagatcacatatgaaatccttgttggggctcagggagacttcatcatcaataaaacaacagggcttatcaccatcgctccaggggtggaaatgatagtcgggcggacttacgcactcacggtccaagcagcggataatgctcctcctgcagagcgaaggaactccatctgcactgtgtatattgaagtgcttccaccaaataatcaaagccctcctcgcttcccacagctgatgtatagccttgaaattagtgaagccatgagggttggtgctgttttattaaatctacagcacggggattctaaccttagggaaagcactggacagggaaagcactgatcgctacattctgatcatcacagcttcagatggcaggccagatgggacctcaactgccacagtaaacatagtggtgacagatgtcaatgacaatgctccagtgtttgatccttatctgccaagaaatttatctgtggtggaagaagaagccaatgcctttgtgggtcaagtaaaagcaacagaccctgatgctggaataaatggtcaagtgcactacagtttgggtaactttaataatctttttcgtatcacatccaatgggagcatttacacagcagtgaagcttaacagagaagtcagggactactatgaacttgttgttgtggcaacagatggagcagtacaccctcgtcattcaactctaaccttggccatcaaggttttggacattgatgataacagtcctgtgttcaccaattcaacatacactgtccttgttgaagagaatttgccagctgggactaccatccttcaaatagaggccaaagatgtcgaccttggagcaaatgtgtcttaccggataagaagcccagaagtgaagcacttttttgcactacatccatttacaggagaactatcgcttttaaggagtttagattatgaggcatttccagaccaagaagcaagtatcacttttctggtagaggcctttgatatttatggaacaatgccacctggtattgctactgtcacagtgattgtaaaggatatgaatgattatcctcctgtctttagtaaacgaatatacaaagggatggtggctccggatgcagtcaagggtacacctatcacaacagtttatgctgaagatgcagaccctcctggattacctgcaagtcgtgtgaggtatagagtagatgatgtacagtttccttaccctgccagtatttttgaagtggaagaagattctggaagagtaataacacgagtcaatcttaatgaagaacctacaacaatttttaagttggtggtggttgcttttgatgatggggagcctgtgatgtccagcagtgccacagtgaagattcttgtcttacatcctggtgagatcccacgcttcacacaggaggaatatagacctcctccagtaagtgaacttgccaccaaagggaccatggttggtgtaatttctgctgctgccattaatcaaagtattgtgtactccattgtttcaggaaatgaagaagatacatttggaattaataacatcacaggtgttatctatgtgaatggacctctggattatgagaccaggacaagctatgtacttcgagtccaagctgattccctggaagtggtccttgccaatctccgagttccttcaaaaagcaatacagctaaagtatacattgagattcaggatgaaaataatcatcccccagtgtttcagaaaaaattctacatcggaggtgtatctgaagatgcaagaatgtttacttctgtactcagagtgaaggctactgataaagatactggcaattatagtgtcatggcctacagactcataataccaccaattaaagagggaaaagaaggatttgtagtggaaacatatacagggcttatcaaaactgctatgctcttccataatatgaggagatcctacttcaagtttcaagttattgcaactgacgactatgggaagggactgagcggcaaagccgatgtactcgtctccgtggtcaatcagctggatatgcaagtcattgtttccaatgtgcctcctactctagtggaaaaaaagatagaagatcttacagagatcttggatcgctatgttcaggaacaaattcctggtgccaaggtcgtagtggagtccattggagctcgccggcatggagatgccttttccctagaagattacaccaaatgtgacttgactgtctatgcaattgacccccaaaccaacagagccatcgatagaaatgagctttttaaatttttggatggcaaactacttgatatcaataaagactttcagccgtattatggggaaggaggacgcattctggagatccggactccagaggcagtgaccagcattaaaaagagaggagaaagtctaggatacacagaaggggccttgttggctctggccttcatcatcatcctctgctgcattcctgccatcttggtggttttggtcagctacagacagtttaaagtacgtcaagctgagtgtacaaagactgcacgaattcaggccgcattacccgcggctaaaccagcagtgccggctcctgcaccagtggcagcgcccccgccgccgccgccgcctccgccaggtgcgcatctctatgaagaacttggagacagctcaattcttttccttctctaccattttcaacaaagcaggggaaataactcagtctcagaagacaggaaacatcaacaagttgtgatgcccttttcttccaatactattgaggctcacaagtcagctcatgtagacggatcacttaagagcaacaaactgaagtctgcaagaaaattcacatttctatctgatgaggatgacttaagtgcccataatcccctttataaggaaaacataagtcaagtatcaacaaattcagacatttcacagagaacagattttgtagacccattttcacccaaaatacaagccaagagtaagtctctgaggggcccaagagaaaagattcagaggctgtggagtcagtcagtcagcttacccaggaggctgatgaggaaagttccaaatagaccagagatcatagatctgcagcagtggcaaggcaccaggcagaaagctgaaaatgaaaacactggaatctgtacaaacaaaagaggtagcagcaatccattgcttacaactgaagaggcaaatttgacagagaaagaggaaataaggcaaggtgaaacactgatgatagaaggaacagaacagttgaaatctctctcttcagactcttcattttgctttcccaggcctcacttctcattctccactttgccaactgtttcaagaactgtggaactcaaatcagaacctaatgtcatcagttctcctgctgagtgttccttggaactttctccttcaaggccttgtgttttacattcttcactctctaggagagagacacctatttgtatgttacctattgaaaccgaaagaaatatttttgaaaattttgcccatccaccaaacatctctccttctgcctgtccccttccccctcctcctcctatttctcctccttctcctcctcctgctcctgctcctcttgctcctcctcctgacatttctcctttttctcttttttgtcctcctccctctcctccttctatccctcttcctcttcctcctcctacattttttccactttccgtttcaacgtctggtcccccaacaccacctcttctacctccatttccaactcctcttcctccaccacctccttctattccttgccctccacctccttcagcttcatttctgtccacagagtgtgtctgtataacaggtgttaaatgcacgaccaacttgatgcctgccgagaaaattaagtcctctatgacacagctatcaacaacgacagtgtgtaaaacagaccctcagagagaaccaaaaggcatcctcagacacgttaaaaacttagcagaacttgaaaaatcagtagctaacatgtacagtcaaatagaaaaaaactatctacgcacaaatgtttcagaacttcaaactatgtgcccttcagaagtaacaaatatggaaatcacatctgaacaaaacaaggggagtttgaacaatattgtcgagggaactgaaaaacaatctcacagtcaatctacttcactgtaatgttgcttttcttattttagtcgggcaaacctcttgttgatcatagtcttcaagttgaacatcaaatttgaacgtcaaagaagactctattattttaccccaaattcaatgaaatgcagttttttttctcgtttttaatttaaaaagatattaacctcatcactactaactcactcatataatagatttaccttactttttaaaaactacaaagtagcataatttgttctacatttatttgaaaagtaagtaattttaatctcttttttagtgggaatatgtgggcatgaaaattagatacccaacttaaaccaaaggcatgtctatcatgtggatgcagtaacatttacatttagtttttgatcgtagttttatatgaatgttccaagaaaaaagcagactgttacaaataagttaaaactgatatgattgataggttctgttttttcttgaagcctatgtatttggtaagaagaaatactaccgaagtaaaatataatgtacctagattgtaggagatgacagacataaggtatttcaaaataaatctcaggtgctataacatgtagtcatctgttttctgataagaacatcttttactctgacttgcttttatcttagtagtatgcttatggatttagtagtatgcttatggatttgataaatcttatactttttcagttgctgtcttattctctttatttctcattgtgctttcccttcccttctttataatgaaaataaatct

SEQ ID NO: 15021 - DNA, 7032 bp, Homo sapiens
  source 1..7032: mol_type = unassigned DNA
caacgtgctgagctaatagcgacagatagagggcagacagattcctgctagcagcttagtgttagttgcttgtggtaactaaggcaggtggcatacatctcagaacgtggagaatgatggtatgctttctgagttaacatgttgaactgttttgcttttctaaaaattttcctagtaacattttcttgatgatatgagagtggatatcaatgcctcacagaaacaagaggtggaacatgtgaatgaatcgtcttggaactagattatgagcactggttctttttaaagggatgtgcaagaggcagccttggcaagaaaacttgctgcataatcttacatggactaaagatgaaactttaaaccgcaaatcagctttgagtgaactttgacagaagatgtttcgacagttttatctctggacatgtttagcttcagggatcatcctgggctctctctttgaaatctgcttgggccagtatgatgatgactggcaatatgaggattgcaaactagctaggggaggaccaccagctaccatagttgctattgatgaagaaagtcggaatggtacaattctggtggacaacatgctgatcaaagggactgctggaggaccagaccccaccatagaactttctttaaaggataatgtggattactgggtgttgatggatcctgttaagcaaatgcttttcctgaacagcaccggaagagttctggatagagatccaccgatgaacatacactccattgtggtgcaggtccagtgcatcaacaaaaaagtgggcactattatctaccatgaagtgcgaatagtggtgagagacaggaatgacaactcacccactttcaagcatgaaagctactatgccacagtgaatgagctcactccagttggtaccacaatattcacaggattttcaggagacaatggagctacagatatagatgatggaccaaatggacagatagagtatgttattcagtataatccagatgatccgacatccaatgacacctttgaaattcccctaatgttgactggaaatatagtgttaaggaagaggctcaactatgaagataagactcgctactttgtcataatccaagctaatgaccgtgcccaaaatctgaatgagaggcgaaccaccaccaccactctcacagtggatgttctggatggagatgacttgggtccaatgtttcttccttgtgtccttgtgccaaacactcgtgattgccgtccactcacttatcaagctgccatacctgagttgagaactccggaagaactgaaccccattattgttacgccaccaatccaagccattgatcaggaccggaatattcaaccgccatcagataggccaggaatcctctattccatccttgttgggactcctgaggattacccacgatttttccatatgcatcctaggacagcagaacttagtctcctggagccagtaaacagagactttcaccagaaatttgatttggttattaaggctgaacaagacaatggtcatcctcttcctgcctttgccggtctacacattgaaatactggatgaaaacaatcaaagtccatattttacaatgcccagttatcaaggctatatcctggaatctgccccagtgggagcaaccatttcggacagtctcaatttgacttcacctttaagaatagtagctctggacaaggacatagaagatacaaaagacccagagcttcacctttttctgaatgactacacctcagtcttcaccgtcacacagactggtattactcgctacctcaccttacttcaaccagtggacagggaagaacagcaaacttacaccttttcgataacagcatttgatggtgtacaagaaagtgagccagtcatcgtcaatattcaagtgatggatgcaaatgataacacgccaaccttccctgaaatatcctatgatgtgtatgtttatacagacatgagacctggggacagtgtcatacagctcactgcagtcgacgcagacgaagggtcaaatggggagatcacatatgaaatccttgttggggctcagggagacttcatcatcaataaaacaacagggcttatcaccatcgctccaggggtggaaatgatagtcgggcggacttacgcactcacggtccaagcagcggataatgctcctcctgcagagcgaaggaactccatctgcactgtgtatattgaagtgcttccaccaaataatcaaagccctcctcgcttcccacagctgatgtatagccttgaaattagtgaagccatgagggttggtgctgttttattaaatctacaggcaactgatcgagagggagactcaataacatatgccattgagaatggagatcctcagagagtttttaatctttcagaaaccacggggattctaaccttagggaaagcactggacagggaaagcactgatcgctacattctgatcatcacagcttcagatggcaggccagatgggacctcaactgccacagtaaacatagtggtgacagatgtcaatgacaatgctccagtgtttgatccttatctgccaagaaatttatctgtggtggaagaagaagccaatgcctttgtgggtcaagtaaaagcaacagaccctgatgctggaataaatggtcaagtgcactacagtttgggtaactttaataatctttttcgtatcacatccaatgggagcatttacacagcagtgaagcttaacagagaagtcagggactactatgaacttgttgttgtggcaacagatggagcagtacaccctcgtcattcaactctaaccttggccatcaaggttttggacattgatgataacagtcctgtgttcaccaattcaacatacactgtccttgttgaagagaatttgccagctgggactaccatccttcaaatagaggccaaagatgtcgaccttggagcaaatgtgtcttaccggataagaagcccagaagtgaagcacttttttgcactacatccatttacaggagaactatcgcttttaaggagtttagattatgaggcatttccagaccaagaagcaagtatcacttttctggtagaggcctttgatatttatggaacaatgccacctggtattgctactgtcacagtgattgtaaaggatatgaatgattatcctcctgtctttagtaaacgaatatacaaagggatggtggctccggatgcagtcaagggtacacctatcacaacagtttatgctgaagatgcagaccctcctggattacctgcaagtcgtgtgaggtatagagtagatgatgtacagtttccttaccctgccagtatttttgaagtggaagaagattctggaagagtaataacacgagtcaatcttaatgaagaacctacaacaatttttaagttggtggtggttgcttttgatgatggggagcctgtgatgtccagcagtgccacagtgaagattcttgtcttacatcctggtgagatcccacgcttcacacaggaggaatatagacctcctccagtaagtgaacttgccaccaaagggaccatggttggtgtaatttctgctgctgccattaatcaaagtattgtgtactccattgtttcaggaaatgaagaagatacatttggaattaataacatcacaggtgttatctatgtgaatggacctctggattatgagaccaggacaagctatgtacttcgagtccaagctgattccctggaagtggtccttgccaatctccgagttccttcaaaaagcaatacagctaaagtatacattgagattcaggatgaaaataatcatcccccagtgtttcagaaaaaattctacatcggaggtgtatctgaagatgcaagaatgtttacttctgtactcagagtgaaggctactgataaagatactggcaattatagtgtcatggcctacagactcataataccaccaattaaagagggaaaagaaggatttgtagtggaaacatatacagggcttatcaaaactgctatgctcttccataatatgaggagatcctacttcaagtttcaagttattgcaactgacgactatgggaagggactgagcggcaaagccgatgtactcgtctccgtggtcaatcagctggatatgcaagtcattgtttccaatgtgcctcctactctagtggaaaaaaagatagaagatcttacagagatcttggatcgctatgttcaggaacaaattcctggtgccaaggtcgtagtggagtccattggagctcgccggcatggagatgccttttccctagaagattacaccaaatgtgacttgactgtctatgcaattgacccccaaaccaacagagccatcgatagaaatgagctttttaaatttttggatggcaaactacttgatatcaataaagactttcagccgtattatggggaaggaggacgcattctggagatccggactccagaggcagtgaccagcattaaaaagagaggagaaagtctaggatacacagaaggggccttgttggctctggccttcatcatcatcctctgctgcattcctgccatcttggtggttttggtcagctacagacagtttaaagtacgtcaagctgagtgtacaaagactgcacgaattcaggccgcattacccgcggctaaaccagcagtgccggctcctgcaccagtggcagcgcccccgccgccgccgccgcctccgccaggtgcgcatctctatgaagaacttggagacagctcaatgcataatcttttccttctctaccattttcaacaaagcaggggaaataactcagtctcagaagacaggaaacatcaacaagttgtgatgcccttttcttccaatactattgaggctcacaagtcagctcatgtagacggatcacttaagagcaacaaactgaagtctgcaagaaaattcacatttctatctgatgaggatgacttaagtgcccataatcccctttataaggaaaacataagtcaagtatcaacaaattcagacatttcacagagaacagattttgtagacccattttcacccaaaatacaagccaagagtaagtctctgaggggcccaagagaaaagattcagaggctgtggagtcagtcagtcagcttacccaggaggctgatgaggaaagttccaaatagaccagagatcatagatctgcagcagtggcaaggcaccaggcagaaagctgaaaatgaaaacactggaatctgtacaaacaaaagaggtagcagcaatccattgcttacaactgaagaggcaaatttgacagagaaagaggaaataaggcaaggtgaaacactgatgatagaaggaacagaacagttgaaatctctctcttcagactcttcattttgctttcccaggcctcacttctcattctccactttgccaactgtttcaagaactgtggaactcaaatcagaacctaatgtcatcagttctcctgctgagtgttccttggaactttctccttcaaggccttgtgttttacattcttcactctctaggagagagacacctatttgtatgttacctattgaaaccgaaagaaatatttttgaaaattttgcccatccaccaaacatctctccttctgcctgtccccttccccctcctcctcctatttctcctccttctcctcctcctgctcctgctcctcttgctcctcctcctgacatttctcctttttctcttttttgtcctcctccctctcctccttctatccctcttcctcttcctcctcctacattttttccactttccgtttcaacgtctggtcccccaacaccacctcttctacctccatttccaactcctcttcctccaccacctccttctattccttgccctccacctccttcagcttcatttctgtccacagagtgtgtctgtataacaggtgttaaatgcacgaccaacttgatgcctgccgagaaaattaagtcctctatgacacagctatcaacaacgacagtgtgtaaaacagaccctcagagagaaccaaaaggcatcctcagacacgttaaaaacttagcagaacttgaaaaatcagtagctaacatgtacagtcaaatagaaaaaaactatctacgcacaaatgtttcagaacttcaaactatgtgcccttcagaagtaacaaatatggaaatcacatctgaacaaaacaaggggagtttgaacaatattgtcgagggaactgaaaaacaatctcacagtcaatctacttcactgtaatgttgcttttcttattttagtcgggcaaacctcttgttgatcatagtcttcaagttgaacatcaaatttgaacgtcaaagaagactctattattttaccccaaattcaatgaaatgcagttttttttctcgtttttaatttaaaaagatattaacctcatcactactaactcactcatataatagatttaccttactttttaaaaactacaaagtagcataatttgttctacatttatttgaaaagtaagtaattttaatctcttttttagtgggaatatgtgggcatgaaaattagatacccaacttaaaccaaaggcatgtctatcatgtggatgcagtaacatttacatttagtttttgatcgtagttttatatgaatgttccaagaaaaaagcagactgttacaaataagttaaaactgatatgattgataggttctgttttttcttgaagcctatgtatttggtaagaagaaatactaccgaagtaaaatataatgtacctagattgtaggagatgacagacataaggtatttcaaaataaatctcaggtgctataacatgtagtcatctgttttctgataagaacatcttttactctgacttgcttttatcttagtagtatgcttatggatttagtagtatgcttatggatttgataaatcttatactttttcagttgctgtcttattctctttatttctcattgtgctttcccttcccttctttataatgaaaataaatct

SEQ ID NO: 15022 - DNA, 6937 bp, Homo sapiens
  source 1..6937: mol_type = unassigned DNA
caacgtgctgagctaatagcgacagatagagggcagacagattcctgctagcagcttagtgttagttgcttgtggtaactaaggcaggtggcatacatctcagaacgtggagaatgatggtatgctttctgagttaacatgttgaactgttttgcttttctaaaaattttcctagtaacattttcttgatgatatgagagtggatatcaatgcctcacagaaacaagaggtggaacatgtgaatgaatcgtcttggaactagattatgagcactggttctttttaaagggatgtgcaagaggcagccttggcaagaaaacttgctgcataatcttacatggactaaagatgaaactttaaaccgcaaatcagctttgagtgaactttgacagaagatgtttcgacagttttatctctggacatgtttagcttcagggatcatcctgggctctctctttgaaatctgcttgggccagtatgatgatgattgcaaactagctaggggaggaccaccagctaccatagttgctattgatgaagaaagtcggaatggtacaattctggtggacaacatgctgatcaaagggactgctggaggaccagaccccaccatagaactttctttaaaggataatgtggattactgggtgttgatggatcctgttaagcaaatgcttttcctgaacagcaccggaagagttctggatagagatccaccgatgaacatacactccattgtggtgcaggtccagtgcatcaacaaaaaagtgggcactattatctaccatgaagtgcgaatagtggtgagagacaggaatgacaactcacccactttcaagcatgaaagctactatgccacagtgaatgagctcactccagttggtaccacaatattcacaggattttcaggagacaatggagctacagatatagatgatggaccaaatggacagatagagtatgttattcagtataatccagatgatccgacatccaatgacacctttgaaattcccctaatgttgactggaaatatagtgttaaggaagaggctcaactatgaagataagactcgctactttgtcataatccaagctaatgaccgtgcccaaaatctgaatgagaggcgaaccaccaccaccactctcacagtggatgttctggatggagatgacttgggtccaatgtttcttccttgtgtccttgtgccaaacactcgtgattgccgtccactcacttatcaagctgccatacctgagttgagaactccggaagaactgaaccccattattgttacgccaccaatccaagccattgatcaggaccggaatattcaaccgccatcagataggccaggaatcctctattccatccttgttgggactcctgaggattacccacgatttttccatatgcatcctaggacagcagaacttagtctcctggagccagtaaacagagactttcaccagaaatttgatttggttattaaggctgaacaagacaatggtcatcctcttcctgcctttgccggtctacacattgaaatactggatgaaaacaatcaaagtccatattttacaatgcccagttatcaaggctatatcctggaatctgccccagtgggagcaaccatttcggacagtctcaatttgacttcacctttaagaatagtagctctggacaaggacatagaagatacaaaagacccagagcttcacctttttctgaatgactacacctcagtcttcaccgtcacacagactggtattactcgctacctcaccttacttcaaccagtggacagggaagaacagcaaacttacaccttttcgataacagcatttgatggtgtacaagaaagtgagccagtcatcgtcaatattcaagtgatggatgcaaatgataacacgccaaccttccctgaaatatcctatgatgtgtatgtttatacagacatgagacctggggacagtgtcatacagctcactgcagtcgacgcagacgaagggtcaaatggggagatcacatatgaaatccttgttggggctcagggagacttcatcatcaataaaacaacagggcttatcaccatcgctccaggggtggaaatgatagtcgggcggacttacgcactcacggtccaagcagcggataatgctcctcctgcagagcgaaggaactccatctgcactgtgtatattgaagtgcttccaccaaataatcaaagccctcctcgcttcccacagctgatgtatagccttgaaattagtgaagccatgagggttggtgctgttttattaaatctacagcacggggattctaaccttagggaaagcactggacagggaaagcactgatcgctacattctgatcatcacagcttcagatggcaggccagatgggacctcaactgccacagtaaacatagtggtgacagatgtcaatgacaatgctccagtgtttgatccttatctgccaagaaatttatctgtggtggaagaagaagccaatgcctttgtgggtcaagtaaaagcaacagaccctgatgctggaataaatggtcaagtgcactacagtttgggtaactttaataatctttttcgtatcacatccaatgggagcatttacacagcagtgaagcttaacagagaagtcagggactactatgaacttgttgttgtggcaacagatggagcagtacaccctcgtcattcaactctaaccttggccatcaaggttttggacattgatgataacagtcctgtgttcaccaattcaacatacactgtccttgttgaagagaatttgccagctgggactaccatccttcaaatagaggccaaagatgtcgaccttggagcaaatgtgtcttaccggataagaagcccagaagtgaagcacttttttgcactacatccatttacaggagaactatcgcttttaaggagtttagattatgaggcatttccagaccaagaagcaagtatcacttttctggtagaggcctttgatatttatggaacaatgccacctggtattgctactgtcacagtgattgtaaaggatatgaatgattatcctcctgtctttagtaaacgaatatacaaagggatggtggctccggatgcagtcaagggtacacctatcacaacagtttatgctgaagatgcagaccctcctggattacctgcaagtcgtgtgaggtatagagtagatgatgtacagtttccttaccctgccagtatttttgaagtggaagaagattctggaagagtaataacacgagtcaatcttaatgaagaacctacaacaatttttaagttggtggtggttgcttttgatgatggggagcctgtgatgtccagcagtgccacagtgaagattcttgtcttacatcctggtgagatcccacgcttcacacaggaggaatatagacctcctccagtaagtgaacttgccaccaaagggaccatggttggtgtaatttctgctgctgccattaatcaaagtattgtgtactccattgtttcaggaaatgaagaagatacatttggaattaataacatcacaggtgttatctatgtgaatggacctctggattatgagaccaggacaagctatgtacttcgagtccaagctgattccctggaagtggtccttgccaatctccgagttccttcaaaaagcaatacagctaaagtatacattgagattcaggatgaaaataatcatcccccagtgtttcagaaaaaattctacatcggaggtgtatctgaagatgcaagaatgtttacttctgtactcagagtgaaggctactgataaagatactggcaattatagtgtcatggcctacagactcataataccaccaattaaagagggaaaagaaggatttgtagtggaaacatatacagggcttatcaaaactgctatgctcttccataatatgaggagatcctacttcaagtttcaagttattgcaactgacgactatgggaagggactgagcggcaaagccgatgtactcgtctccgtggtcaatcagctggatatgcaagtcattgtttccaatgtgcctcctactctagtggaaaaaaagatagaagatcttacagagatcttggatcgctatgttcaggaacaaattcctggtgccaaggtcgtagtggagtccattggagctcgccggcatggagatgccttttccctagaagattacaccaaatgtgacttgactgtctatgcaattgacccccaaaccaacagagccatcgatagaaatgagctttttaaatttttggatggcaaactacttgatatcaataaagactttcagccgtattatggggaaggaggacgcattctggagatccggactccagaggcagtgaccagcattaaaaagagaggagaaagtctaggatacacagaaggggccttgttggctctggccttcatcatcatcctctgctgcattcctgccatcttggtggttttggtcagctacagacagtttaaagtacgtcaagctgagtgtacaaagactgcacgaattcaggccgcattacccgcggctaaaccagcagtgccggctcctgcaccagtggcagcgcccccgccgccgccgccgcctccgccaggtgcgcatctctatgaagaacttggagacagctcaatgcataatcttttccttctctaccattttcaacaaagcaggggaaataactcagtctcagaagacaggaaacatcaacaagttgtgatgcccttttcttccaatactattgaggctcacaagtcagctcatgtagacggatcacttaagagcaacaaactgaagtctgcaagaaaattcacatttctatctgatgaggatgacttaagtgcccataatcccctttataaggaaaacataagtcaagtatcaacaaattcagacatttcacagagaacagattttgtagacccattttcacccaaaatacaagccaagagtaagtctctgaggggcccaagagaaaagattcagaggctgtggagtcagtcagtcagcttacccaggaggctgatgaggaaagttccaaatagaccagagatcatagatctgcagcagtggcaaggcaccaggcagaaagctgaaaatgaaaacactggaatctgtacaaacaaaagaggtagcagcaatccattgcttacaactgaagaggcaaatttgacagagaaagaggaaataaggcaaggtgaaacactgatgatagaaggaacagaacagttgaaatctctctcttcagactcttcattttgctttcccaggcctcacttctcattctccactttgccaactgtttcaagaactgtggaactcaaatcagaacctaatgtcatcagttctcctgctgagtgttccttggaactttctccttcaaggccttgtgttttacattcttcactctctaggagagagacacctatttgtatgttacctattgaaaccgaaagaaatatttttgaaaattttgcccatccaccaaacatctctccttctgcctgtccccttccccctcctcctcctatttctcctccttctcctcctcctgctcctgctcctcttgctcctcctcctgacatttctcctttttctcttttttgtcctcctccctctcctccttctatccctcttcctcttcctcctcctacattttttccactttccgtttcaacgtctggtcccccaacaccacctcttctacctccatttccaactcctcttcctccaccacctccttctattccttgccctccacctccttcagcttcatttctgtccacagagtgtgtctgtataacaggtgttaaatgcacgaccaacttgatgcctgccgagaaaattaagtcctctatgacacagctatcaacaacgacagtgtgtaaaacagaccctcagagagaaccaaaaggcatcctcagacacgttaaaaacttagcagaacttgaaaaatcagtagctaacatgtacagtcaaatagaaaaaaactatctacgcacaaatgtttcagaacttcaaactatgtgcccttcagaagtaacaaatatggaaatcacatctgaacaaaacaaggggagtttgaacaatattgtcgagggaactgaaaaacaatctcacagtcaatctacttcactgtaatgttgcttttcttattttagtcgggcaaacctcttgttgatcatagtcttcaagttgaacatcaaatttgaacgtcaaagaagactctattattttaccccaaattcaatgaaatgcagttttttttctcgtttttaatttaaaaagatattaacctcatcactactaactcactcatataatagatttaccttactttttaaaaactacaaagtagcataatttgttctacatttatttgaaaagtaagtaattttaatctcttttttagtgggaatatgtgggcatgaaaattagatacccaacttaaaccaaaggcatgtctatcatgtggatgcagtaacatttacatttagtttttgatcgtagttttatatgaatgttccaagaaaaaagcagactgttacaaataagttaaaactgatatgattgataggttctgttttttcttgaagcctatgtatttggtaagaagaaatactaccgaagtaaaatataatgtacctagattgtaggagatgacagacataaggtatttcaaaataaatctcaggtgctataacatgtagtcatctgttttctgataagaacatcttttactctgacttgcttttatcttagtagtatgcttatggatttagtagtatgcttatggatttgataaatcttatactttttcagttgctgtcttattctctttatttctcattgtgctttcccttcccttctttataatgaaaataaatct

SEQ ID NO: 15023 - DNA, 6804 bp, Homo sapiens
  source 1..6804: mol_type = unassigned DNA
caacgtgctgagctaatagcgacagatagagggcagacagattcctgctagcagcttagtgttagttgcttgtggtaactaaggcaggtggcatacatctcagaacgtggagaatgatggtatgctttctgagttaacatgttgaactgttttgcttttctaaaaattttcctagtaacattttcttgatgatatgagagtggatatcaatgcctcacagaaacaagaggtggaacatgtgaatgaatcgtcttggaactagattatgagcactggttctttttaaagggatgtgcaagaggcagccttggcaagaaaacttgctgcataatcttacatggactaaagatgaaactttaaaccgcaaatcagctttgagtgaactttgacagaagatgtttcgacagttttatctctggacatgtttagcttcagggatcatcctgggctctctctttgaaatctgcttgggccagtatgatgatgattgcaaactagctaggggaggaccaccagctaccatagttgctattgatgaagaaagtcggaatggtacaattctggtggacaacatgctgatcaaagggactgctggaggaccagaccccaccatagaactttctttaaaggataatgtggattactgggtgttgatggatcctgttaagcaaatgcttttcctgaacagcaccggaagagttctggatagagatccaccgatgaacatacactccattgtggtgcaggtccagtgcatcaacaaaaaagtgggcactattatctaccatgaagtgcgaatagtggtgagagacaggaatgacaactcacccactttcaagcatgaaagctactatgccacagtgaatgagctcactccagttggtaccacaatattcacaggattttcaggagacaatggagctacagatatagatgatggaccaaatggacagatagagtatgttattcagtataatccagatgatccgacatccaatgacacctttgaaattcccctaatgttgactggaaatatagtgttaaggaagaggctcaactatgaagataagactcgctactttgtcataatccaagctaatgaccgtgcccaaaatctgaatgagaggcgaaccaccaccaccactctcacagtggatgttctggatggagatgacttgggtccaatgtttcttccttgtgtccttgtgccaaacactcgtgattgccgtccactcacttatcaagctgccatacctgagttgagaactccggaagaactgaaccccattattgttacgccaccaatccaagccattgatcaggaccggaatattcaaccgccatcagataggccaggaatcctctattccatccttgttgggactcctgaggattacccacgatttttccatatgcatcctaggacagcagaacttagtctcctggagccagtaaacagagactttcaccagaaatttgatttggttattaaggctgaacaagacaatggtcatcctcttcctgcctttgccggtctacacattgaaatactggatgaaaacaatcaaagtccatattttacaatgcccagttatcaaggctatatcctggaatctgccccagtgggagcaaccatttcggacagtctcaatttgacttcacctttaagaatagtagctctggacaaggacatagaagatacaaaagacccagagcttcacctttttctgaatgactacacctcagtcttcaccgtcacacagactggtattactcgctacctcaccttacttcaaccagtggacagggaagaacagcaaacttacaccttttcgataacagcatttgatggtgtacaagaaagtgagccagtcatcgtcaatattcaagtgatggatgcaaatgataacacgccaaccttccctgaaatatcctatgatgtgtatgtttatacagacatgagacctggggacagtgtcatacagctcactgcagtcgacgcagacgaagggtcaaatggggagatcacatatgaaatccttgttggggctcagggagacttcatcatcaataaaacaacagggcttatcaccatcgctccaggggtggaaatgatagtcgggcggacttacgcactcacggtccaagcagcggataatgctcctcctgcagagcgaagcacggggattctaaccttagggaaagcactggacagggaaagcactgatcgctacattctgatcatcacagcttcagatggcaggccagatgggacctcaactgccacagtaaacatagtggtgacagatgtcaatgacaatgctccagtgtttgatccttatctgccaagaaatttatctgtggtggaagaagaagccaatgcctttgtgggtcaagtaaaagcaacagaccctgatgctggaataaatggtcaagtgcactacagtttgggtaactttaataatctttttcgtatcacatccaatgggagcatttacacagcagtgaagcttaacagagaagtcagggactactatgaacttgttgttgtggcaacagatggagcagtacaccctcgtcattcaactctaaccttggccatcaaggttttggacattgatgataacagtcctgtgttcaccaattcaacatacactgtccttgttgaagagaatttgccagctgggactaccatccttcaaatagaggccaaagatgtcgaccttggagcaaatgtgtcttaccggataagaagcccagaagtgaagcacttttttgcactacatccatttacaggagaactatcgcttttaaggagtttagattatgaggcatttccagaccaagaagcaagtatcacttttctggtagaggcctttgatatttatggaacaatgccacctggtattgctactgtcacagtgattgtaaaggatatgaatgattatcctcctgtctttagtaaacgaatatacaaagggatggtggctccggatgcagtcaagggtacacctatcacaacagtttatgctgaagatgcagaccctcctggattacctgcaagtcgtgtgaggtatagagtagatgatgtacagtttccttaccctgccagtatttttgaagtggaagaagattctggaagagtaataacacgagtcaatcttaatgaagaacctacaacaatttttaagttggtggtggttgcttttgatgatggggagcctgtgatgtccagcagtgccacagtgaagattcttgtcttacatcctggtgagatcccacgcttcacacaggaggaatatagacctcctccagtaagtgaacttgccaccaaagggaccatggttggtgtaatttctgctgctgccattaatcaaagtattgtgtactccattgtttcaggaaatgaagaagatacatttggaattaataacatcacaggtgttatctatgtgaatggacctctggattatgagaccaggacaagctatgtacttcgagtccaagctgattccctggaagtggtccttgccaatctccgagttccttcaaaaagcaatacagctaaagtatacattgagattcaggatgaaaataatcatcccccagtgtttcagaaaaaattctacatcggaggtgtatctgaagatgcaagaatgtttacttctgtactcagagtgaaggctactgataaagatactggcaattatagtgtcatggcctacagactcataataccaccaattaaagagggaaaagaaggatttgtagtggaaacatatacagggcttatcaaaactgctatgctcttccataatatgaggagatcctacttcaagtttcaagttattgcaactgacgactatgggaagggactgagcggcaaagccgatgtactcgtctccgtggtcaatcagctggatatgcaagtcattgtttccaatgtgcctcctactctagtggaaaaaaagatagaagatcttacagagatcttggatcgctatgttcaggaacaaattcctggtgccaaggtcgtagtggagtccattggagctcgccggcatggagatgccttttccctagaagattacaccaaatgtgacttgactgtctatgcaattgacccccaaaccaacagagccatcgatagaaatgagctttttaaatttttggatggcaaactacttgatatcaataaagactttcagccgtattatggggaaggaggacgcattctggagatccggactccagaggcagtgaccagcattaaaaagagaggagaaagtctaggatacacagaaggggccttgttggctctggccttcatcatcatcctctgctgcattcctgccatcttggtggttttggtcagctacagacagtttaaagtacgtcaagctgagtgtacaaagactgcacgaattcaggccgcattacccgcggctaaaccagcagtgccggctcctgcaccagtggcagcgcccccgccgccgccgccgcctccgccaggtgcgcatctctatgaagaacttggagacagctcaatgcataatcttttccttctctaccattttcaacaaagcaggggaaataactcagtctcagaagacaggaaacatcaacaagttgtgatgcccttttcttccaatactattgaggctcacaagtcagctcatgtagacggatcacttaagagcaacaaactgaagtctgcaagaaaattcacatttctatctgatgaggatgacttaagtgcccataatcccctttataaggaaaacataagtcaagtatcaacaaattcagacatttcacagagaacagattttgtagacccattttcacccaaaatacaagccaagagtaagtctctgaggggcccaagagaaaagattcagaggctgtggagtcagtcagtcagcttacccaggaggctgatgaggaaagttccaaatagaccagagatcatagatctgcagcagtggcaaggcaccaggcagaaagctgaaaatgaaaacactggaatctgtacaaacaaaagaggtagcagcaatccattgcttacaactgaagaggcaaatttgacagagaaagaggaaataaggcaaggtgaaacactgatgatagaaggaacagaacagttgaaatctctctcttcagactcttcattttgctttcccaggcctcacttctcattctccactttgccaactgtttcaagaactgtggaactcaaatcagaacctaatgtcatcagttctcctgctgagtgttccttggaactttctccttcaaggccttgtgttttacattcttcactctctaggagagagacacctatttgtatgttacctattgaaaccgaaagaaatatttttgaaaattttgcccatccaccaaacatctctccttctgcctgtccccttccccctcctcctcctatttctcctccttctcctcctcctgctcctgctcctcttgctcctcctcctgacatttctcctttttctcttttttgtcctcctccctctcctccttctatccctcttcctcttcctcctcctacattttttccactttccgtttcaacgtctggtcccccaacaccacctcttctacctccatttccaactcctcttcctccaccacctccttctattccttgccctccacctccttcagcttcatttctgtccacagagtgtgtctgtataacaggtgttaaatgcacgaccaacttgatgcctgccgagaaaattaagtcctctatgacacagctatcaacaacgacagtgtgtaaaacagaccctcagagagaaccaaaaggcatcctcagacacgttaaaaacttagcagaacttgaaaaatcagtagctaacatgtacagtcaaatagaaaaaaactatctacgcacaaatgtttcagaacttcaaactatgtgcccttcagaagtaacaaatatggaaatcacatctgaacaaaacaaggggagtttgaacaatattgtcgagggaactgaaaaacaatctcacagtcaatctacttcactgtaatgttgcttttcttattttagtcgggcaaacctcttgttgatcatagtcttcaagttgaacatcaaatttgaacgtcaaagaagactctattattttaccccaaattcaatgaaatgcagttttttttctcgtttttaatttaaaaagatattaacctcatcactactaactcactcatataatagatttaccttactttttaaaaactacaaagtagcataatttgttctacatttatttgaaaagtaagtaattttaatctcttttttagtgggaatatgtgggcatgaaaattagatacccaacttaaaccaaaggcatgtctatcatgtggatgcagtaacatttacatttagtttttgatcgtagttttatatgaatgttccaagaaaaaagcagactgttacaaataagttaaaactgatatgattgataggttctgttttttcttgaagcctatgtatttggtaagaagaaatactaccgaagtaaaatataatgtacctagattgtaggagatgacagacataaggtatttcaaaataaatctcaggtgctataacatgtagtcatctgttttctgataagaacatcttttactctgacttgcttttatcttagtagtatgcttatggatttagtagtatgcttatggatttgataaatcttatactttttcagttgctgtcttattctctttatttctcattgtgctttcccttcccttctttataatgaaaataaatct

SEQ ID NO: 15024 - DNA, 3469 bp, Homo sapiens
  source 1..3469: mol_type = unassigned DNA
gcttccaagcttctgccttgaaataatcaatatccaaatttggtggaagaacatggtacaatccttagtggggaagcacgtgagccaaggaaattgatgatgtcatgtacattgtatacacatgaataaaaaagtcaaaaagaacgctgttctagtgatttaactataggtgtatacttatttgcttttccttttcttactggccaacatttattttacattctttaagtagacacactacaatttcttataattgtcccagtgacttctcaagtggataatctggtgacttctccttcccgagacaaggagcaagcacatgacccaaactaggacagtcaggacacattagaaagacacgacaggggagcagatgacgtttagtcactcaggcaatacagctaaagtatacattgagattcaggatgaaaataatcatcccccagtgtttcagaaaaaattctacatcggaggtgtatctgaagatgcaagaatgtttacttctgtactcagagtgaaggctactgataaagatactggcaattatagtgtcatggcctacagactcataataccaccaattaaagagggaaaagaaggatttgtagtggaaacatatacagggcttatcaaaactgctatgctcttccataatatgaggagatcctacttcaagtttcaagttattgcaactgacgactatgggaagggactgagcggcaaagccgatgtactcgtctccgtggtcaatcagctggatatgcaagtcattgtttccaatgtgcctcctactctagtggaaaaaaagatagaagatcttacagagatcttggatcgctatgttcaggaacaaattcctggtgccaaggtcgtagtggagtccattggagctcgccggcatggagatgccttttccctagaagattacaccaaatgtgacttgactgtctatgcaattgacccccaaaccaacagagccatcgatagaaatgagctttttaaatttttggatggcaaactacttgatatcaataaagactttcagccgtattatggggaaggaggacgcattctggagatccggactccagaggcagtgaccagcattaaaaagagaggagaaagtctaggatacacagaaggggccttgttggctctggccttcatcatcatcctctgctgcattcctgccatcttggtggttttggtcagctacagacagtttaaagtacgtcaagctgagtgtacaaagactgcacgaattcaggccgcattacccgcggctaaaccagcagtgccggctcctgcaccagtggcagcgcccccgccgccgccgccgcctccgccaggtgcgcatctctatgaagaacttggagacagctcaattcttttccttctctaccattttcaacaaagcaggggaaataactcagtctcagaagacaggaaacatcaacaagttgtgatgcccttttcttccaatactattgaggctcacaagtcagctcatgtagacggatcacttaagagcaacaaactgaagtctgcaagaaaattcacatttctatctgatgaggatgacttaagtgcccataatcccctttataaggaaaacataagtcaagtatcaacaaattcagacatttcacagagaacagattttgtagacccattttcacccaaaatacaagccaagagtaagtctctgaggggcccaagagaaaagattcagaggctgtggagtcagtcagtcagcttacccaggaggctgatgaggaaagttccaaatagaccagagatcatagatctgcagcagtggcaaggcaccaggcagaaagctgaaaatgaaaacactggaatctgtacaaacaaaagaggtagcagcaatccattgcttacaactgaagaggcaaatttgacagagaaagaggaaataaggcaaggtgaaacactgatgatagaaggaacagaacagttgaaatctctctcttcagactcttcattttgctttcccaggcctcacttctcattctccactttgccaactgtttcaagaactgtggaactcaaatcagaacctaatgtcatcagttctcctgctgagtgttccttggaactttctccttcaaggccttgtgttttacattcttcactctctaggagagagacacctatttgtatgttacctattgaaaccgaaagaaatatttttgaaaattttgcccatccaccaaacatctctccttctgcctgtccccttccccctcctcctcctatttctcctccttctcctcctcctgctcctgctcctcttgctcctcctcctgacatttctcctttttctcttttttgtcctcctccctctcctccttctatccctcttcctcttcctcctcctacattttttccactttccgtttcaacgtctggtcccccaacaccacctcttctacctccatttccaactcctcttcctccaccacctccttctattccttgccctccacctccttcagcttcatttctgtccacagagtgtgtctgtataacaggtgttaaatgcacgaccaacttgatgcctgccgagaaaattaagtcctctatgacacagctatcaacaacgacagtgtgtaaaacagaccctcagagagaaccaaaaggcatcctcagacacgttaaaaacttagcagaacttgaaaaatcagtagctaacatgtacagtcaaatagaaaaaaactatctacgcacaaatgtttcagaacttcaaactatgtgcccttcagaagtaacaaatatggaaatcacatctgaacaaaacaaggggagtttgaacaatattgtcgagggaactgaaaaacaatctcacagtcaatctacttcactgtaatgttgcttttcttattttagtcgggcaaacctcttgttgatcatagtcttcaagttgaacatcaaatttgaacgtcaaagaagactctattattttaccccaaattcaatgaaatgcagttttttttctcgtttttaatttaaaaagatattaacctcatcactactaactcactcatataatagatttaccttactttttaaaaactacaaagtagcataatttgttctacatttatttgaaaagtaagtaattttaatctcttttttagtgggaatatgtgggcatgaaaattagatacccaacttaaaccaaaggcatgtctatcatgtggatgcagtaacatttacatttagtttttgatcgtagttttatatgaatgttccaagaaaaaagcagactgttacaaataagttaaaactgatatgattgataggttctgttttttcttgaagcctatgtatttggtaagaagaaatactaccgaagtaaaatataatgtacctagattgtaggagatgacagacataaggtatttcaaaataaatctcaggtgctataacatgtagtcatctgttttct

SEQ ID NO: 15025 - DNA, 6845 bp, Homo sapiens
  source 1..6845: mol_type = unassigned DNA
caacgtgctgagctaatagcgacagatagagggcagacagattcctgctagcagcttagtgttagttgcttgtggtaactaaggcaggtggcatacatctcagaacgtggagaatgatggtatgctttctgagttaacatgttgaactgttttgcttttctaaaaattttcctagtaacattttcttgatgatatgagagtggatatcaatgcctcacagaaacaagaggtggaacatgtgaatgaatcgtcttggaactagattatgagcactggttctttttaaagggatgtgcaagaggcagccttggcaagaaaacttgctgcataatcttacatggactaaagatgaaactttaaaccgcaaatcagctttgagtgaactttgacagaagatgtttcgacagttttatctctggacatgtttagcttcagggatcatcctgggctctctctttgaaatctgcttgggccagtatgatgatgattgcaaactagctaggggaggaccaccagctaccatagttgctattgatgaagaaagtcggaatggtacaattctggtggacaacatgctgatcaaagggactgctggaggaccagaccccaccatagaactttctttaaaggataatgtggattactgggtgttgatggatcctgttaagcaaatgcttttcctgaacagcaccggaagagttctggatagagatccaccgatgaacatacactccattgtggtgcaggtccagtgcatcaacaaaaaagtgggcactattatctaccatgaagtgcgaatagtggtgagagacaggaatgacaactcacccactttcaagcatgaaagctactatgccacagtgaatgagctcactccagttggtaccacaatattcacaggattttcaggagacaatggagctacagatatagatgatggaccaaatggacagatagagtatgttattcagtataatccagatgatccgacatccaatgacacctttgaaattcccctaatgttgactggaaatatagtgttaaggaagaggctcaactatgaagataagactcgctactttgtcataatccaagctaatgaccgtgcccaaaatctgaatgagaggcgaaccaccaccaccactctcacagtggatgttctggatggagatgacttgggtccaatgtttcttccttgtgtccttgtgccaaacactcgtgattgccgtccactcacttatcaagctgccatacctgagttgagaactccggaagaactgaaccccattattgttacgccaccaatccaagccattgatcaggaccggaatattcaaccgccatcagataggccaggaatcctctattccatccttgttgggactcctgaggattacccacgatttttccatatgcatcctaggacagcagaacttagtctcctggagccagtaaacagagactttcaccagaaatttgatttggttattaaggctgaacaagacaatggtcatcctcttcctgcctttgccggtctacacattgaaatactggatgaaaacaatcaaagtccatattttacaatgcccagttatcaaggctatatcctggaatctgccccagtgggagcaaccatttcggacagtctcaatttgacttcacctttaagaatagtagctctggacaaggacatagaagatacaaaagacccagagcttcacctttttctgaatgactacacctcagtcttcaccgtcacacagactggtattactcgctacctcaccttacttcaaccagtggacagggaagaacagcaaacttacaccttttcgataacagcatttgatggtgtacaagaaagtgagccagtcatcgtcaatattcaagtgatggatgcaaatgataacacgccaaccttccctgaaatatcctatgatgtgtatgtttatacagacatgagacctggggacagtgtcatacagctcactgcagtcgacgcagacgaagggtcaaatggggagatcacatatgaaatccttgttggggctcagggagacttcatcatcaataaaacaacagggcttatcaccatcgctccaggggtggaaatgatagtcgggcggacttacgcactcacggtccaagcagcggataatgctcctcctgcagagcgaaggaactccatctgcactgtgtatattgaagtgcttccaccaaataatcaaagccctcctcgcttcccacagctgatgtatagccttgaaattagtgaagccatgagggttggtgctgttttattaaatctacaggcaactgatcgagagggagactcaataacatatgccattgagaatggagatcctcagagagtttttaatctttcagaaaccacggggattctaaccttagggaaagcactggacagggaaagcactgatcgctacattctgatcatcacagcttcagatggcaggccagatgggacctcaactgccacagtaaacatagtggtgacagatgtcaatgacaatgctccagtgtttgatccttatctgccaagaaatttatctgtggtggaagaagaagccaatgcctttgtgggtcaagtaaaagcaacagaccctgatgctggaataaatggtcaagtgcactacagtttgggtaactttaataatctttttcgtatcacatccaatgggagcatttacacagcagtgaagcttaacagagaagtcagggactactatgaacttgttgttgtggcaacagatggagcagtacaccctcgtcattcaactctaaccttggccatcaaggttttggacattgatgataacagtcctgtgttcaccaattcaacatacactgtccttgttgaagagaatttgccagctgggactaccatccttcaaatagaggccaaagatgtcgaccttggagcaaatgtgtcttaccggataagaagcccagaagtgaagcacttttttgcactacatccatttacaggagaactatcgcttttaaggagtttagattatgaggcatttccagaccaagaagcaagtatcacttttctggtagaggcctttgatatttatggaacaatgccacctggtattgctactgtcacagtgattgtaaaggatatgaatgattatcctcctgtctttagtaaacgaatatacaaagggatggtggctccggatgcagtcaagggtacacctatcacaacagtttatgctgaagatgcagaccctcctggattacctgcaagtcgtgtgaggtatagagtagatgatgtacagtttccttaccctgccagtatttttgaagtggaagaagattctggaagagtaataacacgagtcaatcttaatgaagaacctacaacaatttttaagttggtggtggttgcttttgatgatggggagcctgtgatgtccagcagtgccacagtgaagattcttgtcttacatcctggtgagatcccacgcttcacacaggaggaatatagacctcctccagtaagtgaacttgccaccaaagggaccatggttggtgtaatttctgctgctgccattaatcaaagtattgtgtactccattgtttcaggaaatgaagaagatacatttggaattaataacatcacaggtgttatctatgtgaatggacctctggattatgagaccaggacaagctatgtacttcgagtccaagctgattccctggaagtggtccttgccaatctccgagttccttcaaaaagcaatacagctaaagtatacattgagattcaggatgaaaataatcatcccccagtgtttcagaaaaaattctacatcggaggtgtatctgaagatgcaagaatgtttacttctgtactcagagtgaaggctactgataaagatactggcaattatagtgtcatggcctacagactcataataccaccaattaaagagggaaaagaaggatttgtagtggaaacatatacagggcttatcaaaactgctatgctcttccataatatgaggagatcctacttcaagtttcaagttattgcaactgacgactatgggaagggactgagcggcaaagccgatgtactcgtctccgtggtcaatcagctggatatgcaagtcattgtttccaatgtgcctcctactctagtggaaaaaaagatagaagatcttacagagatcttggatcgctatgttcaggaacaaattcctggtgccaaggtcgtagtggagtccattggagctcgccggcatggagatgccttttccctagaagattacaccaaatgtgacttgactgtctatgcaattgacccccaaaccaacagagccatcgatagaaatgagctttttaaatttttggatggcaaactacttgatatcaataaagactttcagccgtattatggggaaggaggacgcattctggagatccggactccagaggcagtgaccagcattaaaaagagaggagaaagtctaggatacacagaaggggccttgttggctctggccttcatcatcatcctctgctgcattcctgccatcttggtggttttggtcagctacagacagtttaaagtacgtcaagctgagtgtacaaagactgcacgaattcaggccgcattacccgcggctaaaccagcagtgccggctcctgcaccagtggcagcgcccccgccgccgccgccgcctccgccaggtgcgcatctctatgaagaacttggagacagctcaattcttttccttctctaccattttcaacaaagcaggggaaataactcagtctcagaagacaggaaacatcaacaagttgtgatgcccttttcttccaatactattgaggctcacaagtcagctcatgtagacggatcacttaagagcaacaaactgaagtctgcaagaaaattcacatttctatctgatgaggatgacttaagtgcccataatcccctttataaggaaaacataagtcaagtatcaacaaattcagacatttcacagagaacagattttgtagacccattttcacccaaaatacaagccaagagtaagtctctgaggggcccaagagaaaagattcagaggctgtggagtcagtcagtcagcttacccaggaggctgatgaggaaagttccaaatagaccagagatcatagatctgcagcagtggcaaggcaccaggcagaaagctgaaaatgaaaacactggaatctgtacaaacaaaagaggtagcagcaatccattgcttacaactgaagaggcaaatttgacagagaaagaggaaataaggcaaggtgaaacactgatgatagaaggaacagaacagttgaaatctctctcttcagactcttcattttgctttcccaggcctcacttctcattctccactttgccaactgtttcaagaactgtggaactcaaatcagaacctaatgtcatcagttctcctgctgagtgttccttggaactttctccttcaaggccttgtgttttacattcttcactctctaggagagagacacctatttgtatgttacctattgaaaccgaaagaaatatttttgaaaattttgcccatccaccaaacatctctccttctgcctgtccccttccccctcctcctcctatttctcctccttctcctcctcctgctcctgctcctcttgctcctcctcctgacatttctcctttttctcttttttgtcctcctccctctcctccttctatccctcttcctcttcctcctcctacattttttccactttccgtttcaacgtctggtcccccaacaccacctcttctacctccatttccaactcctcttcctccaccacctccttctattccttgccctccacctccttcagcttcatttctgtccacagagtgtgtctgtataacaggtgttaaatgcacgaccaacttgatgcctgccgagaaaattaagtcctctatgacacagctatcaacaacgacagtgtgtaaaacagaccctcagagagaaccaaaaggcatcctcagacacgttaaaaacttagcagaacttgaaaaatcagtagctaacatgtacagtcaaatagaaaaaaactatctacgcacaaatgtttcagaacttcaaactatgtgcccttcagaagtaacaaatatggaaatcacatctgaacaaaacaaggggagtttgaacaatattgtcgagggaactgaaaaacaatctcacagtcaatctacttcactgtaatgttgcttttcttattttagtcgggcaaacctcttgttgatcatagtcttcaagttgaacatcaaatttgaacgtcaaagaagactctattattttaccccaaattcaatgaaatgcagttttttttctcgtttttaatttaaaaagatattaacctcatcactactaactcactcatataatagatttaccttactttttaaaaactacaaagtagcataatttgttctacatttatttgaaaagtaagtaattttaatctcttttttagtgggaatatgtgggcatgaaaattagatacccaacttaaaccaaaggcatgtctatcatgtggatgcagtaacatttacatttagtttttgatcgtagttttatatgaatgttccaagaaaaaagcagactgttacaaataagttaaaactgatatgattgataggttctgttttttcttgaagcctatgtatttggtaagaagaaatactaccgaagtaaaatataatgtacctagattgtaggagatgacagacataaggtatttcaaaataaatctcaggtgctataacatgtagtcatctgttttct

SEQ ID NO: 15026 - DNA, 4230 bp, Homo sapiens
  source 1..4230: mol_type = unassigned DNA
aacgtggagaatgatggtatgctttctgagttaacatgttgaactgttttgcttttctaaaaattttcctagtaacattttcttgatgatatgagagtggatatcaatgcctcacagaaacaagaggtggaacatgtgaatgaatcgtcttggaactagattatgagcactggttctttttaaagggatgtgcaagaggcagccttggcaagaaaacttgctgcataatcttacatggactaaagatgaaactttaaaccgcaaatcagctttgagtgaactttgacagaagatgtttcgacagttttatctctggacatgtttagcttcagggatcatcctgggctctctctttgaaatctgcttgggccagtatgatgatgattgcaaactagctaggggaggaccaccagctaccatagttgctattgatgaagaaagtcggaatggtacaattctggtggacaacatgctgatcaaagggactgctggaggaccagaccccaccatagaactttctttaaaggataatgtggattactgggtgttgatggatcctgttaagcaaatgcttttcctgaacagcaccggaagagttctggatagagatccaccgatgaacatacactccattgtggtgcaggtccagtgcatcaacaaaaaagtgggcactattatctaccatgaagtgcgaatagtggtgagagacaggaatgacaactcacccactttcaagcatgaaagctactatgccacagtgaatgagctcactccagttggtaccacaatattcacaggattttcaggagacaatggagctacagatatagatgatggaccaaatggacagatagagtatgttattcagtataatccagatgatccgacatccaatgacacctttgaaattcccctaatgttgactggaaatatagtgttaaggaagaggctcaactatgaagataagactcgctactttgtcataatccaagctaatgaccgtgcccaaaatctgaatgagaggcgaaccaccaccaccactctcacagtggatgttctggatggagatgacttgggtccaatgtttcttccttgtgtccttgtgccaaacactcgtgattgccgtccactcacttatcaagctgccatacctgagttgagaactccggaagaactgaaccccattattgttacgccaccaatccaagccattgatcaggaccggaatattcaaccgccatcagataggccaggaatcctctattccatccttgttgggactcctgaggattacccacgatttttccatatgcatcctaggacagcagaacttagtctcctggagccagtaaacagagactttcaccagaaatttgatttggttattaaggctgaacaagacaatggtcatcctcttcctgcctttgccggtctacacattgaaatactggatgaaaacaatcaaagtccatattttacaatgcccagttatcaaggctatatcctggaatctgccccagtgggagcaaccatttcggacagtctcaatttgacttcacctttaagaatagtagctctggacaaggacatagaagatacaaaagacccagagcttcacctttttctgaatgactacacctcagtcttcaccgtcacacagactggtattactcgctacctcaccttacttcaaccagtggacagggaagaacagcaaacttacaccttttcgataacagcatttgatggtgtacaagaaagtgagccagtcatcgtcaatattcaagtgatggatgcaaatgataacacgccaaccttccctgaaatatcctatgatgtgtatgtttatacagacatgagacctggggacagtgtcatacagctcactgcagtcgacgcagacgaagggtcaaatggggagatcacatatgaaatccttgttggggctcagggagacttcatcatcaataaaacaacagggcttatcaccatcgctccaggggtggaaatgatagtcgggcggacttacgcactcacggtccaagcagcggataatgctcctcctgcagagcgaaggaactccatctgcactgtgtatattgaagtgcttccaccaaataatcaaagccctcctcgcttcccacagctgatgtatagccttgaaattagtgaagccatgagggttggtgctgttttattaaatctacaggcaactgatcgagagggagactcaataacatatgccattgagaatggagatcctcagagagtttttaatctttcagaaaccacggggattctaaccttagggaaagcactggacagggaaagcactgatcgctacattctgatcatcacagcttcagatggcaggccagatgggacctcaactgccacagtaaacatagtggtgacagatgtcaatgacaatgctccagtgtttgatccttatctgccaagaaatttatctgtggtggaagaagaagccaatgcctttgtgggtcaagtaaaagcaacagaccctgatgctggaataaatggtcaagtgcactacagtttgggtaactttaataatctttttcgtatcacatccaatgggagcatttacacagcagtgaagcttaacagagaagtcagggactactatgaacttgttgttgtggcaacagatggagcagtacaccctcgtcattcaactctaaccttggccatcaaggttttggacattgatgataacagtcctgtgttcaccaattcaacatacactgtccttgttgaagagaatttgccagctgggactaccatccttcaaatagaggccaaagatgtcgaccttggagcaaatgtgtcttaccggataagaagcccagaagtgaagcacttttttgcactacatccatttacaggagaactatcgcttttaaggagtttagattatgaggcatttccagaccaagaagcaagtatcacttttctggtagaggcctttgatatttatggaacaatgccacctggtattgctactgtcacagtgattgtaaaggatatgaatgattatcctcctgtctttagtaaacgaatatacaaagggatggtggctccggatgcagtcaagggtacacctatcacaacagtttatgctgaagatgcagaccctcctgtaagtagaaggcattgattaatattctgaactgtactgagaaaaatccttaacactcataaatgaccgaatcacaagacagcaaaagtagtctctgtaaatttcaccctatttattcatacattttatgttcttttacttatttcatccacaggtacagagcatatttcagatgactattattgaacctagacaaagaatatgctttttgtttttctagaatgcacaatgtactaattactaatttatctaacaatgataaatatatatgaattgtctccatttgtaagcttcacttaatctggatatgttttaaatttatgtattttccactgtatgcatatatgactattttgttagcaaactccaaatcaacatatcacatgaaacttatattgaatgtgtttattttggtaaattaaaaagcttaagattgcttacagaaaatagttaacattcttttatcatatagaactttacttttttgagatatcccaaattatctttcaaggcaaggttttaattaaaatattattatagtgagagtgataaaataccatgtataattaatagtatacatataaaaaagctttctataaataccttgttttataaatattaattattatcctgatgatttaaatttttctctgagtgggctcacactgtaagttggtggctgataaattttagaaaaatacaaataaaagttaaatgaactattttagaagagtaagaaaataaaatcctgaatcttataagtgatttagaagttctgttttctattgctaatataaatagtatttcttttaatgcttgtatttaattaaaagtgaatggccatcataacatttttcagcttcgatttggacaagtcttataaactctattgtgactatatggaatcaaaatgtattaatgttaatatgaaagtggtgggctttaattcagaagctccttttcttaagtgtgttaaaatgtctttgaaactgctttattgtgctttgggatatatgataggcaaaaatttcatagacttgaacccatcaataaagatagtgaatgtgaaa

SEQ ID NO: 15027 - DNA, 580 bp, Homo sapiens
  source 1..580: mol_type = unassigned DNA
gctatcaggaggagcaaaagggaaggatctgctgctgggggctcgctgggtgaccctttgccagacgaaaagagctggtcgagagagaagcgcttggcaggagctctctgcgggacctaagctccgtggctgctcgggatccctacgtccgctgctgctgaaggagcagaggggaggacgccagcggttgcttactggagcctggaggaaaatggaaacatcattccctagaaacagttgaagttgacagacctagaggttgacaaaaggacacgacactagggaatttgcattgtcatgtttcgaaataccattccaaagacctgcaaataagatcagctttgagtgaactttgacagaagatgtttcgacagttttatctctggacatgtttagcttcagggatcatcctgggctctctctttgaaatctgcttgggccagtatgatgatggtacaattctggtggacaacatgctgatcaaagggactgctggaggaccagaccccaccatagaactttctttaaaggataatgtggattactgggtgttgatggatcctgttaagcaaatgctttt

SEQ ID NO: 15028 - DNA, 448 bp, Homo sapiens
  source 1..448: mol_type = unassigned DNA
tatgcaggatttccaggaaaatggaaacatcattccctagaaacagttgaagttgacagacctagaggttgacaaaaggacacgacactagggaatttgcattgtcatgtttcgaaataccattccaaagacctgcaaataagatcagctttgagtgaactttgacagaagatgtttcgacagttttatctctggacatgtttagcttcagggatcatcctgggctctctctttgaaatctgcttgggccagtatgatgatgattgcaaactagctaggggaggaccaccagctaccatagttgctattgatgaagaaagtcggaatggtacaattctggtggacaacatgctgatcaaagggactgctggaggaccagaccccaccatagaactttctttaaaggataatgtggattactgggtgttgatggatcctgttaagcaaa

SEQ ID NO: 15029 - DNA, 6901 bp, Homo sapiens
  source 1..6901: mol_type = unassigned DNA
caacgtgctgagctaatagcgacagatagagggcagacagattcctgctagcagcttagtgttagttgcttgtggtaactaaggcaggtggcatacatctcagaacgtggagaatgatggtatgctttctgagttaacatgttgaactgttttgcttttctaaaaattttcctagtaacattttcttgatgatatgagagtggatatcaatgcctcacagaaacaagaggtggaacatgtgaatgaatcgtcttggaactagattatgagcactggttctttttaaagggatgtgcaagaggcagccttggcaagaaaacttgctgcataatcttacatggactaaagatgaaactttaaaccgcaaatcagctttgagtgaactttgacagaagatgtttcgacagttttatctctggacatgtttagcttcagggatcatcctgggctctctctttgaaatctgcttgggccagtatgatgatgattgcaaactagctaggggaggaccaccagctaccatagttgctattgatgaagaaagtcggaatggtacaattctggtggacaacatgctgatcaaagggactgctggaggaccagaccccaccatagaactttctttaaaggataatgtggattactgggtgttgatggatcctgttaagcaaatgcttttcctgaacagcaccggaagagttctggatagagatccaccgatgaacatacactccattgtggtgcaggtccagtgcatcaacaaaaaagtgggcactattatctaccatgaagtgcgaatagtggtgagagacaggaatgacaactcacccactttcaagcatgaaagctactatgccacagtgaatgagctcactccagttggtaccacaatattcacaggattttcaggagacaatggagctacagatatagatgatggaccaaatggacagatagagtatgttattcagtataatccagatgatccggaccgtgcccaaaatctgaatgagaggcgaaccaccaccaccactctcacagtggatgttctggatggagatgacttgggtccaatgtttcttccttgtgtccttgtgccaaacactcgtgattgccgtccactcacttatcaagctgccatacctgagttgagaactccggaagaactgaaccccattattgttacgccaccaatccaagccattgatcaggaccggaatattcaaccgccatcagataggccaggaatcctctattccatccttgttgggactcctgaggattacccacgatttttccatatgcatcctaggacagcagaacttagtctcctggagccagtaaacagagactttcaccagaaatttgatttggttattaaggctgaacaagacaatggtcatcctcttcctgcctttgccggtctacacattgaaatactggatgaaaacaatcaaagtccatattttacaatgcccagttatcaaggctatatcctggaatctgccccagtgggagcaaccatttcggacagtctcaatttgacttcacctttaagaatagtagctctggacaaggacatagaagatacaaaagacccagagcttcacctttttctgaatgactacacctcagtcttcaccgtcacacagactggtattactcgctacctcaccttacttcaaccagtggacagggaagaacagcaaacttacaccttttcgataacagcatttgatggtgtacaagaaagtgagccagtcatcgtcaatattcaagtgatggatgcaaatgataacacgccaaccttccctgaaatatcctatgatgtgtatgtttatacagacatgagacctggggacagtgtcatacagctcactgcagtcgacgcagacgaagggtcaaatggggagatcacatatgaaatccttgttggggctcagggagacttcatcatcaataaaacaacagggcttatcaccatcgctccaggggtggaaatgatagtcgggcggacttacgcactcacggtccaagcagcggataatgctcctcctgcagagcgaaggaactccatctgcactgtgtatattgaagtgcttccaccaaataatcaaagccctcctcgcttcccacagctgatgtatagccttgaaattagtgaagccatgagggttggtgctgttttattaaatctacaggcaactgatcgagagggagactcaataacatatgccattgagaatggagatcctcagagagtttttaatctttcagaaaccacggggattctaaccttagggaaagcactggacagggaaagcactgatcgctacattctgatcatcacagcttcagatggcaggccagatgggacctcaactgccacagtaaacatagtggtgacagatgtcaatgacaatgctccagtgtttgatccttatctgccaagaaatttatctgtggtggaagaagaagccaatgcctttgtgggtcaagtaaaagcaacagaccctgatgctggaataaatggtcaagtgcactacagtttgggtaactttaataatctttttcgtatcacatccaatgggagcatttacacagcagtgaagcttaacagagaagtcagggactactatgaacttgttgttgtggcaacagatggagcagtacaccctcgtcattcaactctaaccttggccatcaaggttttggacattgatgataacagtcctgtgttcaccaattcaacatacactgtccttgttgaagagaatttgccagctgggactaccatccttcaaatagaggccaaagatgtcgaccttggagcaaatgtgtcttaccggataagaagcccagaagtgaagcacttttttgcactacatccatttacaggagaactatcgcttttaaggagtttagattatgaggcatttccagaccaagaagcaagtatcacttttctggtagaggcctttgatatttatggaacaatgccacctggtattgctactgtcacagtgattgtaaaggatatgaatgattatcctcctgtctttagtaaacgaatatacaaagggatggtggctccggatgcagtcaagggtacacctatcacaacagtttatgctgaagatgcagaccctcctggattacctgcaagtcgtgtgaggtatagagtagatgatgtacagtttccttaccctgccagtatttttgaagtggaagaagattctggaagagtaataacacgagtcaatcttaatgaagaacctacaacaatttttaagttggtggtggttgcttttgatgatggggagcctgtgatgtccagcagtgccacagtgaagattcttgtcttacatcctggtgagatcccacgcttcacacaggaggaatatagacctcctccagtaagtgaacttgccaccaaagggaccatggttggtgtaatttctgctgctgccattaatcaaagtattgtgtactccattgtttcaggaaatgaagaagatacatttggaattaataacatcacaggtgttatctatgtgaatggacctctggattatgagaccaggacaagctatgtacttcgagtccaagctgattccctggaagtggtccttgccaatctccgagttccttcaaaaagcaatacagctaaagtatacattgagattcaggatgaaaataatcatcccccagtgtttcagaaaaaattctacatcggaggtgtatctgaagatgcaagaatgtttacttctgtactcagagtgaaggctactgataaagatactggcaattatagtgtcatggcctacagactcataataccaccaattaaagagggaaaagaaggatttgtagtggaaacatatacagggcttatcaaaactgctatgctcttccataatatgaggagatcctacttcaagtttcaagttattgcaactgacgactatgggaagggactgagcggcaaagccgatgtactcgtctccgtggtcaatcagctggatatgcaagtcattgtttccaatgtgcctcctactctagtggaaaaaaagatagaagatcttacagagatcttggatcgctatgttcaggaacaaattcctggtgccaaggtcgtagtggagtccattggagctcgccggcatggagatgccttttccctagaagattacaccaaatgtgacttgactgtctatgcaattgacccccaaaccaacagagccatcgatagaaatgagctttttaaatttttggatggcaaactacttgatatcaataaagactttcagccgtattatggggaaggaggacgcattctggagatccggactccagaggcagtgaccagcattaaaaagagaggagaaagtctaggatacacagaaggggccttgttggctctggccttcatcatcatcctctgctgcattcctgccatcttggtggttttggtcagctacagacaacgtcaagctgagtgtacaaagactgcacgaattcaggccgcattacccgcggctaaaccagcagtgccggctcctgcaccagtggcagcgcccccgccgccgccgccgcctccgccaggtgcgcatctctatgaagaacttggagacagctcaattcttttccttctctaccattttcaacaaagcaggggaaataactcagtctcagaagacaggaaacatcaacaagttgtgatgcccttttcttccaatactattgaggctcacaagtcagctcatgtagacggatcacttaagagcaacaaactgaagtctgcaagaaaattcacatttctatctgatgaggatgacttaagtgcccataatcccctttataaggaaaacataagtcaagtatcaacaaattcagacatttcacagagaacagattttgtagacccattttcacccaaaatacaagccaagagtaagtctctgaggggcccaagagaaaagattcagaggctgtggagtcagtcagtcagcttacccaggaggctgatgaggaaagttccaaatagaccagagatcatagatctgcagcagtggcaaggcaccaggcagaaagctgaaaatgaaaacactggaatctgtacaaacaaaagaggtagcagcaatccattgcttacaactgaagaggcaaatttgacagagaaagaggaaataaggcaaggtgaaacactgatgatagaaggaacagaacagttgaaatctctctcttcagactcttcattttgctttcccaggcctcacttctcattctccactttgccaactgtttcaagaactgtggaactcaaatcagaacctaatgtcatcagttctcctgctgagtgttccttggaactttctccttcaaggccttgtgttttacattcttcactctctaggagagagacacctatttgtatgttacctattgaaaccgaaagaaatatttttgaaaattttgcccatccaccaaacatctctccttctgcctgtccccttccccctcctcctcctatttctcctccttctcctcctcctgctcctgctcctcttgctcctcctcctgacatttctcctttttctcttttttgtcctcctccctctcctccttctatccctcttcctcttcctcctcctacattttttccactttccgtttcaacgtctggtcccccaacaccacctcttctacctccatttccaactcctcttcctccaccacctccttctattccttgccctccacctccttcagcttcatttctgtccacagagtgtgtctgtataacaggtgttaaatgcacgaccaacttgatgcctgccgagaaaattaagtcctctatgacacagctatcaacaacgacagtgtgtaaaacagaccctcagagagaaccaaaaggcatcctcagacacgttaaaaacttagcagaacttgaaaaatcagtagctaacatgtacagtcaaatagaaaaaaactatctacgcacaaatgtttcagaacttcaaactatgtgcccttcagaagtaacaaatatggaaatcacatctgaacaaaacaaggggagtttgaacaatattgtcgagggaactgaaaaacaatctcacagtcaatctacttcactgtaatgttgcttttcttattttagtcgggcaaacctcttgttgatcatagtcttcaagttgaacatcaaatttgaacgtcaaagaagactctattattttaccccaaattcaatgaaatgcagttttttttctcgtttttaatttaaaaagatattaacctcatcactactaactcactcatataatagatttaccttactttttaaaaactacaaagtagcataatttgttctacatttatttgaaaagtaagtaattttaatctcttttttagtgggaatatgtgggcatgaaaattagatacccaacttaaaccaaaggcatgtctatcatgtggatgcagtaacatttacatttagtttttgatcgtagttttatatgaatgttccaagaaaaaagcagactgttacaaataagttaaaactgatatgattgataggttctgttttttcttgaagcctatgtatttggtaagaagaaatactaccgaagtaaaatataatgtacctagattgtaggagatgacagacataaggtatttcaaaataaatctcaggtgctataacatgtagtcatctgttttctgataagaacatcttttactctgacttgcttttatcttagtagtatgcttatggatttagtagtatgcttatggatttgataaatcttatactttttcagttgctgtcttattctctttatttctcattgtgctttcccttcccttctttataatgaaaataaatcttgagtcgttg

SEQ ID NO: 15030 - DNA, 7048 bp, Homo sapiens
  source 1..7048: mol_type = unassigned DNA
caacgtgctgagctaatagcgacagatagagggcagacagattcctgctagcagcttagtgttagttgcttgtggtaactaaggcaggtggcatacatctcagaacgtggagaatgatggtatgctttctgagttaacatgttgaactgttttgcttttctaaaaattttcctagtaacattttcttgatgatatgagagtggatatcaatgcctcacagaaacaagaggtggaacatgtgaatgaatcgtcttggaactagattatgagcactggttctttttaaagggatgtgcaagaggcagccttggcaagaaaacttgctgcataatcttacatggactaaagatgaaactttaaaccgcaaatcagctttgagtgaactttgacagaagatgtttcgacagttttatctctggacatgtttagcttcagggatcatcctgggctctctctttgaaatctgcttgggccagtatgatgatgactggcaatatgaggattgcaaactagctaggggaggaccaccagctaccatagttgctattgatgaagaaagtcggaatggtacaattctggtggacaacatgctgatcaaagggactgctggaggaccagaccccaccatagaactttctttaaaggataatgtggattactgggtgttgatggatcctgttaagcaaatgcttttcctgaacagcaccggaagagttctggatagagatccaccgatgaacatacactccattgtggtgcaggtccagtgcatcaacaaaaaagtgggcactattatctaccatgaagtgcgaatagtggtgagagacaggaatgacaactcacccactttcaagcatgaaagctactatgccacagtgaatgagctcactccagttggtaccacaatattcacaggattttcaggagacaatggagctacagatatagatgatggaccaaatggacagatagagtatgttattcagtataatccagatgatccgacatccaatgacacctttgaaattcccctaatgttgactggaaatatagtgttaaggaagaggctcaactatgaagataagactcgctactttgtcataatccaagctaatgaccgtgcccaaaatctgaatgagaggcgaaccaccaccaccactctcacagtggatgttctggatggagatgacttgggtccaatgtttcttccttgtgtccttgtgccaaacactcgtgattgccgtccactcacttatcaagctgccatacctgagttgagaactccggaagaactgaaccccattattgttacgccaccaatccaagccattgatcaggaccggaatattcaaccgccatcagataggccaggaatcctctattccatccttgttgggactcctgaggattacccacgatttttccatatgcatcctaggacagcagaacttagtctcctggagccagtaaacagagactttcaccagaaatttgatttggttattaaggctgaacaagacaatggtcatcctcttcctgcctttgccggtctacacattgaaatactggatgaaaacaatcaaagtccatattttacaatgcccagttatcaaggctatatcctggaatctgccccagtgggagcaaccatttcggacagtctcaatttgacttcacctttaagaatagtagctctggacaaggacatagaagatacaaaagacccagagcttcacctttttctgaatgactacacctcagtcttcaccgtcacacagactggtattactcgctacctcaccttacttcaaccagtggacagggaagaacagcaaacttacaccttttcgataacagcatttgatggtgtacaagaaagtgagccagtcatcgtcaatattcaagtgatggatgcaaatgataacacgccaaccttccctgaaatatcctatgatgtgtatgtttatacagacatgagacctggggacagtgtcatacagctcactgcagtcgacgcagacgaagggtcaaatggggagatcacatatgaaatccttgttggggctcagggagacttcatcatcaataaaacaacagggcttatcaccatcgctccaggggtggaaatgatagtcgggcggacttacgcactcacggtccaagcagcggataatgctcctcctgcagagcgaaggaactccatctgcactgtgtatattgaagtgcttccaccaaataatcaaagccctcctcgcttcccacagctgatgtatagccttgaaattagtgaagccatgagggttggtgctgttttattaaatctacaggcaactgatcgagagggagactcaataacatatgccattgagaatggagatcctcagagagtttttaatctttcagaaaccacggggattctaaccttagggaaagcactggacagggaaagcactgatcgctacattctgatcatcacagcttcagatggcaggccagatgggacctcaactgccacagtaaacatagtggtgacagatgtcaatgacaatgctccagtgtttgatccttatctgccaagaaatttatctgtggtggaagaagaagccaatgcctttgtgggtcaagtaaaagcaacagaccctgatgctggaataaatggtcaagtgcactacagtttgggtaactttaataatctttttcgtatcacatccaatgggagcatttacacagcagtgaagcttaacagagaagtcagggactactatgaacttgttgttgtggcaacagatggagcagtacaccctcgtcattcaactctaaccttggccatcaaggttttggacattgatgataacagtcctgtgttcaccaattcaacatacactgtccttgttgaagagaatttgccagctgggactaccatccttcaaatagaggccaaagatgtcgaccttggagcaaatgtgtcttaccggataagaagcccagaagtgaagcacttttttgcactacatccatttacaggagaactatcgcttttaaggagtttagattatgaggcatttccagaccaagaagcaagtatcacttttctggtagaggcctttgatatttatggaacaatgccacctggtattgctactgtcacagtgattgtaaaggatatgaatgattatcctcctgtctttagtaaacgaatatacaaagggatggtggctccggatgcagtcaagggtacacctatcacaacagtttatgctgaagatgcagaccctcctggattacctgcaagtcgtgtgaggtatagagtagatgatgtacagtttccttaccctgccagtatttttgaagtggaagaagattctggaagagtaataacacgagtcaatcttaatgaagaacctacaacaatttttaagttggtggtggttgcttttgatgatggggagcctgtgatgtccagcagtgccacagtgaagattcttgtcttacatcctggtgagatcccacgcttcacacaggaggaatatagacctcctccagtaagtgaacttgccaccaaagggaccatggttggtgtaatttctgctgctgccattaatcaaagtattgtgtactccattgtttcaggaaatgaagaagatacatttggaattaataacatcacaggtgttatctatgtgaatggacctctggattatgagaccaggacaagctatgtacttcgagtccaagctgattccctggaagtggtccttgccaatctccgagttccttcaaaaagcaatacagctaaagtatacattgagattcaggatgaaaataatcatcccccagtgtttcagaaaaaattctacatcggaggtgtatctgaagatgcaagaatgtttacttctgtactcagagtgaaggctactgataaagatactggcaattatagtgtcatggcctacagactcataataccaccaattaaagagggaaaagaaggatttgtagtggaaacatatacagggcttatcaaaactgctatgctcttccataatatgaggagatcctacttcaagtttcaagttattgcaactgacgactatgggaagggactgagcggcaaagccgatgtactcgtctccgtggtcaatcagctggatatgcaagtcattgtttccaatgtgcctcctactctagtggaaaaaaagatagaagatcttacagagatcttggatcgctatgttcaggaacaaattcctggtgccaaggtcgtagtggagtccattggagctcgccggcatggagatgccttttccctagaagattacaccaaatgtgacttgactgtctatgcaattgacccccaaaccaacagagccatcgatagaaatgagctttttaaatttttggatggcaaactacttgatatcaataaagactttcagccgtattatggggaaggaggacgcattctggagatccggactccagaggcagtgaccagcattaaaaagagaggagaaagtctaggatacacagaaggggccttgttggctctggccttcatcatcatcctctgctgcattcctgccatcttggtggttttggtcagctacagacaggtattcaagggacgtcaagctgagtgtacaaagactgcacgaattcaggccgcattacccgcggctaaaccagcagtgccggctcctgcaccagtggcagcgcccccgccgccgccgccgcctccgccaggtgcgcatctctatgaagaacttggagacagctcaattctttcaagtcttttccttctctaccattttcaacaaagcaggggaaataactcagtctcagaagacaggaaacatcaacaagttgtgatgcccttttcttccaatactattgaggctcacaagtcagctcatgtagacggatcacttaagagcaacaaactgaagtctgcaagaaaattcacatttctatctgatgaggatgacttaagtgcccataatcccctttataaggaaaacataagtcaagtatcaacaaattcagacatttcacagagaacagattttgtagacccattttcacccaaaatacaagccaagagtaagtctctgaggggcccaagagaaaagattcagaggctgtggagtcagtcagtcagcttacccaggaggctgatgaggaaagttccaaatagaccagagatcatagatctgcagcagtggcaaggcaccaggcagaaagctgaaaatgaaaacactggaatctgtacaaacaaaagaggtagcagcaatccattgcttacaactgaagaggcaaatttgacagagaaagaggaaataaggcaaggtgaaacactgatgatagaaggaacagaacagttgaaatctctctcttcagactcttcattttgctttcccaggcctcacttctcattctccactttgccaactgtttcaagaactgtggaactcaaatcagaacctaatgtcatcagttctcctgctgagtgttccttggaactttctccttcaaggccttgtgttttacattcttcactctctaggagagagacacctatttgtatgttacctattgaaaccgaaagaaatatttttgaaaattttgcccatccaccaaacatctctccttctgcctgtccccttccccctcctcctcctatttctcctccttctcctcctcctgctcctgctcctcttgctcctcctcctgacatttctcctttttctcttttttgtcctcctccctctcctccttctatccctcttcctcttcctcctcctacattttttccactttccgtttcaacgtctggtcccccaacaccacctcttctacctccatttccaactcctcttcctccaccacctccttctattccttgccctccacctccttcagcttcatttctgtccacagagtgtgtctgtataacaggtgttaaatgcacgaccaacttgatgcctgccgagaaaattaagtcctctatgacacagctatcaacaacgacagtgtgtaaaacagaccctcagagagaaccaaaaggcatcctcagacacgttaaaaacttagcagaacttgaaaaatcagtagctaacatgtacagtcaaatagaaaaaaactatctacgcacaaatgtttcagaacttcaaactatgtgcccttcagaagtaacaaatatggaaatcacatctgaacaaaacaaggggagtttgaacaatattgtcgagggaactgaaaaacaatctcacagtcaatctacttcactgtaatgttgcttttcttattttagtcgggcaaacctcttgttgatcatagtcttcaagttgaacatcaaatttgaacgtcaaagaagactctattattttaccccaaattcaatgaaatgcagttttttttctcgtttttaatttaaaaagatattaacctcatcactactaactcactcatataatagatttaccttactttttaaaaactacaaagtagcataatttgttctacatttatttgaaaagtaagtaattttaatctcttttttagtgggaatatgtgggcatgaaaattagatacccaacttaaaccaaaggcatgtctatcatgtggatgcagtaacatttacatttagtttttgatcgtagttttatatgaatgttccaagaaaaaagcagactgttacaaataagttaaaactgatatgattgataggttctgttttttcttgaagcctatgtatttggtaagaagaaatactaccgaagtaaaatataatgtacctagattgtaggagatgacagacataaggtatttcaaaataaatctcaggtgctataacatgtagtcatctgttttctgataagaacatcttttactctgacttgcttttatcttagtagtatgcttatggatttagtagtatgcttatggatttgataaatcttatactttttcagttgctgtcttattctctttatttctcattgtgctttcccttcccttctttataatgaaaataaatcttgagtcgttg

SEQ ID NO: 15031 - DNA, 9249 bp, Homo sapiens
  source 1..9249: mol_type = unassigned DNA
caacgtgctgagctaatagcgacagatagagggcagacagattcctgctagcagcttagtgttagttgcttgtggtaactaaggcaggtggcatacatctcagaacgtggagaatgatggtatgctttctgagttaacatgttgaactgttttgcttttctaaaaattttcctagtaacattttcttgatgatatgagagtggatatcaatgcctcacagaaacaagaggtggaacatgtgaatgaatcgtcttggaactagattatgagcactggttctttttaaagggatgtgcaagaggcagccttggcaagaaaacttgctgcataatcttacatggactaaagatgaaactttaaaccgcaaatcagctttgagtgaactttgacagaagatgtttcgacagttttatctctggacatgtttagcttcagggatcatcctgggctctctctttgaaatctgcttgggccagtatgatgatgactggcaatatgaggattgcaaactagctaggggaggaccaccagctaccatagttgctattgatgaagaaagtcggaatggtacaattctggtggacaacatgctgatcaaagggactgctggaggaccagaccccaccatagaactttctttaaaggataatgtggattactgggtgttgatggatcctgttaagcaaatgcttttcctgaacagcaccggaagagttctggatagagatccaccgatgaacatacactccattgtggtgcaggtccagtgcatcaacaaaaaagtgggcactattatctaccatgaagtgcgaatagtggtgagagacaggaatgacaactcacccactttcaagcatgaaagctactatgccacagtgaatgagctcactccagttggtaccacaatattcacaggattttcaggagacaatggagctacagatatagatgatggaccaaatggacagatagagtatgttattcagtataatccagatgatccgacatccaatgacacctttgaaattcccctaatgttgactggaaatatagtgttaaggaagaggctcaactatgaagataagactcgctactttgtcataatccaagctaatgaccgtgcccaaaatctgaatgagaggcgaaccaccaccaccactctcacagtggatgttctggatggagatgacttgggtccaatgtttcttccttgtgtccttgtgccaaacactcgtgattgccgtccactcacttatcaagctgccatacctgagttgagaactccggaagaactgaaccccattattgttacgccaccaatccaagccattgatcaggaccggaatattcaaccgccatcagataggccaggaatcctctattccatccttgttgggactcctgaggattacccacgatttttccatatgcatcctaggacagcagaacttagtctcctggagccagtaaacagagactttcaccagaaatttgatttggttattaaggctgaacaagacaatggtcatcctcttcctgcctttgccggtctacacattgaaatactggatgaaaacaatcaaagtccatattttacaatgcccagttatcaaggctatatcctggaatctgccccagtgggagcaaccatttcggacagtctcaatttgacttcacctttaagaatagtagctctggacaaggacatagaagatacaaaagacccagagcttcacctttttctgaatgactacacctcagtcttcaccgtcacacagactggtattactcgctacctcaccttacttcaaccagtggacagggaagaacagcaaacttacaccttttcgataacagcatttgatggtgtacaagaaagtgagccagtcatcgtcaatattcaagtgatggatgcaaatgataacacgccaaccttccctgaaatatcctatgatgtgtatgtttatacagacatgagacctggggacagtgtcatacagctcactgcagtcgacgcagacgaagggtcaaatggggagatcacatatgaaatccttgttggggctcagggagacttcatcatcaataaaacaacagggcttatcaccatcgctccaggggtggaaatgatagtcgggcggacttacgcactcacggtccaagcagcggataatgctcctcctgcagagcgaaggaactccatctgcactgtgtatattgaagtgcttccaccaaataatcaaagccctcctcgcttcccacagctgatgtatagccttgaaattagtgaagccatgagggttggtgctgttttattaaatctacaggcaactgatcgagagggagactcaataacatatgccattgagaatggagatcctcagagagtttttaatctttcagaaaccacggggattctaaccttagggaaagcactggacagggaaagcactgatcgctacattctgatcatcacagcttcagatggcaggccagatgggacctcaactgccacagtaaacatagtggtgacagatgtcaatgacaatgctccagtgtttgatccttatctgccaagaaatttatctgtggtggaagaagaagccaatgcctttgtgggtcaagtaaaagcaacagaccctgatgctggaataaatggtcaagtgcactacagtttgggtaactttaataatctttttcgtatcacatccaatgggagcatttacacagcagtgaagcttaacagagaagtcagggactactatgaacttgttgttgtggcaacagatggagcagtacaccctcgtcattcaactctaaccttggccatcaaggttttggacattgatgataacagtcctgtgttcaccaattcaacatacactgtccttgttgaagagaatttgccagctgggactaccatccttcaaatagaggccaaagatgtcgaccttggagcaaatgtgtcttaccggataagaagcccagaagtgaagcacttttttgcactacatccatttacaggagaactatcgcttttaaggagtttagattatgaggcatttccagaccaagaagcaagtatcacttttctggtagaggcctttgatatttatggaacaatgccacctggtattgctactgtcacagtgattgtaaaggatatgaatgattatcctcctgtctttagtaaacgaatatacaaagggatggtggctccggatgcagtcaagggtacacctatcacaacagtttatgctgaagatgcagaccctcctggattacctgcaagtcgtgtgaggtatagagtagatgatgtacagtttccttaccctgccagtatttttgaagtggaagaagattctggaagagtaataacacgagtcaatcttaatgaagaacctacaacaatttttaagttggtggtggttgcttttgatgatggggagcctgtgatgtccagcagtgccacagtgaagattcttgtcttacatcctggtgagatcccacgcttcacacaggaggaatatagacctcctccagtaagtgaacttgccaccaaagggaccatggttggtgtaatttctgctgctgccattaatcaaagtattgtgtactccattgtttcaggaaatgaagaagatacatttggaattaataacatcacaggtgttatctatgtgaatggacctctggattatgagaccaggacaagctatgtacttcgagtccaagctgattccctggaagtggtccttgccaatctccgagttccttcaaaaagcaatacagctaaagtatacattgagattcaggatgaaaataatcatcccccagtgtttcagaaaaaattctacatcggaggtgtatctgaagatgcaagaatgtttacttctgtactcagagtgaaggctactgataaagatactggcaattatagtgtcatggcctacagactcataataccaccaattaaagagggaaaagaaggatttgtagtggaaacatatacagggcttatcaaaactgctatgctcttccataatatgaggagatcctacttcaagtttcaagttattgcaactgacgactatgggaagggactgagcggcaaagccgatgtactcgtctccgtggtcaatcagctggatatgcaagtcattgtttccaatgtgcctcctactctagtggaaaaaaagatagaagatcttacagagatcttggatcgctatgttcaggaacaaattcctggtgccaaggtcgtagtggagtccattggagctcgccggcatggagatgccttttccctagaagattacaccaaatgtgacttgactgtctatgcaattgacccccaaaccaacagagccatcgatagaaatgagctttttaaatttttggatggcaaactacttgatatcaataaagactttcagccgtattatggggaaggaggacgcattctggagatccggactccagaggcagtgaccagcattaaaaagagaggagaaagtctaggatacacagaaggggccttgttggctctggccttcatcatcatcctctgctgcattcctgccatcttggtggttttggtcagctacagacaggtattcaagggacgtcaagctgagtgtacaaagactgcacgaattcaggccgcattacccgcggctaaaccagcagtgccggctcctgcaccagtggcagcgcccccgccgccgccgccgcctccgccaggtgcgcatctctatgaagaacttggagacagctcaatgtatgaaatgcctcaatatgggagtcgccgtcgattgttaccaccagctggacaggaggaatatggtgaggtggttggtgaagctgaggaagaatatgaggaggaagagtgggcaagaaaaagaatgatcaagttagttgttgatcgagagtatgaaaccagctcaactggagaagacagtgctcctgaatgtcagagaaaccgtcttcaccatcctagtatccacagtaatatcaacggcaatatatatattgcacagaatggttctgtggtgagaacccgccgtgcctgcctcacggacaacttaaaagttgcttcccctgttcgactgggagggccctttaagaaactagacaagttggcagtgacacatgaggagaatgtacctctgaacacattatcaaaggggccattttctactgaaaaaatgaatgcaagaccaactctggttacatttgccccttgccctgtggggactgacaatacagcggtgaagccactaaggaacaggctgaaaagcacagttgaacaggagtccatgattgacagtaagaacatcaaggaggctttggaatttcatagtgaccacacacagtctgatgatgaagagctttggatgggcccctggaacaacctccatataccaatgacaaaactgtgaccaattttttaaaagatattttaattaatttttacttacatttttaataaactgtgctttttattgtcactgagaaaacaatgtatggaatttatatcatgcacacaagctaaaactttgaacaatatgctttaaaattttaagagacagatttgcactcacattgttatcaattaatcgtttttcccagaaaatccttttggacatactttcactaaataacctatcgtttaaacatttagctgttttgttgggtcttgaatttttgttcattttaataaacaagaaataattactaaataatcatttatattttattgattaacatagattatgctttatttctagctccacaaaacatttttagtacatgtaattttattttccatagccaaaagggcaaaaaagaagtaagaggatatttacaggcaatgagtttatacagctgctgtctatactgccctaatttttaaaatgaaagctagaattgcaaagtaaagtaaatgagggaatcacctgtaaataattaattattttaaatcatgagcttgttttctttctttattgtcctgtataaaggttttcacattttaccataaatacatttatatcttgaccctttaggaaaccacttgaagtcgtatgtctttttatcaatattatttacaatattctcttgtcccttcatctcatatcaaatatggtagatactttagtttagtttaatcacttgaggttaaataattgtttggagcaacatggaaatctcacccttagcaaaagcttttagggaagtgagaaaggttcgagtaagcagtaatgcatctagaacgacaatttcataatggaagacatggtgaggttagggaagtctcacattaatgtcactagactttaatagtttgtaaacccagcatatcagagtaaaggaatttggcagggttgaaatgtatataatatataaagcttataaaggctatgaattcataacttcaaatgttgtgtttaacttcttccattttcaggttatttatagaatattttaatgcacatatttatgtgcctaaaatccagaaccaggaaatcattgcctgggcattttttaaaatcaaagaacatggtcttgattttttaccattgaacaaagcacagtgtttcatcataagtagaaatgaaaacagaatatcctttaaaaaacttgccttgtgtgttgcttattttccagatgatgtaaaaagaatgaaacaatatagattaagagaattcagaattctattgaatattacttagtatgatatagatgtagctcacttcaaattttgcacagtattgaccaagttcaggttttaatgaaatttcctcatgcatgcttaatatatggttgaaggactgaataatgcactattatttattcccctcttacatgtttcgcgtcttaaaaattgtttattattatgctatttcctcatttccaaagtgaatgaattgtactgacataaacttgccgacttgtaagagtagtatgtttttacttcagatttccaagaaaatatttgagatcaaatacagtaacatctcatctaccttattttattgagaattaatgcattccatacccttgccaaaaaaacaaaacaaaacaaacaaacaaaaaaaaacctagtggcattagctagattagaaacgtagaatcatgaccacacctcctggcctgccaaacaagcatccacattttcaaaagatcctaaggtggtttatatgcacattaaattttggaagcaatgaagtccggggcttattccttcaggcaccaaagcaatggtttttagtataggatactttgtataggaattagattaagcatatatttccctactaattcaatcagaggtcatcgaatataatttaatattatcttgatacccccagatcatctcagtcagcatcccttgatattctctctatatacagcttcatggctgcgtttttgtcctttgatttctggctgtgacatttaacttattctgttgttgtgcctttctcacatttttttctttcagtttatagcttctagtatcctgatgggaaagtttgtgttttttgtttgttttcttaatgttgaaaaatcatgaagcttaagatgggaattaggtacacggattcaaccaaatgttttgcgactcttagacgctttctttggttaccagtagatttggaaatatgatgttggcagaagtctagtggcctgacatatgagatgtcactgtattttaaactacattttttatgagaaaatatgcaaaattttacaagccacttagcagacacatttcagtaatttaaacttgatcatttcagtaaaaacaatcatgaggtcaatcatctgttacttaatggagatagtataaagagaagcagaatttacacagagcaaccaaaccaaatatttggtcagtatatttttgggtaacgtagagcagcaaaattattactaactaaataaatctggatcaattaaatagttactttcatagaactttcactagtctataaatccctgactcaggattaaaactgtggaacccagaggaaatacccaggtatgtttaatcttaagaatacttcatataaataacgtttcaatgtaaatatttataaagaaattggttgttatttttcctaggaaggtgtaggaaggttttcttgttgttctcaatcagcactagcttcaatcaggcagaagaaacagcaggtcttggctaatcgaggtgagaacagaatgatgtaatgactaatattgcaacccgttgattttagaaggtcttgtgggcattaagggaaagcagaggaagaatgagaaaatatggtcagagtgacataggacatttgtgacttaatgaccatcgaatcacaggtgttaatctccctctctcaatttgtctttctcattaattacagactctgagagttgtcatagaattgcaaccgtaggttggccaaaaccatctttttaaaatacagaagaaagtttgccttgaattttatatgtgatatgtcattcatgttattttaccacattgttcacagggatgttaaagactattatttacttaagtggttgttccaaaggtgattcagtagttaccattaaaatattatttaaaaacatttttatatcatagagccagaagtaattgaatattgactctcgagggaagacattttctgtcttttatttcatgagctttgatttttctctttctctgcttcaccttctgcactttataccttaagtgggatttatataccacttgaatttaattagcaaaataggcaaaaagtgctaataatctattctcagggcagatgcctattggtgcctgcaaattacacagcgataaggctgaaggataggttcaaaataatgttgaggacttacacattttatagatagtttctttctattcccaaatggtatgtgaaatttttgttctattttttttattggttttcaatagttaattttgatctttatcataagaagctttagttatagactggtatttttttcattgcaatctactttaaatttatggtcagttaagcacatgtatggaagattcgaacattgtctatagtttgaaaaatctatcaacaccttcactgctttcccaatttctttatccaaatacctgttcttccttaacaaatattatgttactgtataagaatctgaattagaagttttaagttaaaatgcattgttattcactacacaatgtttcaaaaataaattttcatttgaaaa

SEQ ID NO: 15032 - DNA, 6820 bp, Homo sapiens
  source 1..6820: mol_type = unassigned DNA
caacgtgctgagctaatagcgacagatagagggcagacagattcctgctagcagcttagtgttagttgcttgtggtaactaaggcaggtggcatacatctcagaacgtggagaatgatggtatgctttctgagttaacatgttgaactgttttgcttttctaaaaattttcctagtaacattttcttgatgatatgagagtggatatcaatgcctcacagaaacaagaggtggaacatgtgaatgaatcgtcttggaactagattatgagcactggttctttttaaagggatgtgcaagaggcagccttggcaagaaaacttgctgcataatcttacatggactaaagatgaaactttaaaccgcaaatcagctttgagtgaactttgacagaagatgtttcgacagttttatctctggacatgtttagcttcagggatcatcctgggctctctctttgaaatctgcttgggccagtatgatgatgattgcaaactagctaggggaggaccaccagctaccatagttgctattgatgaagaaagtcggaatggtacaattctggtggacaacatgctgatcaaagggactgctggaggaccagaccccaccatagaactttctttaaaggataatgtggattactgggtgttgatggatcctgttaagcaaatgcttttcctgaacagcaccggaagagttctggatagagatccaccgatgaacatacactccattgtggtgcaggtccagtgcatcaacaaaaaagtgggcactattatctaccatgaagtgcgaatagtggtgagagacaggaatgacaactcacccactttcaagcatgaaagctactatgccacagtgaatgagctcactccagttggtaccacaatattcacaggattttcaggagacaatggagctacagatatagatgatggaccaaatggacagatagagtatgttattcagtataatccagatgatccgacatccaatgacacctttgaaattcccctaatgttgactggaaatatagtgttaaggaagaggctcaactatgaagataagactcgctactttgtcataatccaagctaatgaccgtgcccaaaatctgaatgagaggcgaaccaccaccaccactctcacagtggatgttctggatggagatgacttgggtccaatgtttcttccttgtgtccttgtgccaaacactcgtgattgccgtccactcacttatcaagctgccatacctgagttgagaactccggaagaactgaaccccattattgttacgccaccaatccaagccattgatcaggaccggaatattcaaccgccatcagataggccaggaatcctctattccatccttgttgggactcctgaggattacccacgatttttccatatgcatcctaggacagcagaacttagtctcctggagccagtaaacagagactttcaccagaaatttgatttggttattaaggctgaacaagacaatggtcatcctcttcctgcctttgccggtctacacattgaaatactggatgaaaacaatcaaagtccatattttacaatgcccagttatcaaggctatatcctggaatctgccccagtgggagcaaccatttcggacagtctcaatttgacttcacctttaagaatagtagctctggacaaggacatagaagatacaaaagacccagagcttcacctttttctgaatgactacacctcagtcttcaccgtcacacagactggtattactcgctacctcaccttacttcaaccagtggacagggaagaacagcaaacttacaccttttcgataacagcatttgatggtgtacaagaaagtgagccagtcatcgtcaatattcaagtgatggatgcaaatgataacacgccaaccttccctgaaatatcctatgatgtgtatgtttatacagacatgagacctggggacagtgtcatacagctcactgcagtcgacgcagacgaagggtcaaatggggagatcacatatgaaatccttgttggggctcagggagacttcatcatcaataaaacaacagggcttatcaccatcgctccaggggtggaaatgatagtcgggcggacttacgcactcacggtccaagcagcggataatgctcctcctgcagagcgaagcacggggattctaaccttagggaaagcactggacagggaaagcactgatcgctacattctgatcatcacagcttcagatggcaggccagatgggacctcaactgccacagtaaacatagtggtgacagatgtcaatgacaatgctccagtgtttgatccttatctgccaagaaatttatctgtggtggaagaagaagccaatgcctttgtgggtcaagtaaaagcaacagaccctgatgctggaataaatggtcaagtgcactacagtttgggtaactttaataatctttttcgtatcacatccaatgggagcatttacacagcagtgaagcttaacagagaagtcagggactactatgaacttgttgttgtggcaacagatggagcagtacaccctcgtcattcaactctaaccttggccatcaaggttttggacattgatgataacagtcctgtgttcaccaattcaacatacactgtccttgttgaagagaatttgccagctgggactaccatccttcaaatagaggccaaagatgtcgaccttggagcaaatgtgtcttaccggataagaagcccagaagtgaagcacttttttgcactacatccatttacaggagaactatcgcttttaaggagtttagattatgaggcatttccagaccaagaagcaagtatcacttttctggtagaggcctttgatatttatggaacaatgccacctggtattgctactgtcacagtgattgtaaaggatatgaatgattatcctcctgtctttagtaaacgaatatacaaagggatggtggctccggatgcagtcaagggtacacctatcacaacagtttatgctgaagatgcagaccctcctggattacctgcaagtcgtgtgaggtatagagtagatgatgtacagtttccttaccctgccagtatttttgaagtggaagaagattctggaagagtaataacacgagtcaatcttaatgaagaacctacaacaatttttaagttggtggtggttgcttttgatgatggggagcctgtgatgtccagcagtgccacagtgaagattcttgtcttacatcctggtgagatcccacgcttcacacaggaggaatatagacctcctccagtaagtgaacttgccaccaaagggaccatggttggtgtaatttctgctgctgccattaatcaaagtattgtgtactccattgtttcaggaaatgaagaagatacatttggaattaataacatcacaggtgttatctatgtgaatggacctctggattatgagaccaggacaagctatgtacttcgagtccaagctgattccctggaagtggtccttgccaatctccgagttccttcaaaaagcaatacagctaaagtatacattgagattcaggatgaaaataatcatcccccagtgtttcagaaaaaattctacatcggaggtgtatctgaagatgcaagaatgtttacttctgtactcagagtgaaggctactgataaagatactggcaattatagtgtcatggcctacagactcataataccaccaattaaagagggaaaagaaggatttgtagtggaaacatatacagggcttatcaaaactgctatgctcttccataatatgaggagatcctacttcaagtttcaagttattgcaactgacgactatgggaagggactgagcggcaaagccgatgtactcgtctccgtggtcaatcagctggatatgcaagtcattgtttccaatgtgcctcctactctagtggaaaaaaagatagaagatcttacagagatcttggatcgctatgttcaggaacaaattcctggtgccaaggtcgtagtggagtccattggagctcgccggcatggagatgccttttccctagaagattacaccaaatgtgacttgactgtctatgcaattgacccccaaaccaacagagccatcgatagaaatgagctttttaaatttttggatggcaaactacttgatatcaataaagactttcagccgtattatggggaaggaggacgcattctggagatccggactccagaggcagtgaccagcattaaaaagagaggagaaagtctaggatacacagaaggggccttgttggctctggccttcatcatcatcctctgctgcattcctgccatcttggtggttttggtcagctacagacaggtattcaagggacgtcaagctgagtgtacaaagactgcacgaattcaggccgcattacccgcggctaaaccagcagtgccggctcctgcaccagtggcagcgcccccgccgccgccgccgcctccgccaggtgcgcatctctatgaagaacttggagacagctcaattctttcaagtcttttccttctctaccattttcaacaaagcaggggaaataactcagtctcagaagacaggaaacatcaacaagttgtgatgcccttttcttccaatactattgaggctcacaagtcagctcatgtagacggatcacttaagagcaacaaactgaagtctgcaagaaaattcacatttctatctgatgaggatgacttaagtgcccataatcccctttataaggaaaacataagtcaagtatcaacaaattcagacatttcacagagaacagattttgtagacccattttcacccaaaatacaagccaagagtaagtctctgaggggcccaagagaaaagattcagaggctgtggagtcagtcagtcagcttacccaggaggctgatgaggaaagttccaaatagaccagagatcatagatctgcagcagtggcaaggcaccaggcagaaagctgaaaatgaaaacactggaatctgtacaaacaaaagaggtagcagcaatccattgcttacaactgaagaggcaaatttgacagagaaagaggaaataaggcaaggtgaaacactgatgatagaaggaacagaacagttgaaatctctctcttcagactcttcattttgctttcccaggcctcacttctcattctccactttgccaactgtttcaagaactgtggaactcaaatcagaacctaatgtcatcagttctcctgctgagtgttccttggaactttctccttcaaggccttgtgttttacattcttcactctctaggagagagacacctatttgtatgttacctattgaaaccgaaagaaatatttttgaaaattttgcccatccaccaaacatctctccttctgcctgtccccttccccctcctcctcctatttctcctccttctcctcctcctgctcctgctcctcttgctcctcctcctgacatttctcctttttctcttttttgtcctcctccctctcctccttctatccctcttcctcttcctcctcctacattttttccactttccgtttcaacgtctggtcccccaacaccacctcttctacctccatttccaactcctcttcctccaccacctccttctattccttgccctccacctccttcagcttcatttctgtccacagagtgtgtctgtataacaggtgttaaatgcacgaccaacttgatgcctgccgagaaaattaagtcctctatgacacagctatcaacaacgacagtgtgtaaaacagaccctcagagagaaccaaaaggcatcctcagacacgttaaaaacttagcagaacttgaaaaatcagtagctaacatgtacagtcaaatagaaaaaaactatctacgcacaaatgtttcagaacttcaaactatgtgcccttcagaagtaacaaatatggaaatcacatctgaacaaaacaaggggagtttgaacaatattgtcgagggaactgaaaaacaatctcacagtcaatctacttcactgtaatgttgcttttcttattttagtcgggcaaacctcttgttgatcatagtcttcaagttgaacatcaaatttgaacgtcaaagaagactctattattttaccccaaattcaatgaaatgcagttttttttctcgtttttaatttaaaaagatattaacctcatcactactaactcactcatataatagatttaccttactttttaaaaactacaaagtagcataatttgttctacatttatttgaaaagtaagtaattttaatctcttttttagtgggaatatgtgggcatgaaaattagatacccaacttaaaccaaaggcatgtctatcatgtggatgcagtaacatttacatttagtttttgatcgtagttttatatgaatgttccaagaaaaaagcagactgttacaaataagttaaaactgatatgattgataggttctgttttttcttgaagcctatgtatttggtaagaagaaatactaccgaagtaaaatataatgtacctagattgtaggagatgacagacataaggtatttcaaaataaatctcaggtgctataacatgtagtcatctgttttctgataagaacatcttttactctgacttgcttttatcttagtagtatgcttatggatttagtagtatgcttatggatttgataaatcttatactttttcagttgctgtcttattctctttatttctcattgtgctttcccttcccttctttataatgaaaataaatcttgagtcgttg

SEQ ID NO: 15033 - DNA, 9234 bp, Homo sapiens
  source 1..9234: mol_type = unassigned DNA
caacgtgctgagctaatagcgacagatagagggcagacagattcctgctagcagcttagtgttagttgcttgtggtaactaaggcaggtggcatacatctcagaacgtggagaatgatggtatgctttctgagttaacatgttgaactgttttgcttttctaaaaattttcctagtaacattttcttgatgatatgagagtggatatcaatgcctcacagaaacaagaggtggaacatgtgaatgaatcgtcttggaactagattatgagcactggttctttttaaagggatgtgcaagaggcagccttggcaagaaaacttgctgcataatcttacatggactaaagatgaaactttaaaccgcaaatcagctttgagtgaactttgacagaagatgtttcgacagttttatctctggacatgtttagcttcagggatcatcctgggctctctctttgaaatctgcttgggccagtatgatgatgattgcaaactagctaggggaggaccaccagctaccatagttgctattgatgaagaaagtcggaatggtacaattctggtggacaacatgctgatcaaagggactgctggaggaccagaccccaccatagaactttctttaaaggataatgtggattactgggtgttgatggatcctgttaagcaaatgcttttcctgaacagcaccggaagagttctggatagagatccaccgatgaacatacactccattgtggtgcaggtccagtgcatcaacaaaaaagtgggcactattatctaccatgaagtgcgaatagtggtgagagacaggaatgacaactcacccactttcaagcatgaaagctactatgccacagtgaatgagctcactccagttggtaccacaatattcacaggattttcaggagacaatggagctacagatatagatgatggaccaaatggacagatagagtatgttattcagtataatccagatgatccgacatccaatgacacctttgaaattcccctaatgttgactggaaatatagtgttaaggaagaggctcaactatgaagataagactcgctactttgtcataatccaagctaatgaccgtgcccaaaatctgaatgagaggcgaaccaccaccaccactctcacagtggatgttctggatggagatgacttgggtccaatgtttcttccttgtgtccttgtgccaaacactcgtgattgccgtccactcacttatcaagctgccatacctgagttgagaactccggaagaactgaaccccattattgttacgccaccaatccaagccattgatcaggaccggaatattcaaccgccatcagataggccaggaatcctctattccatccttgttgggactcctgaggattacccacgatttttccatatgcatcctaggacagcagaacttagtctcctggagccagtaaacagagactttcaccagaaatttgatttggttattaaggctgaacaagacaatggtcatcctcttcctgcctttgccggtctacacattgaaatactggatgaaaacaatcaaagtccatattttacaatgcccagttatcaaggctatatcctggaatctgccccagtgggagcaaccatttcggacagtctcaatttgacttcacctttaagaatagtagctctggacaaggacatagaagatacaaaagacccagagcttcacctttttctgaatgactacacctcagtcttcaccgtcacacagactggtattactcgctacctcaccttacttcaaccagtggacagggaagaacagcaaacttacaccttttcgataacagcatttgatggtgtacaagaaagtgagccagtcatcgtcaatattcaagtgatggatgcaaatgataacacgccaaccttccctgaaatatcctatgatgtgtatgtttatacagacatgagacctggggacagtgtcatacagctcactgcagtcgacgcagacgaagggtcaaatggggagatcacatatgaaatccttgttggggctcagggagacttcatcatcaataaaacaacagggcttatcaccatcgctccaggggtggaaatgatagtcgggcggacttacgcactcacggtccaagcagcggataatgctcctcctgcagagcgaaggaactccatctgcactgtgtatattgaagtgcttccaccaaataatcaaagccctcctcgcttcccacagctgatgtatagccttgaaattagtgaagccatgagggttggtgctgttttattaaatctacaggcaactgatcgagagggagactcaataacatatgccattgagaatggagatcctcagagagtttttaatctttcagaaaccacggggattctaaccttagggaaagcactggacagggaaagcactgatcgctacattctgatcatcacagcttcagatggcaggccagatgggacctcaactgccacagtaaacatagtggtgacagatgtcaatgacaatgctccagtgtttgatccttatctgccaagaaatttatctgtggtggaagaagaagccaatgcctttgtgggtcaagtaaaagcaacagaccctgatgctggaataaatggtcaagtgcactacagtttgggtaactttaataatctttttcgtatcacatccaatgggagcatttacacagcagtgaagcttaacagagaagtcagggactactatgaacttgttgttgtggcaacagatggagcagtacaccctcgtcattcaactctaaccttggccatcaaggttttggacattgatgataacagtcctgtgttcaccaattcaacatacactgtccttgttgaagagaatttgccagctgggactaccatccttcaaatagaggccaaagatgtcgaccttggagcaaatgtgtcttaccggataagaagcccagaagtgaagcacttttttgcactacatccatttacaggagaactatcgcttttaaggagtttagattatgaggcatttccagaccaagaagcaagtatcacttttctggtagaggcctttgatatttatggaacaatgccacctggtattgctactgtcacagtgattgtaaaggatatgaatgattatcctcctgtctttagtaaacgaatatacaaagggatggtggctccggatgcagtcaagggtacacctatcacaacagtttatgctgaagatgcagaccctcctggattacctgcaagtcgtgtgaggtatagagtagatgatgtacagtttccttaccctgccagtatttttgaagtggaagaagattctggaagagtaataacacgagtcaatcttaatgaagaacctacaacaatttttaagttggtggtggttgcttttgatgatggggagcctgtgatgtccagcagtgccacagtgaagattcttgtcttacatcctggtgagatcccacgcttcacacaggaggaatatagacctcctccagtaagtgaacttgccaccaaagggaccatggttggtgtaatttctgctgctgccattaatcaaagtattgtgtactccattgtttcaggaaatgaagaagatacatttggaattaataacatcacaggtgttatctatgtgaatggacctctggattatgagaccaggacaagctatgtacttcgagtccaagctgattccctggaagtggtccttgccaatctccgagttccttcaaaaagcaatacagctaaagtatacattgagattcaggatgaaaataatcatcccccagtgtttcagaaaaaattctacatcggaggtgtatctgaagatgcaagaatgtttacttctgtactcagagtgaaggctactgataaagatactggcaattatagtgtcatggcctacagactcataataccaccaattaaagagggaaaagaaggatttgtagtggaaacatatacagggcttatcaaaactgctatgctcttccataatatgaggagatcctacttcaagtttcaagttattgcaactgacgactatgggaagggactgagcggcaaagccgatgtactcgtctccgtggtcaatcagctggatatgcaagtcattgtttccaatgtgcctcctactctagtggaaaaaaagatagaagatcttacagagatcttggatcgctatgttcaggaacaaattcctggtgccaaggtcgtagtggagtccattggagctcgccggcatggagatgccttttccctagaagattacaccaaatgtgacttgactgtctatgcaattgacccccaaaccaacagagccatcgatagaaatgagctttttaaatttttggatggcaaactacttgatatcaataaagactttcagccgtattatggggaaggaggacgcattctggagatccggactccagaggcagtgaccagcattaaaaagagaggagaaagtctaggatacacagaaggggccttgttggctctggccttcatcatcatcctctgctgcattcctgccatcttggtggttttggtcagctacagacaggtattcaagggacgtcaagctgagtgtacaaagactgcacgaattcaggccgcattacccgcggctaaaccagcagtgccggctcctgcaccagtggcagcgcccccgccgccgccgccgcctccgccaggtgcgcatctctatgaagaacttggagacagctcaatgtatgaaatgcctcaatatgggagtcgccgtcgattgttaccaccagctggacaggaggaatatggtgaggtggttggtgaagctgaggaagaatatgaggaggaagagtgggcaagaaaaagaatgatcaagttagttgttgatcgagagtatgaaaccagctcaactggagaagacagtgctcctgaatgtcagagaaaccgtcttcaccatcctagtatccacagtaatatcaacggcaatatatatattgcacagaatggttctgtggtgagaacccgccgtgcctgcctcacggacaacttaaaagttgcttcccctgttcgactgggagggccctttaagaaactagacaagttggcagtgacacatgaggagaatgtacctctgaacacattatcaaaggggccattttctactgaaaaaatgaatgcaagaccaactctggttacatttgccccttgccctgtggggactgacaatacagcggtgaagccactaaggaacaggctgaaaagcacagttgaacaggagtccatgattgacagtaagaacatcaaggaggctttggaatttcatagtgaccacacacagtctgatgatgaagagctttggatgggcccctggaacaacctccatataccaatgacaaaactgtgaccaattttttaaaagatattttaattaatttttacttacatttttaataaactgtgctttttattgtcactgagaaaacaatgtatggaatttatatcatgcacacaagctaaaactttgaacaatatgctttaaaattttaagagacagatttgcactcacattgttatcaattaatcgtttttcccagaaaatccttttggacatactttcactaaataacctatcgtttaaacatttagctgttttgttgggtcttgaatttttgttcattttaataaacaagaaataattactaaataatcatttatattttattgattaacatagattatgctttatttctagctccacaaaacatttttagtacatgtaattttattttccatagccaaaagggcaaaaaagaagtaagaggatatttacaggcaatgagtttatacagctgctgtctatactgccctaatttttaaaatgaaagctagaattgcaaagtaaagtaaatgagggaatcacctgtaaataattaattattttaaatcatgagcttgttttctttctttattgtcctgtataaaggttttcacattttaccataaatacatttatatcttgaccctttaggaaaccacttgaagtcgtatgtctttttatcaatattatttacaatattctcttgtcccttcatctcatatcaaatatggtagatactttagtttagtttaatcacttgaggttaaataattgtttggagcaacatggaaatctcacccttagcaaaagcttttagggaagtgagaaaggttcgagtaagcagtaatgcatctagaacgacaatttcataatggaagacatggtgaggttagggaagtctcacattaatgtcactagactttaatagtttgtaaacccagcatatcagagtaaaggaatttggcagggttgaaatgtatataatatataaagcttataaaggctatgaattcataacttcaaatgttgtgtttaacttcttccattttcaggttatttatagaatattttaatgcacatatttatgtgcctaaaatccagaaccaggaaatcattgcctgggcattttttaaaatcaaagaacatggtcttgattttttaccattgaacaaagcacagtgtttcatcataagtagaaatgaaaacagaatatcctttaaaaaacttgccttgtgtgttgcttattttccagatgatgtaaaaagaatgaaacaatatagattaagagaattcagaattctattgaatattacttagtatgatatagatgtagctcacttcaaattttgcacagtattgaccaagttcaggttttaatgaaatttcctcatgcatgcttaatatatggttgaaggactgaataatgcactattatttattcccctcttacatgtttcgcgtcttaaaaattgtttattattatgctatttcctcatttccaaagtgaatgaattgtactgacataaacttgccgacttgtaagagtagtatgtttttacttcagatttccaagaaaatatttgagatcaaatacagtaacatctcatctaccttattttattgagaattaatgcattccatacccttgccaaaaaaacaaaacaaaacaaacaaacaaaaaaaaacctagtggcattagctagattagaaacgtagaatcatgaccacacctcctggcctgccaaacaagcatccacattttcaaaagatcctaaggtggtttatatgcacattaaattttggaagcaatgaagtccggggcttattccttcaggcaccaaagcaatggtttttagtataggatactttgtataggaattagattaagcatatatttccctactaattcaatcagaggtcatcgaatataatttaatattatcttgatacccccagatcatctcagtcagcatcccttgatattctctctatatacagcttcatggctgcgtttttgtcctttgatttctggctgtgacatttaacttattctgttgttgtgcctttctcacatttttttctttcagtttatagcttctagtatcctgatgggaaagtttgtgttttttgtttgttttcttaatgttgaaaaatcatgaagcttaagatgggaattaggtacacggattcaaccaaatgttttgcgactcttagacgctttctttggttaccagtagatttggaaatatgatgttggcagaagtctagtggcctgacatatgagatgtcactgtattttaaactacattttttatgagaaaatatgcaaaattttacaagccacttagcagacacatttcagtaatttaaacttgatcatttcagtaaaaacaatcatgaggtcaatcatctgttacttaatggagatagtataaagagaagcagaatttacacagagcaaccaaaccaaatatttggtcagtatatttttgggtaacgtagagcagcaaaattattactaactaaataaatctggatcaattaaatagttactttcatagaactttcactagtctataaatccctgactcaggattaaaactgtggaacccagaggaaatacccaggtatgtttaatcttaagaatacttcatataaataacgtttcaatgtaaatatttataaagaaattggttgttatttttcctaggaaggtgtaggaaggttttcttgttgttctcaatcagcactagcttcaatcaggcagaagaaacagcaggtcttggctaatcgaggtgagaacagaatgatgtaatgactaatattgcaacccgttgattttagaaggtcttgtgggcattaagggaaagcagaggaagaatgagaaaatatggtcagagtgacataggacatttgtgacttaatgaccatcgaatcacaggtgttaatctccctctctcaatttgtctttctcattaattacagactctgagagttgtcatagaattgcaaccgtaggttggccaaaaccatctttttaaaatacagaagaaagtttgccttgaattttatatgtgatatgtcattcatgttattttaccacattgttcacagggatgttaaagactattatttacttaagtggttgttccaaaggtgattcagtagttaccattaaaatattatttaaaaacatttttatatcatagagccagaagtaattgaatattgactctcgagggaagacattttctgtcttttatttcatgagctttgatttttctctttctctgcttcaccttctgcactttataccttaagtgggatttatataccacttgaatttaattagcaaaataggcaaaaagtgctaataatctattctcagggcagatgcctattggtgcctgcaaattacacagcgataaggctgaaggataggttcaaaataatgttgaggacttacacattttatagatagtttctttctattcccaaatggtatgtgaaatttttgttctattttttttattggttttcaatagttaattttgatctttatcataagaagctttagttatagactggtatttttttcattgcaatctactttaaatttatggtcagttaagcacatgtatggaagattcgaacattgtctatagtttgaaaaatctatcaacaccttcactgctttcccaatttctttatccaaatacctgttcttccttaacaaatattatgttactgtataagaatctgaattagaagttttaagttaaaatgcattgttattcactacacaatgtttcaaaaataaattttcatttgaaaa

SEQ ID NO: 15034 - DNA, 5806 bp, Homo sapiens
  source 1..5806: mol_type = unassigned DNA
caacgtgctgagctaatagcgacagatagagggcagacagattcctgctagcagcttagtgttagttgcttgtggtaactaaggcaggtggcatacatctcagaacgtggagaatgatggtatgctttctgagttaacatgttgaactgttttgcttttctaaaaattttcctagtaacattttcttgatgatatgagagtggatatcaatgcctcacagaaacaagaggtggaacatgtgaatgaatcgtcttggaactagattatgagcactggttctttttaaagggatgtgcaagaggcagccttggcaagaaaacttgctgcataatcttacatggactaaagatgaaactttaaaccgcaaatcagctttgagtgaactttgacagaagatgtttcgacagttttatctctggacatgtttagcttcagggatcatcctgggctctctctttgaaatctgcttgggccagtatgatgatgattgcaaactagctaggggaggaccaccagctaccatagttgctattgatgaagaaagtcggaatggtacaattctggtggacaacatgctgatcaaagggactgctggaggaccagaccccaccatagaactttctttaaaggataatgtggattactgggtgttgatggatcctgttaagcaaatgcttttcctgaacagcaccggaagagttctggatagagatccaccgatgaacatacactccattgtggtgcaggtccagtgcatcaacaaaaaagtgggcactattatctaccatgaagtgcgaatagtggtgagagacaggaatgacaactcacccactttcaagcatgaaagctactatgccacagtgaatgagctcactccagttggtaccacaatattcacaggattttcaggagacaatggagctacagatatagatgatggaccaaatggacagatagagtatgttattcagtataatccagatgatccgacatccaatgacacctttgaaattcccctaatgttgactggaaatatagtgttaaggaagaggctcaactatgaagataagactcgctactttgtcataatccaagctaatgaccgtgcccaaaatctgaatgagaggcgaaccaccaccaccactctcacagtggatgttctggatggagatgacttgggtccaatgtttcttccttgtgtccttgtgccaaacactcgtgattgccgtccactcacttatcaagctgccatacctgagttgagaactccggaagaactgaaccccattattgttacgccaccaatccaagccattgatcaggaccggaatattcaaccgccatcagataggccaggaatcctctattccatccttgttgggactcctgaggattacccacgatttttccatatgcatcctaggacagcagaacttagtctcctggagccagtaaacagagactttcaccagaaatttgatttggttattaaggctgaacaagacaatggtcatcctcttcctgcctttgccggtctacacattgaaatactggatgaaaacaatcaaagtccatattttacaatgcccagttatcaaggctatatcctggaatctgccccagtgggagcaaccatttcggacagtctcaatttgacttcacctttaagaatagtagctctggacaaggacatagaagatacaaaagacccagagcttcacctttttctgaatgactacacctcagtcttcaccgtcacacagactggtattactcgctacctcaccttacttcaaccagtggacagggaagaacagcaaacttacaccttttcgataacagcatttgatggtgtacaagaaagtgagccagtcatcgtcaatattcaagtgatggatgcaaatgataacacgccaaccttccctgaaatatcctatgatgtgtatgtttatacagacatgagacctggggacagtgtcatacagctcactgcagtcgacgcagacgaagggtcaaatggggagatcacatatgaaatccttgttggggctcagggagacttcatcatcaataaaacaacagggcttatcaccatcgctccaggggtggaaatgatagtcgggcggacttacgcactcacggtccaagcagcggataatgctcctcctgcagagcgaaggaactccatctgcactgtgtatattgaagtgcttccaccaaataatcaaagccctcctcgcttcccacagctgatgtatagccttgaaattagtgaagccatgagggttggtgctgttttattaaatctacaggcaactgatcgagagggagactcaataacatatgccattgagaatggagatcctcagagagtttttaatctttcagaaaccacggggattctaaccttagggaaagcactggacagggaaagcactgatcgctacattctgatcatcacagcttcagatggcaggccagatgggacctcaactgccacagtaaacatagtggtgacagatgtcaatgacaatgctccagtgtttgatccttatctgccaagaaatttatctgtggtggaagaagaagccaatgcctttgtgggtcaagtaaaagcaacagaccctgatgctggaataaatggtcaagtgcactacagtttgggtaactttaataatctttttcgtatcacatccaatgggagcatttacacagcagtgaagcttaacagagaagtcagggactactatgaacttgttgttgtggcaacagatggagcagtacaccctcgtcattcaactctaaccttggccatcaaggttttggacattgatgataacagtcctgtgttcaccaattcaacatacactgtccttgttgaagagaatttgccagctgggactaccatccttcaaatagaggccaaagatgtcgaccttggagcaaatgtgtcttaccggataagaagcccagaagtgaagcacttttttgcactacatccatttacaggagaactatcgcttttaaggagtttagattatgaggcatttccagaccaagaagcaagtatcacttttctggtagaggcctttgatatttatggaacaatgccacctggtattgctactgtcacagtgattgtaaaggatatgaatgattatcctcctgtctttagtaaacgaatatacaaagggatggtggctccggatgcagtcaagggtacacctatcacaacagtttatgctgaagatgcagaccctcctggattacctgcaagtcgtgtgaggtatagagtagatgatgtacagtttccttaccctgccagtatttttgaagtggaagaagattctggaagagtaataacacgagtcaatcttaatgaagaacctacaacaatttttaagttggtggtggttgcttttgatgatggggagcctgtgatgtccagcagtgccacagtgaagattcttgtcttacatcctggtgagatcccacgcttcacacaggaggaatatagacctcctccagtaagtgaacttgccaccaaagggaccatggttggtgtaatttctgctgctgccattaatcaaagtattgtgtactccattgtttcaggaaatgaagaagatacatttggaattaataacatcacaggtgttatctatgtgaatggacctctggattatgagaccaggacaagctatgtacttcgagtccaagctgattccctggaagtggtccttgccaatctccgagttccttcaaaaagcaatacagctaaagtatacattgagattcaggatgaaaataatcatcccccagtgtttcagaaaaaattctacatcggaggtgtatctgaagatgcaagaatgtttacttctgtactcagagtgaaggctactgataaagatactggcaattatagtgtcatggcctacagactcataataccaccaattaaagagggaaaagaaggatttgtagtggaaacatatacagggcttatcaaaactgctatgctcttccataatatgaggagatcctacttcaagtttcaagttattgcaactgacgactatgggaagggactgagcggcaaagccgatgtactcgtctccgtggtcaatcagctggatatgcaagtcattgtttccaatgtgcctcctactctagtggaaaaaaagatagaagatcttacagagatcttggatcgctatgttcaggaacaaattcctggtgccaaggtcgtagtggagtccattggagctcgccggcatggagatgccttttccctagaagattacaccaaatgtgacttgactgtctatgcaattgacccccaaaccaacagagccatcgatagaaatgagctttttaaatttttggatggcaaactacttgatatcaataaagactttcagccgtattatggggaaggaggacgcattctggagatccggactccagaggcagtgaccagcattaaaaagagaggagaaagtctaggatacacagaaggggccttgttggctctggccttcatcatcatcctctgctgcattcctgccatcttggtggttttggtcagctacagacaggtattcaagggacgtcaagctgagtgtacaaagactgcacgaattcaggccgcattacccgcggctaaaccagcagtgccggctcctgcaccagtggcagcgcccccgccgccgccgccgcctccgccaggtgcgcatctctatgaagaacttggagacagctcaatgaataggaattatccatggagtctggaattgatcctggccaggaatatggacaagattattacagttatgagcatgggtatgaaatgcctcaatatgggagtcgccgtcgattgttaccaccagctggacaggaggaatatggtgaggtggttggtgaagctgaggaagaatatgaggaggaagaggaagagccaaagaaaattaaaaaaccaaaggttgaaattagagagcctagtgaggaggaagaagtagttgtaactatcgaaaaaccaccagcagctgagcctacatacacaacatggaagagagccagaatattccccatgatttttaagaaagttagaggattagctgataaaagaggaatcgttgaccttgagggtgaagagtggcagagacgccttgaggaagaagataaagattatttgaaactcactctggaccaagaggaagcaacagaaagcactgtagaatcagaggaggaatcctccagcgactatactgaatacagtgaagaagagtctgagttcagtgagtctgagactacagaagaggaatctgagtcagagacaccctctgaggaggaggagagttccacccctgaatcagaagaatcggaatccacagagtcagaaggagaaaaagcaaggaaaaacattgtgcttgcaagaagaaggcccatggttgaggaggtcaaggaagtcaagggtaggaaagaggagccacaagaagaacaaaaagaacctaagatggaagaagaagaacactcagaagaagaagaaagtggaccagcccctgtggaagaaagtacagaccctgaagctcaagatatccctgaagagggcagtgcagaatcagcttcggtggaaggaggtgtggaaagtgaggaggaatcagaatcaggtagtagtagcagtagtagcgaaagtcagtctggaggtccatggggctatcaggtaccagcgtatgacagaagcaagaatgcaaaccaaaagaagtcgccaggagcaaactctgaaggttacaacacagcactttga

SEQ ID NO: 15035 - DNA, 5765 bp, Homo sapiens
  source 1..5765: mol_type = unassigned DNA
caacgtgctgagctaatagcgacagatagagggcagacagattcctgctagcagcttagtgttagttgcttgtggtaactaaggcaggtggcatacatctcagaacgtggagaatgatggtatgctttctgagttaacatgttgaactgttttgcttttctaaaaattttcctagtaacattttcttgatgatatgagagtggatatcaatgcctcacagaaacaagaggtggaacatgtgaatgaatcgtcttggaactagattatgagcactggttctttttaaagggatgtgcaagaggcagccttggcaagaaaacttgctgcataatcttacatggactaaagatgaaactttaaaccgcaaatcagctttgagtgaactttgacagaagatgtttcgacagttttatctctggacatgtttagcttcagggatcatcctgggctctctctttgaaatctgcttgggccagtatgatgatgactggcaatatgaggattgcaaactagctaggggaggaccaccagctaccatagttgctattgatgaagaaagtcggaatggtacaattctggtggacaacatgctgatcaaagggactgctggaggaccagaccccaccatagaactttctttaaaggataatgtggattactgggtgttgatggatcctgttaagcaaatgcttttcctgaacagcaccggaagagttctggatagagatccaccgatgaacatacactccattgtggtgcaggtccagtgcatcaacaaaaaagtgggcactattatctaccatgaagtgcgaatagtggtgagagacaggaatgacaactcacccactttcaagcatgaaagctactatgccacagtgaatgagctcactccagttggtaccacaatattcacaggattttcaggagacaatggagctacagatatagatgatggaccaaatggacagatagagtatgttattcagtataatccagatgatccgacatccaatgacacctttgaaattcccctaatgttgactggaaatatagtgttaaggaagaggctcaactatgaagataagactcgctactttgtcataatccaagctaatgaccgtgcccaaaatctgaatgagaggcgaaccaccaccaccactctcacagtggatgttctggatggagatgacttgggtccaatgtttcttccttgtgtccttgtgccaaacactcgtgattgccgtccactcacttatcaagctgccatacctgagttgagaactccggaagaactgaaccccattattgttacgccaccaatccaagccattgatcaggaccggaatattcaaccgccatcagataggccaggaatcctctattccatccttgttgggactcctgaggattacccacgatttttccatatgcatcctaggacagcagaacttagtctcctggagccagtaaacagagactttcaccagaaatttgatttggttattaaggctgaacaagacaatggtcatcctcttcctgcctttgccggtctacacattgaaatactggatgaaaacaatcaaagtccatattttacaatgcccagttatcaaggctatatcctggaatctgccccagtgggagcaaccatttcggacagtctcaatttgacttcacctttaagaatagtagctctggacaaggacatagaagatgttccacccagtggagttcctacaaaagacccagagcttcacctttttctgaatgactacacctcagtcttcaccgtcacacagactggtattactcgctacctcaccttacttcaaccagtggacagggaagaacagcaaacttacaccttttcgataacagcatttgatggtgtacaagaaagtgagccagtcatcgtcaatattcaagtgatggatgcaaatgataacacgccaaccttccctgaaatatcctatgatgtgtatgtttatacagacatgagacctggggacagtgtcatacagctcactgcagtcgacgcagacgaagggtcaaatggggagatcacatatgaaatccttgttggggctcagggagacttcatcatcaataaaacaacagggcttatcaccatcgctccaggggtggaaatgatagtcgggcggacttacgcactcacggtccaagcagcggataatgctcctcctgcagagcgaaggaactccatctgcactgtgtatattgaagtgcttccaccaaataatcaaagccctcctcgcttcccacagctgatgtatagccttgaaattagtgaagccatgagggttggtgctgttttattaaatctacaggcaactgatcgagagggagactcaataacatatgccattgagaatggagatcctcagagagtttttaatctttcagaaaccacggggattctaaccttagggaaagcactggacagggaaagcactgatcgctacattctgatcatcacagcttcagatggcaggccagatgggacctcaactgccacagtaaacatagtggtgacagatgtcaatgacaatgctccagtgtttgatccttatctgccaagaaatttatctgtggtggaagaagaagccaatgcctttgtgggtcaagtaaaagcaacagaccctgatgctggaataaatggtcaagtgcactacagtttgggtaactttaataatctttttcgtatcacatccaatgggagcatttacacagcagtgaagcttaacagagaagtcagggactactatgaacttgttgttgtggcaacagatggagcagtacaccctcgtcattcaactctaaccttggccatcaaggttttggacattgatgataacagtcctgtgttcaccaattcaacatacactgtccttgttgaagagaatttgccagctgggactaccatccttcaaatagaggccaaagatgtcgaccttggagcaaatgtgtcttaccggataagaagcccagaagtgaagcacttttttgcactacatccatttacaggagaactatcgcttttaaggagtttagattatgaggcatttccagaccaagaagcaagtatcacttttctggtagaggcctttgatatttatggaacaatgccacctggtattgctactgtcacagtgattgtaaaggatatgaatgattatcctcctgtctttagtaaacgaatatacaaagggatggtggctccggatgcagtcaagggtacacctatcacaacagtttatgctgaagatgcagaccctcctggattacctgcaagtcgtgtgaggtatagagtagatgatgtacagtttccttaccctgccagtatttttgaagtggaagaagattctggaagagtaataacacgagtcaatcttaatgaagaacctacaacaatttttaagttggtggtggttgcttttgatgatggggagcctgtgatgtccagcagtgccacagtgaagattcttgtcttacatcctggtgagatcccacgcttcacacaggaggaatatagacctcctccagtaagtgaacttgccaccaaagggaccatggttggtgtaatttctgctgctgccattaatcaaagtattgtgtactccattgtttcaggaaatgaagaagatacatttggaattaataacatcacaggtgttatctatgtgaatggacctctggattatgagaccaggacaagctatgtacttcgagtccaagctgattccctggaagtggtccttgccaatctccgagttccttcaaaaagcaatacagctaaagtatacattgagattcaggatgaaaataatcatcccccagtgtttcagaaaaaattctacatcggaggtgtatctgaagatgcaagaatgtttacttctgtactcagagtgaaggctactgataaagatactggcaattatagtgtcatggcctacagactcataataccaccaattaaagagggaaaagaaggatttgtagtggaaacatatacagggcttatcaaaactgctatgctcttccataatatgaggagatcctacttcaagtttcaagttattgcaactgacgactatgggaagggactgagcggcaaagccgatgtactcgtctccgtggtcaatcagctggatatgcaagtcattgtttccaatgtgcctcctactctagtggaaaaaaagatagaagatcttacagagatcttggatcgctatgttcaggaacaaattcctggtgccaaggtcgtagtggagtccattggagctcgccggcatggagatgccttttccctagaagattacaccaaatgtgacttgactgtctatgcaattgacccccaaaccaacagagccatcgatagaaatgagctttttaaatttttggatggcaaactacttgatatcaataaagactttcagccgtattatggggaaggaggacgcattctggagatccggactccagaggcagtgaccagcattaaaaagagaggagaaagtctaggatacacagaaggggccttgttggctctggccttcatcatcatcctctgctgcattcctgccatcttggtggttttggtcagctacagacaggtattcaagggacgtcaagctgagtgtacaaagactgcacgaattcaggccgcattacccgcggctaaaccagcagtgccggctcctgcaccagtggcagcgcccccgccgccgccgccgcctccgccaggtgcgcatctctatgaagaacttggagacagctcaatgtatgaaatgcctcaatatgggagtcgccgtcgattgttaccaccagctggacaggaggaatatggtgaggtggttggtgaagctgaggaagaatatgaggaggaagaggaagagccaaagaaaattaaaaaaccaaaggttgaaattagagagcctagtgaggaggaagaagtagttgtaactatcgaaaaaccaccagcagctgagcctacatacacaacatggaagagagccagaatattccccatgatttttaagaaagttagaggattagctgataaaagaggaatcgttgaccttgagggtgaagagtggcagagacgccttgaggaagaagataaagattatttgaaactcactctggaccaagaggaagcaacagaaagcactgtagaatcagaggaggaatcctccagcgactatactgaatacagtgaagaagagtctgagttcagtgagtctgagactacagaagaggaatctgagtcagagacaccctctgaggaggaggagagttccacccctgaatcagaagaatcggaatccacagagtcagaaggagaaaaagcaaggaaaaacattgtgcttgcaagaagaaggcccatggttgaggaggtcaaggaagtcaagggtaggaaagaggagccacaagaagaacaaaaagaacctaagatggaagaagaagaacactcagaagaagaagaaagtggaccagcccctgtggaagaaagtacagaccctgaagctcaagatatccctgaagagggcagtgcagaatcagcttcggtggaaggaggtgtggaaagtgaggaggaatcagaatcaggtagtagtagcagtagtagcgaaagtcagtctggaggtccatggggctatcaggtaccagcgtatgacagaagcaagaatgcaaaccaaaagaagtcgccaggagcaaactctgaaggttacaacacagcactttga

SEQ ID NO: 15036 - DNA, 4471 bp, Homo sapiens
  source 1..4471: mol_type = unassigned DNA
gtagatgcagtccgccgccgccgctgcctcagccagcaatgcaagattagatctctaaatgcagcaaaacactgcctgaaaacagaccggcccgcgcagcaagcagacatttcacggtgcgctggggaagcttcaaaatatatctgtgactctgtcttcgttgctcttcatccccatcaatttcatcacgggaggcgagcagcaagtaagaatttcactttcggatctgcctagagacacacctccctgctccctcccccactcgatgtgaagagtattccggagtctccgggcgggagtagatttgcagcaccctagcgggagcgaggaaaacctactgattctttagctcattatcatctctcccagacgagatttccttcttatcgcctgcctcatcgctcaagtttgagcctcccgaagtccgggcgggagagacgaaacccctggctcacccccagccgcaggaagccaccgccttgctccaagcccctgcagctctgctgcaccgcagcttctcacccagtgcggatgctgtagatcaacaggttcagggaacttgagcagaataaggagagaccaccgggtgccgcagctcgggtgcagagggaaaaaaggacccatagacttgtggctcgcgtcgcgcgcgcacgctgcgccagggccccaggctggcgcgcactccctctctggctcctccagtccgattgctcctgcccccaccttacaggtctgggatgtacctttccatctgttgctgctttcttctatgggcccctgccctcactctcaagaacctcaactactccgtgccggaggagcaaggggccggcacggtgatcgggaacatcggcagggatgctcgactgcagcctgggcttccgcctgcagagcgcggcggcggagggcgcagcaagtcgggtagctaccgggtgctggagaactccgcaccgcacctgctggacgtggacgcagacagcgggctcctctacaccaagcagcgcatcgaccgcgagtccctgtgccgccacaatgccaagtgccagctgtccctcgaggtgttcgccaacgacaaggagatctgcatgatcaaggtagagatccaggacatcaacgacaacgcgccctccttctcctcggaccagatcgaaatggacatctcggagaacgctgctccgggcacccgcttccccctcaccagcgcacatgaccccgacgccggcgagaatgggctccgcacctacctgctcacgcgcgacgatcacggcctctttggactggacgttaagtcccgcggcgacggcaccaagttcccagaactggtcatccagaaggctctggaccgcgagcaacagaatcaccatacgctcgtgctgactgccctggacggtggcgagcctccacgttccgccaccgtacagatcaacgtgaaggtgattgactccaacgacaacagcccggtcttcgaggcgccatcctacttggtggaactgcccgagaacgctccgctgggtacagtggtcatcgatctgaacgccaccgacgccgatgaaggtcccaatggtgaagtgctctactctttcagcagctacgtgcctgaccgcgtgcgggagctcttctccatcgaccccaagaccggcctaatccgtgtgaagggcaatctggactatgaggaaaacgggatgctggagattgacgtgcaggcccgagacctggggcctaaccctatcccagcccactgcaaagtcacggtcaagctcatcgaccgcaacgacaatgcgccgtccatcggtttcgtctccgtgcgccagggggcgctgagcgaggccgcccctcccggcaccgtcatcgccctggtgcgggtcactgaccgggactctggcaagaacggacagctgcagtgtcgggtcctaggcggaggagggacgggcggcggcgggggcctgggcgggcccgggggttccgtccccttcaagcttgaggagaactacgacaacttctacacggtggtgactgaccgcccgctggaccgcgagacacaagacgagtacaacgtgaccatcgtggcgcgggacgggggctctcctcccctcaactccaccaagtcgttcgcgatcaagattctagacgagaacgacaacccgcctcggttcaccaaagggctctacgtgcttcaggtgcacgagaacaacatcccgggagagtacctgggctctgtgctcgcccaggatcccgacctgggccagaacggcaccgtatcctactctatcctgccctcgcacatcggcgacgtgtctatctacacctatgtgtctgtgaatcccacgaacggggccatctacgccctgcgctcctttaacttcgagcagaccaaggcttttgagttcaaggtgcttgctaaggactcgggggcgcccgcgcacttggagagcaacgccacggtgagggtgacagtgctagacgtgaatgacaacgcgccagtgatcgtgctccccacgctgcagaacgacaccgcggagctgcaggtgccgcgcaacgctggcctgggctatctggtgagcactgtgcgcgccctagacagcgacttcggcgagagcgggcgtctcacctacgagatcgtggacggcaacgacgaccacctgtttgagatcgacccgtccagcggcgagatccgcacgctgcaccctttctgggaggacgtgacgcccgtggtggagctggtggtgaaggtgaccgaccacggcaagcctaccctgtccgcagtggccaagctcatcatccgctcggtgagcggatcccttcccgagggggtaccacgggtgaatggcgagcagcaccactgggacatgtcgctgccgctcatcgtgactctgagcactatctccatcatcctcctagcggccatgatcaccatcgccgtcaagtgcaagcgcgagaacaaggagatccgcacttacaactgccgcatcgccgagtacagccacccgcagctgggtgggggcaagggcaagaagaagaagatcaacaaaaatgatatcatgctggtgcagagcgaagtggaggagaggaacgccatgaacgtcatgaacgtggtgagcagcccctccctggccacctcccccatgtacttcgactaccagacccgcctgcccctcagctcgccccggtcggaggtgatgtatctcaaaccggcctccaacaacctgactgtccctcaggggcacgcgggctgccacaccagcttcaccggacaagggactaatgcaagcgagacccctgccactcggatgtccataattcagacagacaattttcccgcagagcccaattacatgggcagcaggcagcagtttgttcaaagtatttcagtagctccacgtttaaggacccagaaagagccagcctgagagacagtgggcacggggacagtgatcaggctgacagtgaccaagacactaacaaaggctcctgctgtgacatgtctgttagggaggcactcaagatgaaaactacttcaactaaaagccaaccacttgaacaagaaccagaagagtgtgttaattgcacagatgaatgccgagtgcttggtcattctgacaggtgctggatgccacagttccctgcagccaatcaggctgaaaatgcagattaccgcacaaatctctttgtacctacagttgaagctaatgttgagactgagacttacgaaactgtgaatcccactgggaaaaagactttttgtacatttggaaaagacaagcgagagcacactattctcattgccaacgttaaaccttatttaaaagccaaacgtgccctgagccctctcctccaagaggtcccctcagcatcaagcagcccaaccaaggcgtgcatcgagccttgcacctcaacaaaaggctccctggatggctgtgaagcaaaaccaggagccctggctgaagcaagcagtcagtacttgcccactgacagtcaatatctgtcacctagtaagcaaccaagagaccctcccttcatggcttccgatcagatggcaagggtctttgcagatgtgcattccagagccagccgggattccagtgagatgggtgctgttcttgagcagcttgaccaccccaacagggatctgggcagagagtctgtggatgcagaggaagttgtgagagaaattgataagcttttgcaagactgccggggaaacgaccctgtggctgtgagaaagtgaaaaaagaaaaaaaaaaaggcattggcattttcttgtctcttctgttgatttaaaaatgatccctcctggtgataacccattttacagggatgaagaaagaccaatgctgctttaaggcttttagtgaacatctgaagtgcccacaagtatgttctttccactgctgatttctttttcagagataacaatggtttcgttttgaccaaacttgtattaggacagaattaatgatgcttaaagagaaaa

SEQ ID NO: 15037 - DNA, 8232 bp, Homo sapiens
  source 1..8232: mol_type = unassigned DNA
agatgcagtccgccgccgccgctgcctcagccagcaatgcaagattagatctctaaatgcagcaaaacactgcctgaaaacagaccggcccgcgcagcaagcagacatttcacggtgcgctggggaagcttcaaaatatatctgtgactctgtcttcgttgctcttcatccccatcaatttcatcacgggaggcgagcagcaagtaagaatttcactttcggatctgcctagagacacacctccctgctccctcccccactcgatgtgaagagtattccggagtctccgggcgggagtagatttgcagcaccctagcgggagcgaggaaaacctactgattctttagctcattatcatctctcccagacgagatttccttcttatcgcctgcctcatcgctcaagtttgagcctcccgaagtccgggcgggagagacgaaacccctggctcacccccagccgcaggaagccaccgccttgctccaagcccctgcagctctgctgcaccgcagcttctcacccagtgcggatgctgtagatcaacaggttcagggaacttgagcagaataaggagagaccaccgggtgccgcagctcgggtgcagagggaaaaaaggacccatagacttgtggctcgcgtcgcgcgcgcacgctgcgccagggccccaggctggcgcgcactccctctctggctcctccagtccgattgctcctgcccccaccttacaggtctgggatgtacctttccatctgttgctgctttcttctatgggcccctgccctcactctcaagaacctcaactactccgtgccggaggagcaaggggccggcacggtgatcgggaacatcggcagggatgctcgactgcagcctgggcttccgcctgcagagcgcggcggcggagggcgcagcaagtcgggtagctaccgggtgctggagaactccgcaccgcacctgctggacgtggacgcagacagcgggctcctctacaccaagcagcgcatcgaccgcgagtccctgtgccgccacaatgccaagtgccagctgtccctcgaggtgttcgccaacgacaaggagatctgcatgatcaaggtagagatccaggacatcaacgacaacgcgccctccttctcctcggaccagatcgaaatggacatctcggagaacgctgctccgggcacccgcttccccctcaccagcgcacatgaccccgacgccggcgagaatgggctccgcacctacctgctcacgcgcgacgatcacggcctctttggactggacgttaagtcccgcggcgacggcaccaagttcccagaactggtcatccagaaggctctggaccgcgagcaacagaatcaccatacgctcgtgctgactgccctggacggtggcgagcctccacgttccgccaccgtacagatcaacgtgaaggtgattgactccaacgacaacagcccggtcttcgaggcgccatcctacttggtggaactgcccgagaacgctccgctgggtacagtggtcatcgatctgaacgccaccgacgccgatgaaggtcccaatggtgaagtgctctactctttcagcagctacgtgcctgaccgcgtgcgggagctcttctccatcgaccccaagaccggcctaatccgtgtgaagggcaatctggactatgaggaaaacgggatgctggagattgacgtgcaggcccgagacctggggcctaaccctatcccagcccactgcaaagtcacggtcaagctcatcgaccgcaacgacaatgcgccgtccatcggtttcgtctccgtgcgccagggggcgctgagcgaggccgcccctcccggcaccgtcatcgccctggtgcgggtcactgaccgggactctggcaagaacggacagctgcagtgtcgggtcctaggcggaggagggacgggcggcggcgggggcctgggcgggcccgggggttccgtccccttcaagcttgaggagaactacgacaacttctacacggtggtgactgaccgcccgctggaccgcgagacacaagacgagtacaacgtgaccatcgtggcgcgggacgggggctctcctcccctcaactccaccaagtcgttcgcgatcaagattctagacgagaacgacaacccgcctcggttcaccaaagggctctacgtgcttcaggtgcacgagaacaacatcccgggagagtacctgggctctgtgctcgcccaggatcccgacctgggccagaacggcaccgtatcctactctatcctgccctcgcacatcggcgacgtgtctatctacacctatgtgtctgtgaatcccacgaacggggccatctacgccctgcgctcctttaacttcgagcagaccaaggcttttgagttcaaggtgcttgctaaggactcgggggcgcccgcgcacttggagagcaacgccacggtgagggtgacagtgctagacgtgaatgacaacgcgccagtgatcgtgctccccacgctgcagaacgacaccgcggagctgcaggtgccgcgcaacgctggcctgggctatctggtgagcactgtgcgcgccctagacagcgacttcggcgagagcgggcgtctcacctacgagatcgtggacggcaacgacgaccacctgtttgagatcgacccgtccagcggcgagatccgcacgctgcaccctttctgggaggacgtgacgcccgtggtggagctggtggtgaaggtgaccgaccacggcaagcctaccctgtccgcagtggccaagctcatcatccgctcggtgagcggatcccttcccgagggggtaccacgggtgaatggcgagcagcaccactgggacatgtcgctgccgctcatcgtgactctgagcactatctccatcatcctcctagcggccatgatcaccatcgccgtcaagtgcaagcgcgagaacaaggagatccgcacttacaactgccgcatcgccgagtacagccacccgcagctgggtgggggcaagggcaagaagaagaagatcaacaaaaatgatatcatgctggtgcagagcgaagtggaggagaggaacgccatgaacgtcatgaacgtggtgagcagcccctccctggccacctcccccatgtacttcgactaccagacccgcctgcccctcagctcgccccggtcggaggtgatgtatctcaaaccggcctccaacaacctgactgtccctcaggggcacgcgggctgccacaccagcttcaccggacaagggactaatgcaagcgagacccctgccactcggatgtccataattcagacagacaattttcccgcagagcccaattacatgggcagcaggcagcagtttgttcaaagtagctccacgtttaaggacccagaaagagccagcctgagagacagtgggcacggggacagtgatcaggctgacagtgaccaagacactaacaaaggctcctgctgtgacatgtctgttagggaggcactcaagatgaaaactacttcaactaaaagccaaccacttgaacaagaaccagaagagtgtgttaattgcacagatgaatgccgagtgcttggtcattctgacaggtgctggatgccacagttccctgcagccaatcaggctgaaaatgcagattaccgcacaaatctctttgtacctacagttgaagctaatgttgagactgagacttacgaaactgtgaatcccactgggaaaaagactttttgtacatttggaaaagacaagcgagagcacactattctcattgccaacgttaaaccttatttaaaagccaaacgtgccctgagccctctcctccaagaggtcccctcagcatcaagcagcccaaccaaggcgtgcatcgagccttgcacctcaacaaaaggctccctggatggctgtgaagcaaaaccaggagccctggctgaagcaagcagtcagtacttgcccactgacagtcaatatctgtcacctagtaagcaaccaagagaccctcccttcatggcttccgatcagatggcaagggtctttgcagatgtgcattccagagccagccgggattccagtgagatgggtgctgttcttgagcagcttgaccaccccaacagggatctgggcagagagtctgtggatgcagaggaagttgtgagagaaattgataagcttttgcaagactgccggggaaacgaccctgtggctgtgagaaagtgaaaaaagaaaaaaaaaaaggcattggcattttcttgtctcttctgttgatttaaaaatgatccctcctggtgataacccattttacagggatgaagaaagaccaatgctgctttaaggcttttagtgaacatctgaagtgcccacaagtatgttctttccactgctgatttctttttcagagataacaatggtttcgttttgaccaaacttgtattaggacagaattaatgatgcttaaagagaaaagaaaaaaagagagaagaaaaaggagagatgaaaaaggaggatgaggagaagaattaccttttgacaatctgttaggaaggtatgcagtgtgagaactgaagtatttctgatcactctcagactgtcctccgtgatttatgctgacttaactgtttacctataaaccccatacaaagcagggtcataatttgtgatctgtggtggatttctagcagtcatcacaggcttctactgaaagtcctgaaaagaccttgcagtagtccaagctacaccaaacattaacacatatttgtggtaaacatttctgtataaagttacctgacacacatataaacacaaggaacattccatatcattagtcgaaaacaaaaacaaaaaaaaaacctttggtcatttgtaagacatctcatgtcatataaaagttaaatgtaaaaagatacagtccattttgtcctgcacacacgtagactaattcacgtcattaaagaagaagaaaacttaaagatttaaaatgcctatttagcattttagtgtccaacaaagatttaaacaatgatgaatatgttttaaatttgacatagaaaagttctaaaaaatagttaccattgagtggtaagattcagagaaaattaacttgattaatatgttttattcatttgtggacactaaaatagctcaggaaagtgaaaatgtcttagacatacgcaagtcacatgaccatttaaatgtgcaaatgtaagaagattcaatgtgtttacatcaaatgacatattttattgatttattgcagattcagtgcatatgagccaaattgttgagtgtgtaagagctatattgtgtattttattaaattaatatatagttgtgttgcaaaaatatttgggcttatattgtaaatggcaagtgttgccttggtagctgtcgaactctatgagttttgttttttcctgcttccttttccccatggagtgtgggaagcagtgcctcagagcaaagtctcttgtttaatgtatagtctaccaagtactacagtacataatctgttcaaaatgtgtttgagtgagctgatggagctaactgaaaggtcaaaaattacatccatcagtcatggttatgtgcaagtccttgtagaagcttttattaaagtcatgctaaatcacaagaattgacatttgtaccaatatctgaaacttcttcatgttttttcaataacatacagcttctgcctgtgtagatattatgccatcagttggttctcaaaagtattttaagtgcttcagatgtgtgttcccattatattttgaaaacatgaaaaatgctttaatgcatgtatgtaccagcagtggttacttgcattgtgtagtgtttttcaagaggtctgggtcttaacaaaatgttttcctttatctcagtgctcttctgcctctttttgttggtgtcctttgagaacaatacaccttctattccttcatttggttacacctttccttgtgacatttagcgagtttcaaacttacttccatatgaggctaagaaacctcaaatttcaggaattgggaaaaataaaattagcacttgcagaagtagcagcagatgggaaaatgccttgattgacattttctttcagcatttaaaatttttggcattttacagcttcatgacaaacagttttgtgcccataccttagaaaatgtggtgctgagttaaataaaggctgtttgagcactggagcagaaaaatgcattatttgcaaactggtggataattttgtgccttctcttctggccaccaagccagtgtagaaacagcaaaaatgtcataaaaattcttatatttaaaacaaaaacaaaagcaaaaacaaacattgaattaaattaagttttgtaattttaaactttaaaaacttctactgaaaatatttccgccaaatgccatcaatattttagactgtacctcgtttgcaaaactgctttgagagggaagagtggacaactcccatcagccttattctcttgagaactatattttggttcctagtaacagcctttccaaagctctactcttggtttttattactcataaatgtttaaattagaaaagaagggaccttgtacatgtgaaacctaattgactctctatattttggacaatttatgtatctgaaatgtgttgtctctgttatatgatgttatttttgccaggagactacaggttgatttagcttgatagctgaaatttgatggaaaactgatttccatttagtcttaccaagtgttgcttctctcttactagacagatatccacttagtaaaatctaaagcagtatgtaaatgaaaccagcaaagagagtagggtttattttataaacattcttaatgctaagtaaccagttgttcaatttattatatgtgtctgaggacattaaaacaccataaggttgtaataattggttgtgccaatgtgtgagggatttacctttaggctctctgtcaccagtgatttactagtgttagctgtttaacacattatctgtatttagtagtgattatttatttacaagttggtggtaattcagcagtcaggactctaagcttttatagttgaattgaggaaatctcgcttttattcatttagctggcaactgcctttattgcagacctctggtgcttggctttcaaggaagcctatgagatgccaaaatcacacctttagagagcaccttgctctaataggtgatgcatgagcaaacagtgagatttgaaggggttttaacataatttagaatgtgaaaaaaatatcaattcatatctttcaagtactaacccctcaaaaaagcccacacatacaaaatatgtgatgtgataccactttgtcttttaggtctttaagtaactgaagttaagcacagaaaaaaaaatcacttcatggaaatttcagtaagaaacccaaacttctaaaaattgcttgcagatgagctaaaaaaaaaaaaaaaaaaaaaaagcaacaaaataaccttttcatcagagttaaaagtagtgagaatctgttagttatacgtataccaaagtaaacattaaagagacatatcatgcaatttcaaagaattctttcatgctatttcttaacctgacatttctaactttattgcaggcaatatacaaagattggctcactactccataggttaattgaattcctggttgagaaactaacttgttttgttttccaaaattagctgaaatcttgtaaaacatgacttccctttaaaggatctagatattgttcaatttaaaatatggcaccataaaaaagtcatgtagtaatagagcatatgcttttttagaaccaggttaaaagctgtttgttatctaatagagtaaaagttactgaggtcaacagatagacaggtctggcataatatatgcccagtcataatagtctaattatattcttttgacaacagacagcattcatcagagcactaattcgaatgagagttttggctatcaagatgtgttgattctaaatattattgaatgagacctgattaaagtctgactttcctggccccagtgttttgcaggttggctatttccattatcagcccatcactccataaagttcttagctgcaccaagtgattggtgaacaaggacaacaacaaaagcagcatacattgtatggatttatctcaacgctattgtttaatggctgtgtttaatgtgatctatctggaaaatgaggactccgaataaaaagctattactaata

SEQ ID NO: 15038 - DNA, 1640 bp, Homo sapiens
  source 1..1640: mol_type = unassigned DNA
ctagacagcgacttcggcgagagcgggcgtctcacctacgagatcgtggacggcaacgacgaccacctgtttgagatcgacccgtccagcggcgagatccgcacgctgcaccctttctgggaggacgtgacgcccgtggtggagctggtggtgaaggtgaccgaccacggcaagcctaccctgtccgcagtggccaagctcatcatccgctcggtgagcggatcccttcccgagggggtaccacgggtgaatggcgagcagcaccactgggacatgtcgctgccgctcatcgtgactctgagcactatctccatcatcctcctagcggccatgatcaccatcgccgtcaagtgcaagcgcgagaacaaggagatccgcacttacaactgccgcatcgccgagtacagccacccgcagctgggtgggggcaagggcaagaagaagaagatcaacaaaaatgatatcatgctggtgcagagcgaagtggaggagaggaacgccatgaacgtcatgaacgtggtgagcagcccctccctggccacctcccccatgtacttcgactaccagacccgcctgcccctcagctcgccccggtcggaggtgatgtatctcaaaccggcctccaacaacctgactgtccctcaggggcacgcgggctgccacaccagcttcaccggacaagggactaatgcaagcgagacccctgccactcggatgtccataattcagacagacaattttcccgcagagcccaattacatgggcagcaggcagcagtttgttcaaagctccacgtttaaggacccagaaagagccagcctgagagacagtgggcacggggacagtgatcaggctgacagtgaccaagacactaacaaaggctcctgctgtgacatgtctgttagggaggcactcaagatgaaaactacttcaactaaaagccaaccacttgaacaagaaccagaagagtgtgttaattgcacagatgaatgccgagtgcttggtcattctgacaggtgctggatgccacagttccctgcagccaatcaggctgaaaatgcagattaccgcacaaatctctttgtacctacagttgaagctaatgttgagactgagacttacgaaactgtgaatcccactgggaaaaagactttttgtacatttggaaaagacaagcgagagcacactattctcattgccaacgttaaaccttatttaaaagccaaacgtgccctgagccctctcctccaagaggtcccctcagcatcaagcagcccaaccaaggcgtgcatcgagccttgcacctcaacaaaaggctccctggatggctgtgaagcaaaaccaggagccctggctgaagcaagcagtcagtacttgcccactgacagtcaatatctgtcacctagtaagcaaccaagagaccctcccttcatggcttccgatcagatggcaagggtctttgcagatgtgcattccagagccagccgggattccagtgagatgggtgctgttcttgagcagcttgaccaccccaacagggatctgggcagagagtctgtggatgcagaggaagttgtgagagaaattgataagcttttgcaagactgccggggaaacgaccctgtggctgtgagaaagtg

SEQ ID NO: 15039 - DNA, 552 bp, Homo sapiens
  source 1..552: mol_type = unassigned DNA
ctgactgtccctcaggggcacgcgggctgccacaccagcttcaccggacaagggactaatgcaagcgagacccctgccactcggatgtccataattcagacagacaattttcccgcagagcccaattacatgggcagcaggcagcagtttgttcaaagtagctccacgtttaaggacccagaaagagccagcctgagagacagtgggcacggggacagtgatcaggctgacagtgaccaagacactaacaaaggctcctgctgtgacatgtctgttagggaggcactcaagatgaaaactacttcaactaaaagccaaccacttgaacaagcattcccgactttgctttcctttgctatcctcaccctacacaccatcacaagtagacttcagtctgttgatctgcttcctccagaaccagaagagtgtgttaattgcacagatgaatgccgagtgcttggtcattctgacaggtgctggatgccacagttccctgcagccaatcaggctgaaaatgcagattaccgcacaaatctctttgtacctacagtt

SEQ ID NO: 15040 - DNA, 5709 bp, Homo sapiens
  source 1..5709: mol_type = unassigned DNA
gcagcatactgggaaaggggaaaggttgaggcaactaaccggctgtctccaaataagtgatgagatataatgcatcctccagtccatgcacgcttcctcttgcaatttgtgcatcattcctcagtggaaacctttaaaccctaaaatccaggaaaagaaaataaatacattatcatggacctgagggatttttacctgttggctgctctgattgcctgtttaaggctggattccgcaatagctcaagaacttatttacactattagagaggaattgcctgaaaatgtgcccataggaaacataccaaaggatctgaacatttctcacatcaatgctgccacagggaccagcgccagccttgtctacagactggtttctaaagctggggatgcccctttggtgaaagtttccagcagcactggggaaattttcacaacctccaacagaatagacagagaaaaactctgtgctggcgcctcatatgctgaggagaatgagtgtttctttgaacttgaggtggtgatcctccccaatgatttcttcaggctgatcaaaataaaaataattgtcaaggataccaatgataatgcccccatgtttccatctcctgtcatcaatatttccattccagaaaacactttgatcaacagccgctttccaattccatcagcaacagatcctgacacaggcttcaatggtgtacagcattatgaattgttaaatgggcagagtgtttttggactggatatcgtggaaactccagagggagagaagtggccacaactgattgttcagcaaaacttggatagagaacagaaagatacctatgtgatgaaaatcaaagtagaggatggaggcactccacagaaatccagtacggccatactgcaggtcacagtaagtgatgtaaatgacaacaggccagtgtttaaagagggtcaagtggaggtgcatattccagagaatgctcccgtaggtacctctgtaattcagctccatgccactgatgcagatataggcagtaatgctgaaatccggtacatttttggtgcccaggtcgcccctgcaaccaaaagactctttgctttaaataatactactgggctgattacagttcagaggtccttagatagagaggagacagccattcacaaagtgacagtgctggctagtgacggcagctccactcctgctcgagcaacggttaccatcaatgtcaccgatgtaaatgataaccctcctaatatagacctcaggtacattataagtcccatcaatggcaccgtgtatttatctgagaaagatcctgtcaatacaaagattgccctaattacagtttcagataaggacacagatgtgaatggcaaagtgatctgttttattgaaagagaggtcccatttcatttgaaggcggtatatgacaaccaatatttgttagagacctcttctttgttggactatgagggcaccaaagaattcagctttaaaattgttgcctctgattctgggaagcccagtttaaatcagactgccctggtaagggttaagcttgaggatgaaaatgacaacccaccaattttcaaccagcctgtaattgagctgtcagtttctgaaaacaaccgacgtgggttatacttaacaactattagtgccacagatgaagacagtgggaaaaatgcagacattgtttatcagcttggaccgaatgcctccttctttgatctggaccgaaaaacaggagttttgacagcctccagagtatttgacagagaagaacaagaacgattcatttttacagtaactgccagggacaatgggacccctcccctccaaagccaagcggctgtgattgttactgttctggatgagaatgacaatagccccaagtttactcataatcattttcaattttttgtgtctgagaatctgccaaagtatagtactgtgggggtaatcacagtgacagatgcagatgctggagagaataaagctgtgactctttccattctaaatgacaatgataattttgtgttggatccctattctggagtcataaagtcaaatgtctcatttgatagagagcagcagagttcctacacttttgatgtcaaagccactgatggaggacaaccacctcgttcctctactgcaaaagtaactatcaacgtcatggatgtcaatgacaacagcccagttgtcatttctccaccgtctaatacttcctttaagttggtgcccctctcagccattcctggctccgtggtagcagaagtttttgcagtggatgttgacactggaatgaacgctgaactaaagtatactatagtgagtggaaacaataaaggcttattccggattgatccagtaacaggtaacattactctggaagaaaaaccagcacctactgatgtgggattgcatcgtttggtggtcaacataagtgacctggggtaccctaagtctttgcacacgcttgtgcttgtattcctttatgttaacgacactgctggaaatgcctcctatatctatgacttgatccgcaggactatggagaccccgttggacaggaacataggggatagtagccaaccctatcaaaatgaggactatctaaccatcatgattgccatcatcgccggtgccatggtggtcattgttgtgatcttcgtcaccgttctggtgcgctgtcgccatgcatcaaggttcaaagcagctcagaggagcaagcaaggtgccgaatggatgtccccaaaccaggagaacaagcaaaacaagaaaaagaaaagaaagaaaaggaagtctcccaaaagctctcttttgaactttgttactatcgaagagtccaaacccgatgatgcagttcatgaacctatcaatgggacaataagcctgccggctgaactggaggagcaaagtataggaagatttgactggggcccggcacctccaacaacattcaagcctaacagtcctgacctggccaagcactacaaatctgcttctccacagcctgcttttcatctcaaaccagacactccagtttccgtgaaaaagcaccacgtgattcaggaactccctttggacaacacctttgttgggggttgtgacaccctttctaaacgctcttccactagttcagatcacttcagtgcctcagagtgcagttcccaaggaggcttcaagacaaagggccccttacacaccagacagtgtaactcacacagcaaaagtgacaatattcctgtcactcctcagaaatgtcccagctccacgggtttccacattcaggagaatgaagaaagccattacgagtcgcagcgccgtgttacgtttcatctccctgatggctcccaggaaagctgcagtgacagtggtctaggagaccatgagccggtgggtagtggaaccctgatctcacaccctcttcctctggttcagccacaggacgaattctatgaccaggcctctccggacaagaggactgaagcagatggcaactctgatcccaactctgatgggcctttgggtccccgaggattagctgaagctacagagatgtgcactcaagagtgcttggttttgggtcactctgataattgctggatgcctcctggcttgggtccatatcaacaccccaaatctcctctctcaacctttgcaccccagaaagaatgggtgaagaaggacaagcttgtgaatgggcacaccctgaccagagcctggaaagaagacagcaacaggaaccagttcaatgaccgtaagcagtatggctccaatgaaggccatttcaacaatggcagccacatgacagacattcctctggcaaatctgaagtcttataagcaagcaggaggtgctactgagagtcctaaggagcaccaactctaagaaaaggctatatgggacctaataactttaaatagacatgctaataccgtgtgcgtcagagctttatgtattcaatagatctctacaactatgccccttctagcagggatacctataactttgtgttagcaccatggagaatacaatgtttttgcaacatatgagagaagatagttctagccatgcaattttgtttactagaattgattacactctccagagatctctccattgtgcaaattttttttattattgcattttattttgaccctggactgctgctatgaacaatagaatatgcatttggaaagtaagaaagtttcatggattagagtgactgaaaaacatatccagttagaaaattgtgcttttttttttttttttttttttttttgtcattgatttgtgctgggactgctatacttgacattatactgcaaacaaaacttaaagagataagcattaaacctattgtgctgttaacaacgttagtggacacttgtaagtcaatcagtgttaaagtatttgtaaatagaagcaagctattattaacaacttttgtgtacttataatgttcacctaaaaatgttgtagcataattctgtgttttatggttgcttctgtccttctttttatttacctctttgttgttatttttgttgtttctttcagtgaggtgtttctgtgttagtagtctgtcttgacacacattgttcaaacaatctcaagcacttgtgtttaaaaaaggttctgaaatcttgcttctcatatgatagcttatgatgccggaattctgtaaacaataaagatgaaagaaaaaatgaaaactttatacaaaaaaggacttctgcaaaagcttggaaattcagaacctattttttatcatcttattttcaaagtaggcaaaagcaaaatcacttaattagtaccattaagtgagagagtaatggaaaactgttatccatcaaaagtgatataatatcctgtacttgtcactcatgtaaaactaatgtatcaaaattagcatatatggaagaaaaatcactattcaaaaatagtttcaattgggcaaatgtgtgtctacaactttgttgaaatggcagagtctgtgttgatcctcatatacaataatgttgttgtaacacaagtgttattagaccatagccacaaaatatttaatgtgttgtgccttcatgatgtaacagaacattctccaggtagggtagttgggggaaataaagggataaatctctaattattgctgtttaactgtttgttatcatagttggtcaatgcctggcaggtaccagcatattgtcacttaggtcaaaccaataaagtgacaactaatgttaataagatctcagttgcacgtgcaaacaaatccaaattcgaacattcttaggaggtttttgttaaggcatgacagatgatttaaacaaataaatagcatgcaacaaaatgtctttattgaaagaagtggaagttatcttaatgccacggttcaccatcaatttaaaagtaaaaaaaacaaaaaaaaaacaaaaaatttaaaaaaaaggtttgctaatctgatagttaatttgttcttaccaaaaaataaaattactttgtaaatagcagttcacatttttccacagtataatggaaaataatgggtaggggtgcattgcttattgaagtacatttttgtcggtttgtgaggggtgtttgatgactttgacagaataaatatctaaacaattatccttgttactgctttgccagttctacgttatttacaattattcagctcttgcaataaatgttctgaattcctga

SEQ ID NO: 15041 - DNA, 6234 bp, Homo sapiens
  source 1..6234: mol_type = unassigned DNA
gggctgcggccgcccgcgccgcaagatgcaggccaatcagagcccgggggcggggcctgggcagtcacgccctccctctgggcttattgagagttatatcaagaaattcagttcagagagaggagagggagaaggagagaggggcagaggggaagggagagagggagagcacgcgagacggaaaggagcgcctcagagtctctgaagcacgcaagagataaccgattaggaatttttcgggcaactgtcacccggatagctgtcagagaatcatcatcaccgcaactctgacgtttcctacaagaagttagagacttaagcagtattggcatcggatggaaatggtatgcatgctgctgtggaaaatatccctgagctgaagaagtgcaactatgtgttgtgtgtgctaaatgcccagaagaacccagacccagtgggtaagagagacgaaatgtggagagaatgactaacgacaaatccgtgaatttgttctctggagttgctaatttgccagcccgaagcaacacattttacaaggaggaaacattttgctgcttctgatttctccccaaactggtgctaccagatgcatggctttctatgtgttggaacaaatcattcctaactgcagcatactgggaaaggggaaaggttgaggcaactaaccggctgtctccaaataagtgatgagatataatgcatcctccagtccatgcacgcttcctcttgcaatttgtgcatcattcctcagtggaaacctttaaaccctaaaatccaggaaaagaaaataaatacattatcatggacctgagggatttttacctgttggctgctctgattgcctgtttaaggctggattccgcaatagctcaagaacttatttacactattagagaggaattgcctgaaaatgtgcccataggaaacataccaaaggatctgaacatttctcacatcaatgctgccacagggaccagcgccagccttgtctacagactggtttctaaagctggggatgcccctttggtgaaagtttccagcagcactggggaaattttcacaacctccaacagaatagacagagaaaaactctgtgctggcgcctcatatgctgaggagaatgagtgtttctttgaacttgaggtggtgatcctccccaatgatttcttcaggctgatcaaaataaaaataattgtcaaggataccaatgataatgcccccatgtttccatctcctgtcatcaatatttccattccagaaaacactttgatcaacagccgctttccaattccatcagcaacagatcctgacacaggcttcaatggtgtacagcattatgaattgttaaatgggcagagtgtttttggactggatatcgtggaaactccagagggagagaagtggccacaactgattgttcagcaaaacttggatagagaacagaaagatacctatgtgatgaaaatcaaagtagaggatggaggcactccacagaaatccagtacggccatactgcaggtcacagtaagtgatgtaaatgacaacaggccagtgtttaaagagggtcaagtggaggtgcatattccagagaatgctcccgtaggtacctctgtaattcagctccatgccactgatgcagatataggcagtaatgctgaaatccggtacatttttggtgcccaggtcgcccctgcaaccaaaagactctttgctttaaataatactactgggctgattacagttcagaggtccttagatagagaggagacagccattcacaaagtgacagtgctggctagtgacggcagctccactcctgctcgagcaacggttaccatcaatgtcaccgatgtaaatgataaccctcctaatatagacctcaggtacattataagtcccatcaatggcaccgtgtatttatctgagaaagatcctgtcaatacaaagattgccctaattacagtttcagataaggacacagatgtgaatggcaaagtgatctgttttattgaaagagaggtcccatttcatttgaaggcggtatatgacaaccaatatttgttagagacctcttctttgttggactatgagggcaccaaagaattcagctttaaaattgttgcctctgattctgggaagcccagtttaaatcagactgccctggtaagggttaagcttgaggatgaaaatgacaacccaccaattttcaaccagcctgtaattgagctgtcagtttctgaaaacaaccgacgtgggttatacttaacaactattagtgccacagatgaagacagtgggaaaaatgcagacattgtttatcagcttggaccgaatgcctccttctttgatctggaccgaaaaacaggagttttgacagcctccagagtatttgacagagaagaacaagaacgattcatttttacagtaactgccagggacaatgggacccctcccctccaaagccaagcggctgtgattgttactgttctggatgagaatgacaatagccccaagtttactcataatcattttcaattttttgtgtctgagaatctgccaaagtatagtactgtgggggtaatcacagtgacagatgcagatgctggagagaataaagctgtgactctttccattctaaatgacaatgataattttgtgttggatccctattctggagtcataaagtcaaatgtctcatttgatagagagcagcagagttcctacacttttgatgtcaaagccactgatggaggacaaccacctcgttcctctactgcaaaagtaactatcaacgtcatggatgtcaatgacaacagcccagttgtcatttctccaccgtctaatacttcctttaagttggtgcccctctcagccattcctggctccgtggtagcagaagtttttgcagtggatgttgacactggaatgaacgctgaactaaagtatactatagtgagtggaaacaataaaggcttattccggattgatccagtaacaggtaacattactctggaagaaaaaccagcacctactgatgtgggattgcatcgtttggtggtcaacataagtgacctggggtaccctaagtctttgcacacgcttgtgcttgtattcctttatgttaacgacactgctggaaatgcctcctatatctatgacttgatccgcaggactatggagaccccgttggacaggaacataggggatagtagccaaccctatcaaaatgaggactatctaaccatcatgattgccatcatcgccggtgccatggtggtcattgttgtgatcttcgtcaccgttctggtgcgctgtcgccatgcatcaaggttcaaagcagctcagaggagcaagcaaggtgccgaatggatgtccccaaaccaggagaacaagcaaaacaagaaaaagaaaagaaagaaaaggaagtctcccaaaagctctcttttgaactttgttactatcgaagagtccaaacccgatgatgcagttcatgaacctatcaatgggacaataagcctgccggctgaactggaggagcaaagtataggaagatttgactggggcccggcacctccaacaacattcaagcctaacagtcctgacctggccaagcactacaaatctgcttctccacagcctgcttttcatctcaaaccagacactccagtttccgtgaaaaagcaccacgtgattcaggaactccctttggacaacacctttgttgggggttgtgacaccctttctaaacgctcttccactagttcagatcacttcagtgcctcagagtgcagttcccaaggaggcttcaagacaaagggccccttacacaccagacagtcgcagcgccgtgttacgtttcatctccctgatggctcccaggaaagctgcagtgacagtggtctaggagaccatgagccggtgggtagtggaaccctgatctcacaccctcttcctctggttcagccacaggacgaattctatgaccaggcctctccggacaagaggactgaagcagatggcaactctgatcccaactctgatgggcctttgggtccccgaggattagctgaagctacagagatgtgcactcaagagtgcttggttttgggtcactctgataattgctggatgcctcctggcttgggtccatatcaacaccccaaatctcctctctcaacctttgcaccccagaaagaatgggtgaagaaggacaagcttgtgaatgggcacaccctgaccagagcctggaaagaagacagcaacaggaaccagttcaatgaccgtaagcagtatggctccaatgaaggccatttcaacaatggcagccacatgacagacattcctctggcaaatctgaagtcttataagcaagcaggaggtgctactgagagtcctaaggagcaccaactctaagaaaaggctatatgggacctaataactttaaatagacatgctaataccgtgtgcgtcagagctttatgtattcaatagatctctacaactatgccccttctagcagggatacctataactttgtgttagcaccatggagaatacaatgtttttgcaacatatgagagaagatagttctagccatgcaattttgtttactagaattgattacactctccagagatctctccattgtgcaaattttttttattattgcattttattttgaccctggactgctgctatgaacaatagaatatgcatttggaaagtaagaaagtttcatggattagagtgactgaaaaacatatccagttagaaaattgtgcttttttttttttttttttttttttttgtcattgatttgtgctgggactgctatacttgacattatactgcaaacaaaacttaaagagataagcattaaacctattgtgctgttaacaacgttagtggacacttgtaagtcaatcagtgttaaagtatttgtaaatagaagcaagctattattaacaacttttgtgtacttataatgttcacctaaaaatgttgtagcataattctgtgttttatggttgcttctgtccttctttttatttacctctttgttgttatttttgttgtttctttcagtgaggtgtttctgtgttagtagtctgtcttgacacacattgttcaaacaatctcaagcacttgtgtttaaaaaaggttctgaaatcttgcttctcatatgatagcttatgatgccggaattctgtaaacaataaagatgaaagaaaaaatgaaaactttatacaaaaaaggacttctgcaaaagcttggaaattcagaacctattttttatcatcttattttcaaagtaggcaaaagcaaaatcacttaattagtaccattaagtgagagagtaatggaaaactgttatccatcaaaagtgatataatatcctgtacttgtcactcatgtaaaactaatgtatcaaaattagcatatatggaagaaaaatcactattcaaaaatagtttcaattgggcaaatgtgtgtctacaactttgttgaaatggcagagtctgtgttgatcctcatatacaataatgttgttgtaacacaagtgttattagaccatagccacaaaatatttaatgtgttgtgccttcatgatgtaacagaacattctccaggtagggtagttgggggaaataaagggataaatctctaattattgctgtttaactgtttgttatcatagttggtcaatgcctggcaggtaccagcatattgtcacttaggtcaaaccaataaagtgacaactaatgttaataagatctcagttgcacgtgcaaacaaatccaaattcgaacattcttaggaggtttttgttaaggcatgacagatgatttaaacaaataaatagcatgcaacaaaatgtctttattgaaagaagtggaagttatcttaatgccacggttcaccatcaatttaaaagtaaaaaaaacaaaaaaaaaacaaaaaatttaaaaaaaaggtttgctaatctgatagttaatttgttcttaccaaaaaataaaattactttgtaaatagcagttcacatttttccacagtataatggaaaataatgggtaggggtgcattgcttattgaagtacatttttgtcggtttgtgaggggtgtttgatgactttgacagaataaatatctaaacaattatccttgttactgctttgccagttctacgttatttacaattattcagctcttgcaataaatgttctgaattcctga

SEQ ID NO: 15042 - DNA, 5072 bp, Homo sapiens
  source 1..5072: mol_type = unassigned DNA
gcagcatactgggaaaggggaaaggttgaggcaactaaccggctgtctccaaataagtgatgagatataatgcatcctccagtccatgcacgcttcctcttgcaatttgtgcatcattcctcagtggaaacctttaaaccctaaaatccaggaaaagaaaataaatacattatcatggacctgagggatttttacctgttggctgctctgattgcctgtttaaggctggattccgcaatagctcaagaacttatttacactattagagaggaattgcctgaaaatgtgcccataggaaacataccaaaggatctgaacatttctcacatcaatgctgccacagggaccagcgccagccttgtctacagactggtttctaaagctggggatgcccctttggtgaaagtttccagcagcactggggaaattttcacaacctccaacagaatagacagagaaaaactctgtgctggcgcctcatatgctgaggagaatgagtgtttctttgaacttgaggtggtgatcctccccaatgatttcttcaggctgatcaaaataaaaataattgtcaaggataccaatgataatgcccccatgtttccatctcctgtcatcaatatttccattccagaaaacactttgatcaacagccgctttccaattccatcagcaacagatcctgacacaggcttcaatggtgtacagcattatgaattgttaaatgggcagagtgtttttggactggatatcgtggaaactccagagggagagaagtggccacaactgattgttcagcaaaacttggatagagaacagaaagatacctatgtgatgaaaatcaaagtagaggatggaggcactccacagaaatccagtacggccatactgcaggtcacagtaagtgatgtaaatgacaacaggccagtgtttaaagagggtcaagtggaggtgcatattccagagaatgctcccgtaggtacctctgtaattcagctccatgccactgatgcagatataggcagtaatgctgaaatccggtacatttttggtgcccaggtcgcccctgcaaccaaaagactctttgctttaaataatactactgggctgattacagttcagaggtccttagatagagaggagacagccattcacaaagtgacagtgctggctagtgacggcagctccactcctgctcgagcaacggttaccatcaatgtcaccgatgtaaatgataaccctcctaatatagacctcaggtacattataagtcccatcaatggcaccgtgtatttatctgagaaagatcctgtcaatacaaagattgccctaattacagtttcagataaggacacagatgtgaatggcaaagtgatctgttttattgaaagagaggtcccatttcatttgaaggcggtatatgacaaccaatatttgttagagacctcttctttgttggactatgagggcaccaaagaattcagctttaaaattgttgcctctgattctgggaagcccagtttaaatcagactgccctggtaagggttaagcttgaggatgaaaatgacaacccaccaattttcaaccagcctgtaattgagctgtcagtttctgaaaacaaccgacgtgggttatacttaacaactattagtgccacagatgaagacagtgggaaaaatgcagacattgtttatcagcttggaccgaatgcctccttctttgatctggaccgaaaaacaggagttttgacagcctccagagtatttgacagagaagaacaagaacgattcatttttacagtaactgccagggacaatgggacccctcccctccaaagccaagcggctgtgattgttactgttctggatgagaatgacaatagccccaagtttactcataatcattttcaattttttgtgtctgagaatctgccaaagtatagtactgtgggggtaatcacagtgacagatgcagatgctggagagaataaagctgtgactctttccattctaaatgacaatgataattttgtgttggatccctattctggagtcataaagtcaaatgtctcatttgatagagagcagcagagttcctacacttttgatgtcaaagccactgatggaggacaaccacctcgttcctctactgcaaaagtaactatcaacgtcatggatgtcaatgacaacagcccagttgtcatttctccaccgtctaatacttcctttaagttggtgcccctctcagccattcctggctccgtggtagcagaagtttttgcagtggatgttgacactggaatgaacgctgaactaaagtatactatagtgagtggaaacaataaaggcttattccggattgatccagtaacaggtaacattactctggaagaaaaaccagcacctactgatgtgggattgcatcgtttggtggtcaacataagtgacctggggtaccctaagtctttgcacacgcttgtgcttgtattcctttatgttaacgacactgctggaaatgcctcctatatctatgacttgatccgcaggactatggagaccccgttggacaggaacataggggatagtagccaaccctatcaaaatgaggactatctaaccatcatgattgccatcatcgccggtgccatggtggtcattgttgtgatcttcgtcaccgttctggtgcgctgtcgccatgcatcaaggttcaaagcagctcagaggagcaagcaaggtgccgaatggatgtccccaaaccaggagaacaagcaaaacaagaaaaagaaaagaaagaaaaggaagtctcccaaaagctctcttttgaactttgttactatcgaagagtccaaacccgatgatgcagttcatgaacctatcaatgggacaataagcctgccggctgaactggaggagcaaagtataggaagatttgactggggcccggcacctccaacaacattcaagcctaacagtcctgacctggccaagcactacaaatctgcttctccacagcctgcttttcatctcaaaccagacactccagtttccgtgaaaaagcaccacgtgattcaggaactccctttggacaacacctttgttgggggttgtgacaccctttctaaacgctcttccactagttcagatcacttcagtgcctcagagtgcagttcccaaggaggcttcaagacaaagggccccttacacaccagacagtgtaactcacacagcaaaagtgacaatattcctgtcactcctcagaaatgtcccagctccacgggtttccacattcaggagaatgaagaaagccattacgagccacaggacgaattctatgaccaggcctctccggacaagaggactgaagcagatggcaactctgatcccaactctgatgggcctttgggtccccgaggattagctgaagctacagagatgtgcactcaagagtgcttggttttgggtcactctgataattgctggatgcctcctggcttgggtccatatcaacaccccaaatctcctctctcaacctttgcaccccagaaagaatgggtgaagaaggacaagcttgtgaatgggcacaccctgaccagagcctggaaagaagacagcaacaggaaccagttcaatgaccgtaagcagtatggctccaatgaaggccatttcaacaatggcagccacatgacagacattcctctggcaaatctgaagtcttataagcaagcaggaggtgctactgagagtcctaaggagcaccaactctaagaaaaggctatatgggacctaataactttaaatagacatgctaataccgtgtgcgtcagagctttatgtattcaatagatctctacaactatgccccttctagcagggatacctataactttgtgttagcaccatggagaatacaatgtttttgcaacatatgagagaagatagttctagccatgcaattttgtttactagaattgattacactctccagagatctctccattgtgcaaattttttttattattgcattttattttgaccctggactgctgctatgaacaatagaatatgcatttggaaagtaagaaagtttcatggattagagtgactgaaaaacatatccagttagaaaattgtgcttttttttttttttttttttttttttgtcattgatttgtgctgggactgctatacttgacattatactgcaaacaaaacttaaagagataagcattaaacctattgtgctgttaacaacgttagtggacacttgtaagtcaatcagtgttaaagtatttgtaaatagaagcaagctattattaacaacttttgtgtacttataatgttcacctaaaaatgttgtagcataattctgtgttttatggttgcttctgtccttctttttatttacctctttgttgttatttttgttgtttctttcagtgaggtgtttctgtgttagtagtctgtcttgacacacattgttcaaacaatctcaagcacttgtgtttaaaaaaggttctgaaatcttgcttctcatatgatagcttatgatgccggaattctgtaaacaataaagatgaaagaaaaaatgaaaactttatacaaaaaaggacttctgcaaaagcttggaaattcagaacctattttttatcatcttattttcaaagtaggcaaaagcaaaatcacttaattagtaccattaagtgagagagtaatggaaaactgttatccatcaaaagtgatataatatcctgtacttgtcactcatgtaaaactaatgtatcaaaattagcatatatggaagaaaaatcactattcaaaaatagtttcaattgggcaaatgtgtgtctacaactttgttgaaatggcagagtctgtgttgatcctcatatacaataatgttgttgtaacacaagtgttattagaccatagccacaaaatatttaatgtgttgtgccttcatgatgtaacagaacattctccaggtagggtagttgggggaaataaagggataaatctctaattattgctgtttaactgtttgttatcatagttggtcaatgcctggcaggtaccag

SEQ ID NO: 15043 - DNA, 559 bp, Homo sapiens
  source 1..559: mol_type = unassigned DNA
aatattataaaggcaaatagaaagctcacaattattggacgtttaaaaatattagttgtgctaactttggttttagcaaagacctacattccaattattgagcgatttaaattgatgactaagcaaacttgcagatgggcctttgggtccccgaggattagctgaagctacagagatgtgcactcaagagtgcttggttttgggtcactctgataattgctggatgcctcctggcttgggtccatatcaacaccccaaatctcctctctcaacctttgcaccccagaaagaatgggtgaagaaggacaagcttgtgaatgggcacaccctgaccagagcctggaaagaagacagcaacaggaaccagttcaatgaccgtaagcagtatggctccaatgaaggccatttcaacaatggcagccacatgacagacattcctctggcaaatctgaagtcttataagcaagcaggaggtgctactgagagtcctaaggagcaccaactctaagaaaaggctatatgggacctaataactttaaatagacatgctaataccgtg

SEQ ID NO: 15044 - DNA, 461 bp, Homo sapiens
  source 1..461: mol_type = unassigned DNA
tgtaactcacacagcaaaagtgacaatattcctgtcactcctcagaaatgtcccagctccacgggtttccacattcaggagaatgaagaaagccattacgagggcacactcccttacttgagatattctctctgaataaactccagaccaatgctgtaaaatagaattgtaatatgagccacaaattcgcagcgccgtgttacgtttcatctccctgatggctcccaggaaagctgcagtgacagtggtctaggagaccatgagccggtgggtagtggaaccctgatctcacaccctcttcctctggttcagccacaggacgaattctatgaccaggcctctccggacaagaggactgaagcagatggcaactctgatcccaactctgatgggcctttgggtccccgaggattagctgaagctacagagatgtgcactcaagagtgcttggttttgggtca

SEQ ID NO: 15045 - DNA, 28227 bp, Homo sapiens
  source 1..28227: mol_type = unassigned DNA
gggctgcggccgcccgcgccgcaagatgcaggccaatcagagcccgggggcggggcctgggcagtcacgccctccctctgggcttattgagagttatatcaagaaattcagttcagagagaggagagggagaaggagagaggggcagaggggaagggagagagggagagcacgcgagacggaaaggagcgcctcagagtctctgaagcacgcaagagataaccgattaggaatttttcgggcaactgtcacccggatagctgtcagagaatcatcatcaccgcaactctgacgtttcctacaagaagttagagacttaagcagtattggcatcggatggaaatggtatgcatgctgctgtggaaaatatccctgagctgaagaagtgcaactatgtgttgtgtgtgctaaatgcccagaagaacccagacccagtgggtaagagagacgaaatgtggagagaatgactaacgacaaatccgtgaatttgttctctggagttgctaatttgccagcccgaagcaacacattttacaaggaggaaacattttgctgcttctgatttctccccaaactggtgctaccagatgcatggctttctatgtgttggaacaaatcattcctaactgcagcatactgggaaaggggaaaggttgaggcaactaaccggctgtctccaaataagtgatgagatataatgcatcctccagtccatgcacgcttcctcttgcaatttgtgcatcattcctcagtggaaacctttaaaccctaaaatccaggaaaagaaaataaatacattatcatggacctgagggatttttacctgttggctgctctgattgcctgtttaaggctggattccgcaatagctcaagaacttatttacactattagagaggaattgcctgaaaatgtgcccataggaaacataccaaaggatctgaacatttctcacatcaatgctgccacagggaccagcgccagccttgtctacagactggtttctaaagctggggatgcccctttggtgaaagtttccagcagcactggggaaattttcacaacctccaacagaatagacagagaaaaactctgtgctggcgcctcatatgctgaggagaatgagtgtttctttgaacttgaggtggtgatcctccccaatgatttcttcaggctgatcaaaataaaaataattgtcaaggataccaatgataatgcccccatgtttccatctcctgtcatcaatatttccattccagaaaacactttgatcaacagccgctttccaattccatcagcaacagatcctgacacaggcttcaatggtgtacagcattatgaattgttaaatgggcagagtgtttttggactggatatcgtggaaactccagagggagagaagtggccacaactgattgttcagcaaaacttggatagagaacagaaagatacctatgtgatgaaaatcaaagtagaggatggaggcactccacagaaatccagtacggccatactgcaggtcacagtaagtgatgtaaatgacaacaggccagtgtttaaagagggtcaagtggaggtgcatattccagagaatgctcccgtaggtacctctgtaattcagctccatgccactgatgcagatataggcagtaatgctgaaatccggtacatttttggtgcccaggtcgcccctgcaaccaaaagactctttgctttaaataatactactgggctgattacagttcagaggtccttagatagagaggagacagccattcacaaagtgacagtgctggctagtgacggcagctccactcctgctcgagcaacggttaccatcaatgtcaccgatgtaaatgataaccctcctaatatagacctcaggtacattataagtcccatcaatggcaccgtgtatttatctgagaaagatcctgtcaatacaaagattgccctaattacagtttcagataaggacacagatgtgaatggcaaagtgatctgttttattgaaagagaggtcccatttcatttgaaggcggtatatgacaaccaatatttgttagagacctcttctttgttggactatgagggcaccaaagaattcagctttaaaattgttgcctctgattctgggaagcccagtttaaatcagactgccctggtaagggttaagcttgaggatgaaaatgacaacccaccaattttcaaccagcctgtaattgagctgtcagtttctgaaaacaaccgacgtgggttatacttaacaactattagtgccacagatgaagacagtgggaaaaatgcagacattgtttatcagcttggaccgaatgcctccttctttgatctggaccgaaaaacaggagttttgacagcctccagagtatttgacagagaagaacaagaacgattcatttttacagtaactgccagggacaatgggacccctcccctccaaagccaagcggctgtgattgttactgttctggatgagaatgacaatagccccaagtttactcataatcattttcaattttttgtgtctgagaatctgccaaagtatagtactgtgggggtaatcacagtgacagatgcagatgctggagagaataaagctgtgactctttccattctaaatgacaatgataattttgtgttggatccctattctggagtcataaagtcaaatgtctcatttgatagagagcagcagagttcctacacttttgatgtcaaagccactgatggaggacaaccacctcgttcctctactgcaaaagtaactatcaacgtcatggatgtcaatgacaacagcccagttgtcatttctccaccgtctaatacttcctttaagttggtgcccctctcagccattcctggctccgtggtagcagaagtttttgcagtggatgttgacactggaatgaacgctgaactaaagtatactatagtgagtggaaacaataaaggcttattccggattgatccagtaacaggtaacattactctggaagaaaaaccagcacctactgatgtgggattgcatcgtttggtggtcaacataagtgacctggggtaccctaagtctttgcacacgcttgtgcttgtattcctttatgttaacgacactgctggaaatgcctcctatatctatgacttgatccgcaggactatggagaccccgttggacaggaacataggggatagtagccaaccctatcaaaatgaggactatctaaccatcatgattgccatcatcgccggtgccatggtggtcattgttgtgatcttcgtcaccgttctggtgcgctgtcgccatgcatcaaggttcaaagcagctcagaggagcaagcaaggtgccgaatggatgtccccaaaccaggagaacaagcaaaacaagaaaaagaaaagaaagaaaaggaagtctcccaaaagctctcttttgaactttgttactatcgaagagtccaaacccgatgatgcagttcatgaacctatcaatgggacaataagcctgccggctgaactggaggagcaaagtataggaagatttgactggggcccggcacctccaacaacattcaagcctaacagtcctgacctggccaagcactacaaatctgcttctccacagcctgcttttcatctcaaaccagacactccagtttccgtgaaaaagcaccacgtgattcaggaactccctttggacaacacctttgttgggggttgtgacaccctttctaaacgctcttccactagttcagatcacttcagtgcctcagagtgcagttcccaaggaggcttcaagacaaagggccccttacacaccagacaggtaaacgagcacttttactggtctataagtactgcatacaagtgcccagtcaaccagtattaacgtgccagtatgtctattgttttggtctaactttagcttagttagaaagaggtaaaaaaaaacttgaccccttttctattcctctggggctcagtcaagaatttttagaacagctttgaaatttctgagttctgagaatattttctcctttcagtttccttcaaatggcaaaagatgaaaagagaaaattattccaaaatgtcccaagataatgtttgctgaagaagaaaaaacctgtcctgatatgccaaattctgctcctgggggtttccaaattgactgcttcaagactttcaccttaccttttgatctaaaaagtcaccttcaaatctcaagttttcaatgacttttgaaggtgtgactgcaattatgttgcagctatggttgctaaaggggttaattttttttttagtctctaaacaggatagtagaatattaaatgtacatcagctgtgaagcacatgatcgttgatagattgcaactaagccatataggaagtcttctctttgatttcaaattattttattgtaatatattaaattcggtacttaatagaaagatttttagtgtccgcagtggccaaatactctttcaaaaaaaaaaaaaaaaagaatgcttgctgcctaatataactgatttaaaaagaaaagaatgaatccattgtaaatattctctcatcttagtaatgcataagtgatctgtcataactcattttaaactgtgaaatatgccatatgaagagggattaagaggctgagaaactcatatttcaaccaaatccagaattagtttttcttaggtctaataattccttgttaataaagatttaaatgcagcgctgtctaatttatttcactggtgcttgtctgttgccacaaaatttgaatatcgataatagcctgtagatggcactagggtatcatgtcgcttgtgctggccaggtgccaatcccgcagtagcaaggagaagggggagggaaggatcaagctggtagtacagccaaagataccttttatttaatgatagttgctctggagcaactagcatttaagttcattcgcttgctcttttgtgattagctctcagcacaccaactttctaggatttcgtaatgctagttctgtctttgtcgatatggagttcacctatggtgatggcccatctgtacttgtttataaataaggaacacatagattttagaaaatcaagtaaagcaaaattagtttgcagaacagtatcaacagttatcattgattagtctttggagaatcaagagtttttattttctgagggtggggtgaagtaggatgttttattgaaacagtttcccccttaccaactatcatttattgctctggaaggacttaaggcttcatggtaataaaatatttataagagtaattttgacaatgagtcatacagatactcccagaacatcaagtataatacatattaccatacaactaaaatctccattcttaaagtaaaatattaaacagtagagcgttttaaaagtacaaatatttacagcttaaatacacaggaagaaaggactttaatcagtatagaattttaaaggagactatgagattattacatataagtcaaagttagaacgacttaatttttgtgttaactttgttagtatttgaaaagaggttgatgttttaaaatttaaaaaatgttcagtcttagtaaaggtttttaaaagttaaatagttaactatgataagaaaagtaatttatgaaactaaatgagtttgattaaaaagttgctcttaatgaacagaaagaaaattttttaaattatttacttctgttatggttactcacaatacacatggtattttatgatatgcataattatgttgagaaactaatatgacttaaactttttcatgtaaaatctgacattttctttccaaagaaatgtactgatatacttccagcatcatctttttttctgtctatacgtggtgatattagcattgatgtatagatccactttttctgacctccccaaaagttgaacctatatatagtgtagtgacataaatgttaagtgcatttcagcaaagtatgcaagagatcttttcttgaggcttagtcagtcataaaagtctttgtatgatgtaatctttcaaataggatactgagtaattctctaactggaactaaagtgcgttttagaaatttcttgtgaccatgtgtcactttgcagttctcctatgggtattccaatgttcatatggaactaggtaattcactcttatgataaagagctattaaaatggctttgcttacaccttttaaaagttttcatgctgaaaaagaaatagtgtgatgttggagaaaagagatagaagtcggtggagaagtggtagtgatatacaaagtaatatgtacatttttttggataaaagaagcatatttcctatgaatgaacgacatcaaatatatactactctttaaaaatttgttttcactgaactgtatgattgctatctgcagatgttctagttaagctaaaaagtaaaaacttttttaactagtggcttttatataaaatgtgctcctgaagctacacaattttgaaagagtaacatttcttgctacaaaaactttcaaaggaatttatttaaaaaaatacaatctgtgaagattttagttgtgtgacgactattgctcacaccatcttttcattttatgctattaattgatatgtgggtaaaatgcaagattcttggttaaaagcttaccaaacttaaatttcactcatttatactgtatgtataacgaaaacataacgtctgatgttttcatcatgaatttgtttgtggtacatcaattcctatattgtctgatatttttccccttgctgttttcccttgtgttaacctgcaaagaacataggaaacactgtaaatcatattcctcattcactctattttataaagctttcatgtgtcactaaatttttcacagattatttcttacaaatttttggaagtgcgattagcctttataggttaagaatttacttttttttttttggcaaaaggtcatgtctcggtaattatttgtaaaaaaaaaaaaaacaacaaagtttacagccaaaaggtgaagaggatgaaaacgacaacattatccattccaacaaggctttaaatgataaaattcattggtatatttgcctaaaagaaaaatggtcttgttgacagatattgttttaaaatatgatactgattctccctgtggaatgtctgggaatcatttggagcactacttaaaacatggattgttgggttctaccccagaggctctgatttcgtaccactgaggtcaggactgaaaatatacattgctaacaagttcctaggtggtactgatgctgctagtccagggcccacactttgagaaccactaccttagcatattgaaacaggaagtgtcagcctctttccctctcgtattatcatatccagagaacctgtttttgcacagcccaactctcagcccacttattgacagctgttttattgtagctggaggctttacagtaagctgtttattgctgtttcccaacccagttgacagcatttagggaattaatttcttggcccctgtgtggttttttgggggtgggaagagggaagataaatgaaaatgttaaagtaaaagaaatagtcacccatttacatttgacaacttcttcaagtagtaaaacagtctgtaagagttgcactagacattggttctgggtaaactgtcatttaattttctaaaggaaatactcattttagagctttaaacatcctgacttttcacaatctagagtatttactcacatatatttttctatatattgaggaatgtatacactgaaaatgtgtatgcgtgctgtacttaagtgtatacatgtatttttacagtgtaaagggaatttcttctattccaaaccatttagagatactatattacatttatgattacttttcatttttgaataatctactacaaccactactgaaatgttattatgttatgtaaaatgcggaaggcagtcacagaattgatatttagaacagctagggaaaaaatgcaattgaaagtgaagggggcaaatgttaactaatgtgaggctaaccaaaatctttaagatattttcaattattaaattctggaatagatatatatagtgacagttgaacacaggtgacaactgatcccccaaatgcaaattgtttttaaaatgttatcggttgtgatttttatttctatggctctttggctaagtgccctatggtcatgaagtcagttttcatacttatgaggtagaagatacccagagcccttggatattaacacagatttttgaaatgaggataggccacccattcaaactggctatctttccatttgggtttgtaagataaatatttgactatttttctttccatcttgatattcctaagctataaaattcaagacgcattttggccttccattgctaataacattaagcagaataaaaatgaaaagttactattgtattaaacatagacatgtctgttgattcttgaatatttgttaacgtagagaaaatagtatatgtggtgacaatattctattctcttattatttgtttttgttgccattaattcaagatatagaaacaaggaacattaatgttctccttagtttcagaccagtcatcctatggtgagacagggcaggctttggtgtcattgaaattactttgaaaatattgtacttgtaataacatgttacattcttatggtgtaaacatattcttattatttaaataattgcaagctatcatttatcttcttatgatttcatacattaaattaaaatatgtgaaatagtaaagtagagggaatttagatttaaggaaaagcctcaaatctaaaatcaaattttctcataattaactatgatttatattgaaccttaaggtttcattttcatattgatgtgtgtaaaatatctataaattatacttatattattagatatggcattgtaacgcatcctttttcatattactaattttacactacagtactgaagtatgaaaatgacacctttaaatcattttgttttctgtaatcttatttccacaacaatttttgttgtcttatttagattgtttttatttctaatttttttttttcggttgggggaattcagaaatccaccaaatgctgaacgttacagttgtagccttggtcccactataccagtctgggtgtttacagggtttcagggccaagtcagatgtctgtattgctcttttacaatacttctcagtttgactttgttaaaggtgaactcttagcttgtatatagttaaaaacataacaaaactggaaatccagtggattgtttactactttgacttaaaatccttggtgcaatctttctttgaatttagtttggtgttttcttgaagataattctttattataactagaaattactctcttaatattagtaaatcatttaatatcttatatatttcactgagttggaaagtacaaattagttaatgcagatttttaaaggtttggcctttctgacactcaacttcacatttaatattttttccacaatttattacatataaggaccctaaccattatatcagatttattaaaatatgactctaatcacaggccaggtattagtgaaaatttggaaatgcaagtcaggaagaggcttattctaaagtttcatggaggcataaaagtcagactctttcgtaagtaataatgctaatgtcttatagactttgacatagtcagcgacccccaaatctacattatactacagaagtaaagacaaatgtaaaaataggatctctcatgtacataaggagatgtactctgtttttaagatttcattggttgttatttaagaaaactgtcaaatctgtcaaacatttcatttagaaaggaacacatgctttttgcctttgtttgatacaaacctattgggctgtcagtcaccagaaacatagaacaaaaaagatttattaccatgattgacattttgcttttgatttatattcttttcttctgtaagccaagactcattaaattttcaaattcctaaataagttaaacaactgtccttttttaacagtaaagagtgatacagaaataaactggaaaaacaacccatatttaatctttctcattcatatttttgtcctatagacagtttgtctctgatagacaagaatagtggcagaatcagtagaattttctgaggcatagcatataaatataagaaatgcagaactcaaagtcattcattagggatctgtttttacatatttattcattatttaaatggcatatgaaaatattttcccttgatcttttacagtttgattgattagagtgccataagcacatatcacgttttaaatgatgggcttgagaccacctgtacagctaagaatggcaaagatagaagcacagtcaaggtctttgaggaatatttgattgattctatcattttatactaattattctggatccttgagaaaatatatgaaatgaacttacctgttcttgaaaggagcctgctacgtacagcttcaccacttagtaatttatgtggatatttaattgtgtgggctgtaggaaagaatggaaatgtggtcaattttatcatgtttgtgtaatatcttgtattttaacattcttctatagtttgtctctctatccaaccatctctgcatttgagtattacactgctttgttaataaccactctctgggcctttttcagcctgttagcagttgattaagaaacactctaatccctttcaggatattgaggagctaatggattgcagactatttggatctttaagcttctattgtaaacggtatgaagaattgtcattgagctgatatttgcatatatctctcccagtgctagttactttgcctccttttttgtcctcttaatcttcagctttcattctgagaatatttattttagtcggaaataagcatgccagtgatagaaatttgggattcacctccagatgaatgccatcacagacagggaagctctggcacattttgcatagatctgtatgaacacagtgaacccttcataagctcttagattgcaggaaatcagtgctgaaaattaagtggggttttaaagatttgcaaagtagagagctttgtataatgctggtattgcaggtgcctattaaatatgaagtaaaggctttgtaatacaactagctaacacatttccctccacattagagtgatttatagcctagggaattagtcttgcctattttttccaaatgcagaaacactggatgtgactgaaagaataaaaatctcaaatacatgccttacaatggactgatttgctgttggatgattctaattattcaagatagatgatgcaggcttgtttgtacttccttgtggtatctctgatgcccatgatctggccttcatttctcctaagaagaaactctcaattgtgtatgcagactctcttctgaacctaaatcagattaacaccccaggtgtctataagactatatagcattaccataatgaagaggcctgggtaccaagtgaatgcttccatcctcataggaattactattgaatcatttctcaaactgtatttttagaattcatctttgctgcatttgtaaatatggtgtgtatttgtagcacagcattttgttctagacatacatggatttcaatatatttagcttcatgacaatgttcagtaaaatcccttgcagttctttaatacttaatgtctttgactagccctgttagatataaattggagcaaatagccatgcatattttaaaatgattttataaatcctatattttcacctattagaaaaagtgtgtaatccatatgcagcccacagtaggcacaggggcctgtgagagtcataatagatgattgatttagaaaagaaaacagtttttgtgcaagacaatagcaactgcaattcagtgaattaggtttttttttttcctcattaaacaaacctcaataaagaaaagaacggaaacacagaagcagttatgaaatgaagctgtatcttttatagaaggagaatgtcttctgctgacagtagtagttctatagtagacattttctggaaagaaaaatactggtggttttttggattcggtggatgcaaccaatctgtgcctctgtgtgatagcagctgcatgctgaggactttcaaatacacagctacataggattcggcaggaaactttttgtagaaggtgcaaatgacaaatggagacaaaatggagtgagttctgagttgtgagttgatgccctcctgtgtcatatattcatgtcattgaaccgattttcacattggatgtctagaatcacaatagccttccttctgtgtgtcagctgggaacacacctggactggctacttttctttgctccatttcttgtcattcactaggtggactatattcatgtatgttgttaatacatctgatttcttagtttcttgatggattttaaagtgatgtaatattatttctgcataatcttttccgtatatatatccatatatatatatatatatatatatgttgcttaagacaaccacaaagtgtgaaataaaatctatgatgtgtcctttcttgctagaaatagtaaattcatatttattctgacttatggtctcagataatatattttcctttgctattttttgtattgagtttttcttactgatgcctttttccaagttaaggaataatgttagatttaggtatatagagtaataatatttcaatgcattctcaacccattcaaatttccaacataaaagagatggtagaatttatacaaaatcatcattttttgccttaaaacttaaataggtatcaaaattgtattacaccatagtaaaaattgacacaatttttaggatattttagtatgacataaactcattttcattcttggtcttaaatggcaagattttctgccatgcagtggtagcaaaatatgttgaattcattgattgatttttaagcatgataataattaagtaaaagcttcttgacacctaaagtctctgttttagacaattaaattctgctttagctaagggttattgacttctgtatgatactgggagcaacactcctcagggtttaaactattcttgcaggaccatctgttatttgcagggactgtgcatcctctccagctgatactgtgtgaacccaggcgtatttcaggattgttcctcacatggccctggttcctgatgatcttttggtctcaaatggcaactcagtaaatccaaatactggtatgccactacttaaagtatgaaaatcttagagaatataagaaagttcctcaaagtaagagactgtgtcttacttacctttgtatttctaacactgaacccacaacagtgctgaaaagagtgaacttagtaggcattcagtaaattttgatgcaacctgaagatcagtgatcttgaaattttattttatatatataagattttccactgatttaatctttacaacaatcattcaagaaagacatcatttatgttcaaaatatattcttccatcacttagagatgtctgtgggtcccattttctcagtaattttggacatatcattatgtctgcccatcatatcatggtttttcatattaggaaataatgagaaggcaagaggtgagctaaacaaacaggatcaaattccttcacttccaagcctcttcaccccaaccttttatttaaacctttcagtacttagatcattgatttattacttctaaacataatgatcaatatatgtactttcataggtgcttgatagagatacgtgtttgtaagaaaaataccgtatcacattaaagttttcttaatagacttttgagccatccagacagtatgccagaatcaagtataaattctataaaaagaagcaaaataataactgaatagtgattaatgcagtgtctagcaactatattaattttagaaagataaacttggtgtctaatagaacttatagaatagttacacattctcaagtttccaatgcacctttgggattatttggcctatttaattctttttctgactgaagaaatggagactagagaactaatttgatatttggagtaacaaaaactgacttgatgaactactacataaagactgtgatactgggcacatcatttaaatgcactagtccttgctttccttgtctgcaaaatgggtgtaatcatgccaaatccatataaagttgtcctaagattaagtgaatatatatatatatatatatatatatatatatatatatctggctcgcaatagccagacactcagaaaatgttacctgtttttctacctcctgtccaagaataccagcttgccattgacagatgtttgcacattcatttagtgaatgctttcttgattttgtttttggttgttttcttgaatctgatttctattgtatctttttcacgactcacctgtgttcatctgcttttgtgttaaaacactatctggtttcagattatttaggacttttggaaaattgatcttcataacagtatctcaatatagcatatttgatgttgttttttatcttaatccctgttgtttcacatttgtataattgcttcgtctttcattttgagtattttacctatttcatttgcatgtcatgttttaaaattattctgttccttttagtgtttgtaatgaatttacgtccccatagattacccagaagctccacccatctgggaattttcaccgtatccatcactcctattacaaaatcacatataagagagaatctgtttcacagtcagtacttaacacagctggaatcatttgaaacctgctggttcttgcttccaattattccatagactggaaagcatccctgttgaagtaatggcatccatggtgtaatcaaaccagctaaaatgcctcaaagtatatggatcatatttctgagattgattgaattcatggtagaagcataatcaccaacagcttttactatttttcttaatttaacttatattcattttataagtaagtttttcatgtctcaatatacaagtttgtaatgtttgagtatgtgagtgacataataacataaatgagacacaacaaataaaaatattacacactacggtagtaccccaaaaataccttttgataatatcctggggccaaaatcatttccttttgttggaacagctgaaaccatcacgataaagttactgatttgtatttagagcagaatgtagtggagatttgttactagttcaattaactttatcaactaaataagaagtagatatagtcaaatttcaattggctttgttgtgattttgattgaataaattaaatatgtaacttcttgttgaacttaaccaccctctcagtgcaatacaattgttttggattggtcttttagtttagttctagttttatataagaagacagtttcataagacaagaatttaaaacaaaacaaacttaaaattaaaatactcattctttgtgcttagaaagcttaatctaacacataaaacctggaaaactggtgtgattttctttaggcttctgcttgttttatgctaagatgtgatatccattttatagcattgggataccaaacagggcagggacatagtgtggatattatcttgaatatcagacctcttagggttattacaaggattgtagcatggcatatagtacatgtttggtaaattctatttaatcccaccacataggcagacatggacctaatcaggcaaaatgttaaacacattttaaatggttaaaatcaggctttaaggatttggattcattgttttatttgaaatatttagcattctcatggcatcaagtatgtatacatgtatactgtatgaagcgatatatttattatatactgctaaatgtatattcaaaaggctaccattttatgtttttcatatcagtcgtttcctctattagcttttttttttcttttttttttttttttttttttttttttttttgtgacggagtctctgtcgtccaggctggagtgcagtggtgtgatcttggctcactgcaagctccgcctcccgggttcaagccattctcctgcctcagcctcccaagtagctgggactacaggcgcccgccaccacacccggctaattttttatatttttagtagagatggggtttcatcgtgttagccaggatggtctcgatctcctgacctcgtgatctgcccgcctcggcctcccaaagtgctgagattacaggggtgagccaccgcgccttctattagcttttataatggagaggtaactgtcctagaaagtccatgtaaattccagttcagataatgaacaattacttattctatgaagacatttatatttcctggactgtacctttcacatctttccctatgtgaatgggttccctgaagaactttttctgcctgctgagcacttatttggaggtaagtctaacaatgagatgatatccaaacttatcactagactactgaacgatattctattttccctaatggataccaatgcttattccagaattatattctatagttttaaattttcatgctttcaaaagtatctgacatttagctgtgaaattttctgctgccaaagaccttgtcatatgatccacggacagatacacagctaggctttttaaattttgtattaattctgttattcaacacacatctaataaataactgctgtgatccaggaacagcattagacaataggaaattttttttaagataaaaaaaattgtctttggtttaaaatattccattaaattttaagcacagtacttttttcccttggaatttccttattaaaaaaaatatgagttcactctcaattttaaatagatgtcatcatttccctgaaatatattttttaaagtctctctctctcacattttttttaactactgctggagacttgatctttcaatggggtaataagattctaagatctattactctaattataagaatgccaggtttaaatttatcctttggttaatttggagggaaatgtactttttcattcttaaaatcacactccttctacaggcaaaggtgttaataaaatatagtagcaagtaaaacttcatttttttactagatgagattagcatatttgctatattaaaaattactttaaaaacatggcacacatgaataatgttgaatgataacccaagctaaagtagacagtggttctctaaaaatggaatttcacttgtagagacatccattttgaaaagggctgtttcaagtcatgatattttgaaaaaatgttttagccttcgtacgttgaaaggacatgtttaccacagatatggaacatagatattaaattctggctggaataaatgtttggtttaattggcttctgcctccagatggttctgattttatcaagtccattttcttatgaatatttatcacagtacttcaaggaaccaatgcaatgatataaacgttgaaaacaagagacctttattttatatatatatgttttcctaaattgagaaacatacatatcctgaaaatttagttttctttcatcatcgaagaaaatgtcataattcggctattacagccaagacagactatgtttttttaactcaattatttctaaaacactaacttacatatggataaatgtttatataggaaggtcatccccaaatttcaaatttttatttaagccaaaaatttgtattttaaaaaataatgcatataatgcctcacctgcacattcttgtacaaacatattttaggagataaatctttattgccagaaaacatactattttaattgcaattagacttctgtgataaccatcaagctggtgcctaaatctaaaaggatctttccaactgttctgtggatgcttaggcttaggcaactatcaccaagtaattactataatttaaatgaactacgaaattgaaacctgctaaaatatgtagacctcaggaatcaaatgtgtattaacacttgttaattaaatattattggttaaaattaatttagaaattattattgggttgatatgaccaaccaaaaaactatatgtaaatcacttcttaatactatgaaaatatgaacagtttggtaaactaatttagaaccaagcaacaggatatattaagcttaggaagatacagacatttaaataaaggttggtatagaagtcacatgatagttgctctgtctgtagtaaccaatttctaaataaaatcaaaaatgtggcattctcaccacttttcacagtgacaattaacttggtgtttttacgtagtttcaattccttgcttattctgatttttataagtgactatgcaatgtattaccacataaaataaaacagtagtggttattaaaatcagtacttaaattttcccattttaaaaagtgtagaatacattattttctctctttttggctacaataatgtctattcaaaaccatttatactttgctagaattacacttagcatcttgagaattcagttttctcctctgaaaattagataattggactcaaccatttttttatttctattattaaaaattgaactacagcttttgttaattacttagggaaacattactccttggcaggttttctcttgccacccaacatccatctggcctacttctttctattatcagttgatatatgttcaaatagtgcacatcagtgttaacattggctcaagaaaaacaattacaaaataaatcacatggttcagtctctcctgacaatgaatgatttgcaatattcccattgtttgtatgatctatgttatcactctcttgcattagtgttgataacacagtattgcctctatcttttttgaggttgctctgtgattaattttccccttctgaactagaaaattaacttttttctcttgaattagaaatcaaaaaacagaactacaaaaccttgagcagattgttggcatttattatttgattggaaaaccatgaacttaaaatcattatgtagctgccatatttttatcagtaatattactcttataatgtttgattttattgtctatagtaacacattaaggtgactttagcatatttcaacttttgttaatgttggagaattacacatagttttgcaataatgtgtaaatgtaataaaaatatcaaacagtggtaattttgactgataatgttagttatcaggacaagtgttagaaaagcaaatttaatcaaatggtgcccactgattttataggcagtttcttcattcaaagtaaaagtgatgttaaattgaagaacttgtcagtctcatgctggaggaaaatcagctttaggattagaaaaaccaaactgcaaattagatgaaataccacattaattagatgaaataccacattaatgttaaaaaaaaccggtgttatttggttacatggaaataaaataaaacggttttgccatcaatgagtctaacacattttcttcacaacactgcagaaataagaacccacaggatggttctgaatcttgaacagcagcttaggaatacttactcgtctaataactcaatttgcttgcatttactactacttactgcattgtaccctttcatcttctaacaagtttaggaagaccaaattcttttggtgtttttgatagagatatggtaaagagactattttacactgtagatggatcggtctaggagtcactttgtaagtttggaaaattgacatcgatggaggagatgtattaaatagttccagaaatgccacattttggatgcaagacactttttaatcatattaagcagtctctttaatgctcacaccctgaatgccttccttaaaatgttctaaacacttccaatttgaagaggggttaaaatataaatgtggtaaacaaatcacagaaagaatatacattcttaaggaattgttcttcttatgttatggtcttccaagtgcgccaatgacatcggaagtatgtggtgctaaggtgaggcattctgtgtaatggcttagttgcaggactcaagtactgggaattcagtcaattctgctcttgtaatacattgtgttggctttcagaacaatactccagtgtttttcaggggaaggtatgagtgtttccctaatagaagagcagatgttgtagccaatactgagaggtaggaaagatatataatacttacacaatctaaaatttcacctaaagtaacgtttaaataaagtttgtttagtaatcatcagtgttctgttgtctgtaatgaccaacttcaccataaaatcagaaaggtggcaatgtcaacatcacaaacagtggcagcaaacatggtgctgttctaaatacagattgtgtatcccaagccctttgcttttttctatggatattcctccaactactcgtatcaaagatgtatgttctggtaaagccttctgtattggcagctcctgctgcttttctgtcatattcaaacatgaccaacagcaaatgtacttacattttttttcagccaattctttcttatttctagtgacagtagtaaatttacttatagcagtaaagaaaatatgagaaatacttttctgtagtgccaaatgttttaatcactgcctatatcagcctaattgtttcctaatcaaaaattgtgagaatctaatttttggtcaaaattgtttattatggagattttgcacatataggaaaaaagtgacataaatattattaatactaagtgacattaatatgtcattggggaataaccatatggctctctgaacatgatatgctttctaagtattcatccaacaaatatatggtcatttggaggctactaaaaataaagcccaccaattttttaatgttgataatgcctctgacaggaaattttaaggaatatgaaagtaaaacaaaaaaatagtttgtgtcaaatgaacacgcaaggatttttgcataagacacacattagctatttagggcattaattgattgatgaaatattagcagtatctggcaaggttagaagatggacagataaagaaaattctgtgagttcatagagcattgtcagagtgagcattccagggacaatacagtgtgaattacagctatttgattaatcgaatcagttctgtattgtaaaagtacaaagagatggtgttactggaatctgatttggaattggatgcttgtagattaataaactggtatagactgtgcttcccaatattttgcctcaaaaaagaataaattcattaggaattggaacaaaagcaatgttacataacctttgtagtattagagtagtctatatagggaaaaagctaataataaaaagtaatcaattcattaatctcaatggtttgctattggcattgaaactaattattgatcgcattgacatgattagtcatagctttattactagaaatgtgaacatgattttaaacatatgtaaaactaactggccaaaataatccacagttaatttcagctaaatagctaacaatttcacaggaaaagtggaagatatttgaggctttgtaaagagaagatcacagcattcaccttggtaccattatcttttgatttctagaaacacagtttgcaatgccttgaaagtagatgtcaaacaccagctaatgataataactgatatttattaagtactccatgtgcgtgaagttcctctcagcactttacatgtattaattcaaatagaaccaactactttctgaggaggatactgttattattgtccgtattttacagctgaggagaagttgaatgatttgcttcaggtcacagttctagtcaggggagaatagtttacggttccaaccctagcagtcttagacactgcgctctcttagctgctaattaatactgtctctatcatggaacttttatacaaaacataaacttgtagttagtcagcaaaagtaaattttgccaaaaagaaatttggccattttaacctttttttaaaggttaaaaaaaaaatcaccgaagtctaatttaaccttttttttttttttgcttcattattatacaaattttgccactgagcacatagcattatgacagaactattcctgagacatggggagatactttacagtttacaatgaacattcacagacagtatatgtgaaaagtagaaattagcatttgtatcttttaggcagtacgattcgagatatttttcacaaacgtgaattttagttgttaatttaaataaatttgctcatctcaaagcagagttttgtgattattcttattttatacaatgcctcatatcagataagaaaagatctagaagaggggaaagtcaaactctaatgataacaagtgtatctcagtcctagactacttgactggaatgatgctttcctttctttttaaatctttattccagcccctgtgcctgaatggttcagaagcaaccaccaggcatctctgcacaaatttgccagctaagatcagtataggccctcctccaacttatctgcaatgcactgggagaatatatcttcatatctatttagaaacatgcatataagttattttaatactatttatacaattttagcattttcctagagtaggttttccactttcatcacccacagctacaaaattattcagttattttctacagttttacaaatataccatattacgggctgcttaatatcttccttgtttaagactttaacagtatcagccgggcgtggtggctcacgcttgtaatcccagctctttgggaggcgggcagatcatgagctcaggagttcgagaccagcctggccaatatggtgaaaccctgtctctactaaaaatacaaaaattagttgggcgtggtggtgcgcgcctgtagtcccagctactcgggagactgaggcagaagaatcgcttgaatccaggaggcagagcttgcagtgagccgagatcatgccactgcactccagcctgggcaacagagtgagactctgtctcaaaacaagcaaacaaaaaaaaaaactttaacagtattttgtaaatgccagtgtggtggcttacacctttaatcccagcactttgtgaggccgaggcggatggatcacttgagttcaggagtttgagagctgcctagacaacatagcgagaccccatctctacaaaaaatacaaaaaatatccaggcgtggtgacgccttggcactagagcaagaccctgtctaaaacataaataagtacataaataaaaataaaattcatcaaccgcgtgttgaattctcaagattccccttaaacctgagaactggagagagccatttcagttatatagtaaaattaaatttgtttatcatggattattataatggacgtatattgataaaatgtctaggtgagaattttacagttgtaattggaggtccatttaaaggttaaaatgaaatagagagttatggatgcacagctttccatattgtgtttggcaaaggaaattgattctcggaatgatatgctaccctttttgtccactatgtgtagtgcatatggatgatggaatcactttcatgagtacagttcttatttagaacacacattccgtaatatccctagaaaataaaaaagatttatgtgttcaaaaggagtttcttgatatgagacaagcagactgactttcaattacaaacacttagaattctgaaccttgcatttttattgcgagaactcagttattttccaaagcttggtttgagagctattttcaggcagcagctttttcttgaagtcccttactgataagtatagtaagcagaaatatttcaattactctaattaaaaagcagtattcaacatgttgactgaaggtggagtttatgttgttcaccagacaatgagaaattgggaagggactattttagatagatcattgatgtgagaaagttaaattcacctgttaatttgtcaataaactagaacagcagggtttcctttgttaaaatataagataatatattggaaacgcataattcttagacatgaactcaaagacatgcaggcaggtttacttttagctcatggcatatgcaaagataggcatcaatttgtggtgaggatatgaggaagtttttatctgtacatttgtttaaagagtcatgtttagagaagcattttttaatagatactcttttcaatggaactcatatttaattagaccaaacataaaagccaacactttaagtaatctctttttagcagattttcatggaagagtgccaaattgttttggtttcactataggtttacagtcttctgatagaattcccagttgggatttgaaaaccaaactgtgtcatacagacatgaatacagtggcctaacgtgatgtgttgaattagctttctagatgacttaaagtatagctggggttttcctttatccagggactaacattcaaggttttgtgaaaaagaaaattaattttgcattgacattctggatgttggtgataatttgtagtgacattatgcctattggttgtgattgtgacaggcaggcagactggatccaaatggacattacaagagccaaattaaatagtctgagcattggaaatttctgccttaaggaaagcagaagcttttcagcatgcacttgttttctacctccacaattatggattaatatacatcaattctaggcagttgaggaatgacatgagaggattaatggaactggacaacattacacaagtgaagtgaaaattctgtaatgatttttctgaggtgatgtagtagacaaggcaaatgggcatcagctcctagactttgcacctttagaatttcaagaaaatgattgaaaagagaaatggaaaacaactatctaactaaagctggcataataatttttctcatcaaatatatacatcatttttcacaaataaggaggagttattcaactgagtaagccagtactgtgtgcagtgtatgattttatccaaaaattgtggccacttttatctcttaaaactgtttagagaaaaattgtgcttagtgtgtatccacaataagaaaaacagattagatgcaaaaataaatatacataaccagccttatatgtaatcatactcattttgctttatgaaatatctctgaggggaaaatattttttccatgtctttttgaagttttaataagattttttaaccccaatatattgagctgccctaatgcctactatttatttttttctcttctacaaagtttacctatcatatcatatttatggcaacattttctactactaagactgtggcggtttttttccaagttatctgaaaacttgactgtcattattgcaaattgattatttccataaaggtgctttaataaaatttctgttcttagactttaatttggtaagctcttacacatatttatacataatttgtgataggagttttaatctttagatttttacaatgtgattttctcatatctattcattggaagaggtagacttcttttctttaattgcatgcattttatcctttaaccacaaaatgtgtttaaaagctatgcaagaattagcaaaagtaaactacagcaatattaaaatgacttatttggtatcacctttacagacccagctcacttaggcaatggtattctagtaaattacaatattttttaaagcatagttttttttgttacctcttgaaatagtgattttaaagccaaaagggtcaagagtatgccaaatttaagatgattatttggaaaagagagatatcagcaacttaagtatgctgtatttaaggtgattgtaaaagagtttttttatatacaggacagcattaaaacagaattacaaagtctattaaccataatgaaggagttcaagatgcagataaaattaaatgattgtctttaagctttcaataaatttgttagccaatttaagaataattgcagcttatgaaagcttgtttatatttatctaatttcaaaaattaagaaagaattaaaggatatttgaagttcttattatgtagtttctaacattgtgagagaatggtcaaaagactgctatgtcttatttagtgtaaatgtgtacatactttacagttaaaggaattactgctttgctaccatcaaggtcttaaaaccctgtatcaaaacaacctagagatttgcttcattaactcctgttcatttcgcagggcaagaaataagatcctctttggcaatcacgtgttacctgaattatatttaatctctttattaccttggaaatataccaagacactcacatattcacatacacacagcacacacacatacaaccctgatgcaaatatggacaaaatgaacaccctcacttatacatcagtccatttcttcctctcataaattgaatgtgaatagctctgatggcatttctctctgactgaaaaataaggtgccatgcttactccatgcaaaacccctgttttacagttttatgcccctcactaaaaatagataaatctgcatttgtatgtgtcctctactcagcctccctcatgccgcctgacttcttgcagaaggtgtatatgcttttcattctgaccaataagaggcaacttggtgagttatagagattgactgggtgcttgacatgtggtgctgctccattaaaacagtgggcagttggtactggggaggtttaggagaatttaagttgtctttattgttattagatgtgctcttagatgtggtaatattctaatattctattaaaaaatataaaaatgcaacttcagttcacattataataggttttctcatattgcttttgtggtccagatgtgaaacataacaataataatatgtaattctataatcatcttctaatgttaccaggtaatttttgtagacagagccagataaccctattgctcattatttaagtgcaaagtacattttttcaatcattattgcctaagaaatttttaggagatgatggttgaatggtccttctcctcacctcaccacaccaagataggttggtatgtgtgtttgtgtttccttgctttcactttttaaaggatcctatagaaaataacagtattgtttccatttaaaaaaaaaacttgataatttatattccattttatttctgaaaaatagccacatttttacataccccaaataaatcgccatgtgtaactatgtgcaaaaaataattgaatgtggctgaaaacgatctcacttgttgtactataatgtatgaataataataaatgtaaaacccttgaaatcacattttcttataatactattctataggtaacacttacagtacagtatattaaattggtactttgtgaaatgaattcttgagatacttaggcactacacaaagcattattattaaagaattataggggaaattttcccaattgaaaattgataattaaaggtatttaaattatgtatgttgcagagcaggtaagaagttcaatgtagcaatatatttctattttgatttcaaattaagttttaattacacaaaaaattggctcaagaactaggtgatacattttagaaaattttaaatagccaaaataatgttgaaatatgttatatggataatttatcaataaaaattattactgttaaaaattggtagaattctttcctccctgtgataaatgatttaagttgaatgggaatttaagtaacatacagggatgcatcttaatacctatatttgctcaacagtggtaaacacacaattaaaacttgtcctcattaaaatggacttttgtacactataatttgaagtaagtaatgaatatataaagtatttaaagagttgtatatcaaaatgtataacgttccatttttggctatattttgtaaaacatttttggtgtaatcagtatgactatcacatatgtcaaatcaagtattctactatttatttaaacggatatatacctaatgtatttgaaagcttattgcactcataaaattgtatatattgtggcttcaaaagtctgtacttattcttgctttaaaaaagtagtatgtgcatttctttccaatttatttttaattaattatattaaggataacattctttactaaatgtaccttaaaattcacaataaagtttcagaaattgttttgta

SEQ ID NO: 15046 - DNA, 2726 bp, Homo sapiens
  source 1..2726: mol_type = unassigned DNA
agctactgatcactaaaagtgaaggaggaagctccattttgtcaccgcctgagagaagacagaaacggtaaagagataaatgattggaaatattagataaaatggcatgattttgaagtaagaggagagcataagaaaggtgtagtccttttgcaatggtgttttctaggagagggggcctgggagcccgggatctgcttctttggcttctgctcctcgcagcctgggaggtggggagcggccagctccactactcgatcccggaggaagccaaacacggcaccttcgttggccgcgttgctcaggacctgggactggagctggcggagctggtgcctcgcctgttccgggtggcgtccaaaacacacagggaccttctggaggtaaatctgcagaatggcattttgtttgtgaattctcggatcgatcgcgaggagctgtgccagtggagcgcggagtgcagcatccacctggagttgatcgccgacaggccgctgcaggttttccatgtggaggtgaaggtgaaagacattaacgataatccacccgtcttcaggggcagagaacaaataatatttattcctgaatctagactcctgaattcgcgttttccgatagaaggagctgctgatgcagacattggtgctaacgctcttctaacgtacacgctcagcccgagtgattatttctctttggatgtagaggcaagtgatgaactgagtaaatctctttggcttgaattgagaaaatatttggatagagaagaaacaccagaacttcacttattactgactgccactgatgggggcaaaccggagctgcaaggtacagttgagctgctgatcaccgtcctcgacgttaatgataacgccccactgtttgaccaggccgtatacagagtccacttgttagagactacagcaaatggaacattagtgaccacattaaatgcctctgatgctgacgaaggtgtaaatggtgaagtcgtcttttcctttgacagtggtatttctcgtgacattcaagaaaaattcaaagttgattccagctcaggagaaattaggttaattgataaactggattatgaagaaacaaaatcctacgaaattcaagtaaaggcagttgataaaggaagtcctccgatgtcaaatcactgtaaggttttggtgaaagtgctggatgtaaatgataatgctccagaactggcggtcacttcattgtatttgcctatcagagaggacgctccactcagcaccgtcatcgccctcatcaccgtgtctgaccgtgactcaggtgccaacgggcaggtgacttgctccttaatgccccacgtccccttcaagctggtgtccaccttcaagaattactactcgttggtgttggacagcgccctggatcgcgagagcctgtcggtctatgagctggtggtgaccgcgcgggacgggggctcgccttcgctgtgggccacggccagggtgtccgtggaggtggccgacgtgaatgacaacgcgcctgcgttcgcgcagcccgagtacacagtattcgtgaaggagaacaacccgccgggctgccacatcttcacggtgtctgcgcgggacgcggacgcgcaggagaacgcgctggtgtcctattcgctggtggaacggcgggtgggcgagcgcgcgctgtcgaactacgtgtcagtgcacgcggagagcggcaaggtgtacgcactgcagcccctggaccacgaggagctggagctgctgcagttccaggtgagcgcgcgggatgcgggcgtgccgcctctgggcagcaacgtgacgctgcaggtgttcgtgctggacgagaacgacaacgcgccggcgctgctggcgcctcgagtgggtggcactattggtgcagtcagtgagctggtgccgcgattggtgggtgcgggtcatgtggtggcgaaggtgcgcgcagtggacgccgactcgggctacaacgcgtggctgtcctatgaactgcagccggcagcaggcggcgcgcgcatcccgttccgcgtggggctgtacacgggcgagatcagcacgactcgtgtcctggacgaggctgacttgtcgcgctaccgccttctggtgctagtgaaggatcacggtgagccggcgctgacagccacggccactgtgcttgtatctctggtggagagcggccaggcgccaaaggcgtcttcgcgggcgtcggtgggtgtcgcgggcccagaggcggcgctggtggatgtcaacgtgtacctgatcatcgccatctgcgcggtgtccagcctgctggtgctcacactgctgctgtacacggcgctgcggtgctcagtgccgcccactgagggtgcgtatgtgccgggcaagcccactctggtgtgctccagcgcgttggggagctggtcgaactcacagcagaggcggcagagggtgtgctctagcgagggcccacccaagaccgacctcatggccttcagcccaggcctatctccaagtcttaacacgtcagaaagaaatgaacaaccagaagcaaatttggatctttctggtaatgtaagtccaactttcgagttttggctttaaatatttttcatatttaacttgtctaatcatcttttcaaatatcactttaaaaaatgtcttcaaggtgttcactaacgttgaaataaatcataccattgaatgtagatatcctattaatggcagttttgtcttgaatggaactagaaa

SEQ ID NO: 15047 - DNA, 2204 bp, Homo sapiens
  source 1..2204: mol_type = unassigned DNA
atggtgttttctaggagagggggcctgggagcccgggatctgcttctttggcttctgctcctcgcagcctgggaggtggggagcggccagctccactactcgatcccggaggaagccaaacacggcaccttcgttggccgcgttgctcaggacctgggactggagctggcggagctggtgcctcgcctgttccgggtggcgtccaaaacacacagggaccttctggaggtaaatctgcagaatggcattttgtttgtgaattctcggatcgatcgcgaggagctgtgccagtggagcgcggagtgcagcatccacctggagttgatcgccgacaggccgctgcaggttttccatgtggaggtgaaggtgaaagacattaacgataatccacccgtcttcaggggcagagaacaaataatatttattcctgaatctagactcctgaattcgcgttttccgatagaaggagctgctgatgcagacattggtgctaacgctcttctaacgtacacgctcagcccgagtgattatttctctttggatgtagaggcaagtgatgaactgagtaaatctctttggcttgaattgagaaaatatttggatagagaagaaacaccagaacttcacttattactgactgccactgatgggggcaaaccggagctgcaaggtacagttgagctgctgatcaccgtcctcgacgttaatgataacgccccactgtttgaccaggccgtatacagagtccacttgttagagactacagcaaatggaacattagtgaccacattaaatgcctctgatgctgacgaaggtgtaaatggtgaagtcgtcttttcctttgacagtggtatttctcgtgacattcaagaaaaattcaaagttgattccagctcaggagaaattaggttaattgataaactggattatgaagaaacaaaatcctacgaaattcaagtaaaggcagttgataaaggaagtcctccgatgtcaaatcactgtaaggttttggtgaaagtgctggatgtaaatgataatgctccagaactggcggtcacttcattgtatttgcctatcagagaggacgctccactcagcaccgtcatcgccctcatcaccgtgtctgaccgtgactcaggtgccaacgggcaggtgacttgctccttaatgccccacgtccccttcaagctggtgtccaccttcaagaattactactcgttggtgttggacagcgccctggatcgcgagagcctgtcggtctatgagctggtggtgaccgcgcgggacgggggctcgccttcgctgtgggccacggccagggtgtccgtggaggtggccgacgtgaatgacaacgcgcctgcgttcgcgcagcccgagtacacagtattcgtgaaggagaacaacccgccgggctgccacatcttcacggtgtctgcgcgggacgcggacgcgcaggagaacgcgctggtgtcctattcgctggtggaacggcgggtgggcgagcgcgcgctgtcgaactacgtgtcagtgcacgcggagagcggcaaggtgtacgcactgcagcccctggaccacgaggagctggagctgctgcagttccagccacgacagcccaaccctgactggcgttactctgcctccctgagagcaggcatgcacagctctgtgcacctagaggaggctggcattctacgggctggtccaggagggcctgatcagcagtggccaacagtatccagtgcaacaccagaaccagaggcaggagaagtgtcccctccagtcggtgcgggtgtcaacagcaacagctggacctttaaatacggaccaggcaaccccaaacaatccggtcccggtgagttgcccgacaaattcattatcccaggatctcctgcaatcatctccatccggcaggagcctactaacagccaaattgacaaaagtgacttcataaccttcggcaaaaaggaggagaccaagaaaaagaagaaaaagaagaagggtaacaagacccaggagaaaaaagagaaagggaacagcacgactgacaacagtgaccagtgaggtcctcaaatggaaacaagccacttagccagtttttgtaataatggcaaatctctcccatgtagcaattccctgctcctttttcctatctacatgagccctcttagagacctcagaaatctgcagaaagttccctgtgtctg

SEQ ID NO: 15048 - DNA, 5263 bp, Homo sapiens
  source 1..5263: mol_type = unassigned DNA
atggtgttttctaggagagggggcctgggagcccgggatctgcttctttggcttctgctcctcgcagcctgggaggtggggagcggccagctccactactcgatcccggaggaagccaaacacggcaccttcgttggccgcgttgctcaggacctgggactggagctggcggagctggtgcctcgcctgttccgggtggcgtccaaaacacacagggaccttctggaggtaaatctgcagaatggcattttgtttgtgaattctcggatcgatcgcgaggagctgtgccagtggagcgcggagtgcagcatccacctggagttgatcgccgacaggccgctgcaggttttccatgtggaggtgaaggtgaaagacattaacgataatccacccgtcttcaggggcagagaacaaataatatttattcctgaatctagactcctgaattcgcgttttccgatagaaggagctgctgatgcagacattggtgctaacgctcttctaacgtacacgctcagcccgagtgattatttctctttggatgtagaggcaagtgatgaactgagtaaatctctttggcttgaattgagaaaatatttggatagagaagaaacaccagaacttcacttattactgactgccactgatgggggcaaaccggagctgcaaggtacagttgagctgctgatcaccgtcctcgacgttaatgataacgccccactgtttgaccaggccgtatacagagtccacttgttagagactacagcaaatggaacattagtgaccacattaaatgcctctgatgctgacgaaggtgtaaatggtgaagtcgtcttttcctttgacagtggtatttctcgtgacattcaagaaaaattcaaagttgattccagctcaggagaaattaggttaattgataaactggattatgaagaaacaaaatcctacgaaattcaagtaaaggcagttgataaaggaagtcctccgatgtcaaatcactgtaaggttttggtgaaagtgctggatgtaaatgataatgctccagaactggcggtcacttcattgtatttgcctatcagagaggacgctccactcagcaccgtcatcgccctcatcaccgtgtctgaccgtgactcaggtgccaacgggcaggtgacttgctccttaatgccccacgtccccttcaagctggtgtccaccttcaagaattactactcgttggtgttggacagcgccctggatcgcgagagcctgtcggtctatgagctggtggtgaccgcgcgggacgggggctcgccttcgctgtgggccacggccagggtgtccgtggaggtggccgacgtgaatgacaacgcgcctgcgttcgcgcagcccgagtacacagtattcgtgaaggagaacaacccgccgggctgccacatcttcacggtgtctgcgcgggacgcggacgcgcaggagaacgcgctggtgtcctattcgctggtggaacggcgggtgggcgagcgcgcgctgtcgaactacgtgtcagtgcacgcggagagcggcaaggtgtacgcactgcagcccctggaccacgaggagctggagctgctgcagttccaggtgagcgcgcgggatgcgggcgtgccgcctctgggcagcaacgtgacgctgcaggtgttcgtgctggacgagaacgacaacgcgccggcgctgctggcgcctcgagtgggtggcactattggtgcagtcagtgagctggtgccgcgattggtgggtgcgggtcatgtggtggcgaaggtgcgcgcagtggacgccgactcgggctacaacgcgtggctgtcctatgaactgcagccggcagcaggcggcgcgcgcatcccgttccgcgtggggctgtacacgggcgagatcagcacgactcgtgtcctggacgaggctgacttgtcgcgctaccgccttctggtgctagtgaaggatcacggtgagccggcgctgacagccacggccactgtgcttgtatctctggtggagagcggccaggcgccaaaggcgtcttcgcgggcgtcggtgggtgtcgcgggcccagaggcggcgctggtggatgtcaacgtgtacctgatcatcgccatctgcgcggtgtccagcctgctggtgctcacactgctgctgtacacggcgctgcggtgctcagtgccgcccactgagggtgcgtatgtgccgggcaagcccactctggtgtgctccagcgcgttggggagctggtcgaactcacagcagaggcggcagagggtgtgctctagcgagggcccacccaagaccgacctcatggccttcagcccaggcctatctccaagtcttaacacgtcagaaagaaatgaacaaccagaagcaaatttggatctttctggtaatccacgacagcccaaccctgactggcgttactctgcctccctgagagcaggcatgcacagctctgtgcacctagaggaggctggcattctacgggctggtccaggagggcctgatcagcagtggccaacagtatccagtgcaacaccagaaccagaggcaggagaagtgtcccctccagtcggtgcgggtgtcaacagcaacagctggacctttaaatacggaccaggcaaccccaaacaatccggtcccggtgagttgcccgacaaattcattatcccaggatctcctgcaatcatctccatccggcaggagcctactaacagccaaattgacaaaagtgacttcataaccttcggcaaaaaggaggagaccaagaaaaagaagaaaaagaagaagggtaacaagacccaggagaaaaaagagaaagggaacagcacgactgacaacagtgaccagtgaggtcctcaaatggaaacaagccacttagccagtttttgtaataatggcaaatctctcccatgtagcaattccctgctcctttttcctatctacatgagccctcttagagacctcagaaatctgcagaaagttccctgtgtctgtctagaacgcatttaacaggttttgtcgtaaaagctttactaagtctggtgttaactctttctctccactctggcttgttttcagaacctaaaaagcagacccaagtttcctttctcctccgccgcaaaggagaggcttcccagccccgccagtgagaggttggactctctgccctgtgctccggggatcctgtcttgatgacacttgcagggcaggctgaaaagttttgagattgagcagcttgggagtttgtggccactgggtatgtgtggctaccgcgggtatgcgagtgccagatattggctgagacgagccagcttagactaattggtacaaggaaggcaagaaaacaaagacaaataaacagcggaagttatcagtatggaggggaagtgtaaacttaaagggaccagactttctaaatcttacaactcaagaggtggcagccaccctctaggagacaaaactacccccactgacaaggctttaggagaccctaaagtctgttggctgtgacgtcattatacctaaaatctgcatcatacctgcaagccaacagttcagtgttttaacagagaaccaccctgggaaacagaagcagatctgatgtgtttcctatacatgtcctgtgctcactttattaaaaattcttttgcacacaatgtttatgaaaaggccagatccttttccaatacttatgcaaaagcaaaagaaaaccccgacacctcacctttcgctgtttgttgtttcatagatttatttaaaaaaagagaaagtctatagctataaatctttaaagagaaatatgaatacaattcccctaaactctcctcaaaagagaattcagtctacagccatttaaatgatcattgctgctacagaagtgctttaagagaattgcctgaaacatctgtattatatcggccacctgccaatcacagctttactctttcaggtcactctggggctgcctcttgcatgtattactaaataaaatgatctctctttctctctctctctctcttttctaagaaacaattatgtgcactttgatacacaaccttctctaaccaactatatatcaagacccaaaaattgaagaaaaatattgttttctcatacagtgagcagatttttcaatctactaattctgtgacttgtcttggtgtgctagcctacaccttctctttggtttagttttccttttctataacactctgaattgctaatcttactaacacctatgatgttacctgaaatcaatctcccatatgtatgctgtatgctatgctaagactcctgaaatatacttactctgtgcttgtgtatgtgaatgttaatgcaactattacctagagtgaactttaagctttattgttgaatgtaattccattatatttccttttgtacacctgtgaaaaagtggagtagtgtttttttaaccattgttaatcagcttttgtgtatgaaagacacagtaaaatttctttcttaaatcaagatactggtgattcaaggaattttatttatggtccagccaagagccatctcgtgccaagacttctgctggcaagggaatggataaagctgttttgttctagtaacaattttggaatgaatactgacaatattccatgagggtgtgcaagcacaaattttaccaatctgacctctttgaagttgcagaatgctttgaaattctaatggtatctgaaatatcagctcatagaaagtaacaaaatttgctgtcaccttaaataagacattttaattttgttataatgtacaatttagaagtttgattaattatattatctatttaggcattaatataaaagaggtaggagtctgttatttaaaaaaagcattaaatttaaaaaaaaactgtcttgtctacttttagcttcattctcccatattttgaagggtgtgtaacttcagctctgcaggattgcatggggtaaaacttgttaccaacacatgtgaaccattgctacattgtaggttgtgatcattttgccccactgaagcccatgtatctgaccttacgtgccttttgaactaggagaatcgggctaatttattaatgatgataattataatgtatctgtacagcactttttacatttgcgaagtgctttccaatccatgttagttactagttattacagctgtaaggataaaacacgtcatgtggattcattttgaattggtgctattggtatttcctctgttattgctaataaatgaaaatggtggtatgaaa

SEQ ID NO: 15049 - DNA, 5260 bp, Homo sapiens
  source 1..5260: mol_type = unassigned DNA
atgttgttctcctggcgagaagatcctggagcccagtgcctgctgctttctcttctgctcctcgcagcctcggaggtggggagcggccagctccactactccgtctctgaggaggccaagcatggcaccttcgtgggccgcatcgcgcaggacctggggctggagctggcggagctggtgccgcgcctgttccgggtggcgtccaaaagacacggggaccttctggaggtaaatctgcagaatggcattttgtttgtgaattctcggatagaccgcgaggaactgtgcgggcggagcgcggagtgcagcatccacctggaggtgatcgtggacaggccgctgcaggttttccatgtggaggtggaagtgaaggacattaatgacaacgcgccagtttttccaatggctgtaaagaatctgtttatttccgaatcccgacagcctggctctcggttttcgctagagggcgcatcagatgcagatatcggaacaaattcgttgttgacttacagtcttgattccactgaatattttaccttggacgttaaaagaaatgatgaggaaattaaatcccttggactcgtgttgaaaaaaaatttaaatcgagaggacactcctaagcattatttactaataacagcaattgatggtgggaaaccagagctcactggcacgactcaactaaagatcactgttttagatgtaaacgacaacgccccagcgtttgagaggacgatctataaagtcagattactcgaaaatgcaccaaatggtaccctagtggtgaccgttaacgccaccgatttggatgaaggagtaaataaggatatcgcgtattctttcaatacggacatgtcagcagatattctgtcaaaattccatttagatccagtcaatggacaaatcagtgtaaagggtaacatagatttcgaggaaagtaagtcatatgaaatccaggtagaagccacggataaaggaaatcccccaatgtcagatcactgcacagttctactcgaaattgtggacatcaatgataatgtacctgagttagttattcaatcactatctttacctgtattagaagactctccacttagcacagtcatcgctctgatcagcgtgtccgaccgcgactcaggagtcaatggacaggtcacctgctcgctgacgccccacgtccccttcaagctggtgtccaccttcaagaattactactcattggtgctggacagccctctggaccgcgagagcgtgtcggcctatgagctggtggtgactgctcgggacgggggctcgccttcactgtgggccacggccagcgtgtccgtggaggtggccgacgtgaacgacaatgcgccggcattctcgcagtccgagtacacggtgttcgtgaaggagaacaacccgccgggctgccacatcttcacggtgtctgcgcgggacgcggacgcgcaggagaacgccctggtgtcctactcgctggtggaacggcgggtgggggagcgcgcgctgtcgagctacgtgtcggtacacgcggagagcggcaaggtgtacgcgctgcagccgctggaccacgaggagctagagctgctgcagttccaggtgagtgcgcgcgatgcgggcgtgccgcctctgggcagcaacgtgacgctgcaggtgttcgtgctggacgagaacgacaacgcgccggcactgctgatgcctcgggtgggtggcatcggtggcgcagtgagcgagctggtgccgcggtcagtgggtgcgggccacgtggtagcgaaggtgcgcgcagtggatgcagactcaggctacaacgcgtggctttcgtatgagctgcagcctgggaccggcggtgcgcgcatcccgtttcgcgtggggctgtacacgggagagatcagcacgacccgtgccctggacgaggtggacgccccgcgccatcgcctactggtgctggtgaaggaccacggtgaaccctcattgaccgccacggccactgtgctggtgtcgctggtggagagtggccaggcacccaaggcctcgtcccaggcgtccgctggcgccacgggcccggaagctgcactggtggatgtcaacgtgtacttgatcgtcgccatctgcgcggtgtccagtctgttggtgctcacactgctgctatatactgctctgcggtgctccgcgccgccaaccgaaggcgactgtgggccgggcaagcccacgctggtgtgctccagcgcggtggggagctggtcatactcgcagcagaggcagcagagggtgtgctctggagaggggttgcccaagaccgacctcatggcttttagccctagccttcctccttgtccaattagccgggatagagaggagaaacaggatgtggacgttgatctctcagccaaaccacgacagcccaaccctgactggcgttactctgcctccctgagagcaggcatgcacagctctgtgcacctagaggaggctggcattctacgggctggtccaggagggcctgatcagcagtggccaacagtatccagtgcaacaccagaaccagaggcaggagaagtgtcccctccagtcggtgcgggtgtcaacagcaacagctggacctttaaatacggaccaggcaaccccaaacaatccggtcccggtgagttgcccgacaaattcattatcccaggatctcctgcaatcatctccatccggcaggagcctactaacagccaaattgacaaaagtgacttcataaccttcggcaaaaaggaggagaccaagaaaaagaagaaaaagaagaagggtaacaagacccaggagaaaaaagagaaagggaacagcacgactgacaacagtgaccagtgaggtcctcaaatggaaacaagccacttagccagtttttgtaataatggcaaatctctcccatgtagcaattccctgctcctttttcctatctacatgagccctcttagagacctcagaaatctgcagaaagttccctgtgtctgtctagaacgcatttaacaggttttgtcgtaaaagctttactaagtctggtgttaactctttctctccactctggcttgttttcagaacctaaaaagcagacccaagtttcctttctcctccgccgcaaaggagaggcttcccagccccgccagtgagaggttggactctctgccctgtgctccggggatcctgtcttgatgacacttgcagggcaggctgaaaagttttgagattgagcagcttgggagtttgtggccactgggtatgtgtggctaccgcgggtatgcgagtgccagatattggctgagacgagccagcttagactaattggtacaaggaaggcaagaaaacaaagacaaataaacagcggaagttatcagtatggaggggaagtgtaaacttaaagggaccagactttctaaatcttacaactcaagaggtggcagccaccctctaggagacaaaactacccccactgacaaggctttaggagaccctaaagtctgttggctgtgacgtcattatacctaaaatctgcatcatacctgcaagccaacagttcagtgttttaacagagaaccaccctgggaaacagaagcagatctgatgtgtttcctatacatgtcctgtgctcactttattaaaaattcttttgcacacaatgtttatgaaaaggccagatccttttccaatacttatgcaaaagcaaaagaaaaccccgacacctcacctttcgctgtttgttgtttcatagatttatttaaaaaaagagaaagtctatagctataaatctttaaagagaaatatgaatacaattcccctaaactctcctcaaaagagaattcagtctacagccatttaaatgatcattgctgctacagaagtgctttaagagaattgcctgaaacatctgtattatatcggccacctgccaatcacagctttactctttcaggtcactctggggctgcctcttgcatgtattactaaataaaatgatctctctttctctctctctctctcttttctaagaaacaattatgtgcactttgatacacaaccttctctaaccaactatatatcaagacccaaaaattgaagaaaaatattgttttctcatacagtgagcagatttttcaatctactaattctgtgacttgtcttggtgtgctagcctacaccttctctttggtttagttttccttttctataacactctgaattgctaatcttactaacacctatgatgttacctgaaatcaatctcccatatgtatgctgtatgctatgctaagactcctgaaatatacttactctgtgcttgtgtatgtgaatgttaatgcaactattacctagagtgaactttaagctttattgttgaatgtaattccattatatttccttttgtacacctgtgaaaaagtggagtagtgtttttttaaccattgttaatcagcttttgtgtatgaaagacacagtaaaatttctttcttaaatcaagatactggtgattcaaggaattttatttatggtccagccaagagccatctcgtgccaagacttctgctggcaagggaatggataaagctgttttgttctagtaacaattttggaatgaatactgacaatattccatgagggtgtgcaagcacaaattttaccaatctgacctctttgaagttgcagaatgctttgaaattctaatggtatctgaaatatcagctcatagaaagtaacaaaatttgctgtcaccttaaataagacattttaattttgttataatgtacaatttagaagtttgattaattatattatctatttaggcattaatataaaagaggtaggagtctgttatttaaaaaaagcattaaatttaaaaaaaaactgtcttgtctacttttagcttcattctcccatattttgaagggtgtgtaacttcagctctgcaggattgcatggggtaaaacttgttaccaacacatgtgaaccattgctacattgtaggttgtgatcattttgccccactgaagcccatgtatctgaccttacgtgccttttgaactaggagaatcgggctaatttattaatgatgataattataatgtatctgtacagcactttttacatttgcgaagtgctttccaatccatgttagttactagttattacagctgtaaggataaaacacgtcatgtggattcattttgaattggtgctattggtatttcctctgttattgctaataaatgaaaatggtggtatg

SEQ ID NO: 15050 - DNA, 4594 bp, Homo sapiens
  source 1..4594: mol_type = unassigned DNA
ctttctccacaaaagaaataacagcgtgcattacgtattcagatactgctttgcttcatcctctctaaaatttaacaccgaggagtttaagaaatgaagataaggaactcgaattatttttaaactttggatcaatgtaaaggcaatctaatatttggaaaatacttgcaatgttgttctcctggcgagaagatcctggagcccagtgcctgctgctttctcttctgctcctcgcagcctcggaggtggggagcggccagctccactactccgtctctgaggaggccaagcatggcaccttcgtgggccgcatcgcgcaggacctggggctggagctggcggagctggtgccgcgcctgttccgggtggcgtccaaaagacacggggaccttctggaggtaaatctgcagaatggcattttgtttgtgaattctcggatagaccgcgaggaactgtgcgggcggagcgcggagtgcagcatccacctggaggtgatcgtggacaggccgctgcaggttttccatgtggaggtggaagtgaaggacattaatgacaacgcgccagtttttccaatggctgtaaagaatctgtttatttccgaatcccgacagcctggctctcggttttcgctagagggcgcatcagatgcagatatcggaacaaattcgttgttgacttacagtcttgattccactgaatattttaccttggacgttaaaagaaatgatgaggaaattaaatcccttggactcgtgttgaaaaaaaatttaaatcgagaggacactcctaagcattatttactaataacagcaattgatggtgggaaaccagagctcactggcacgactcaactaaagatcactgttttagatgtaaacgacaacgccccagcgtttgagaggacgatctataaagtcagattactcgaaaatgcaccaaatggtaccctagtggtgaccgttaacgccaccgatttggatgaaggagtaaataaggatatcgcgtattctttcaatacggacatgtcagcagatattctgtcaaaattccatttagatccagtcaatggacaaatcagtgtaaagggtaacatagatttcgaggaaagtaagtcatatgaaatccaggtagaagccacggataaaggaaatcccccaatgtcagatcactgcacagttctactcgaaattgtggacatcaatgataatgtacctgagttagttattcaatcactatctttacctgtattagaagactctccacttagcacagtcatcgctctgatcagcgtgtccgaccgcgactcaggagtcaatggacaggtcacctgctcgctgacgccccacgtccccttcaagctggtgtccaccttcaagaattactactcattggtgctggacagccctctggaccgcgagagcgtgtcggcctatgagctggtggtgactgctcgggacgggggctcgccttcactgtgggccacggccagcgtgtccgtggaggtggccgacgtgaacgacaatgcgccggcattctcgcagtccgagtacacggtgttcgtgaaggagaacaacccgccgggctgccacatcttcacggtgtctgcgcgggacgcggacgcgcaggagaacgccctggtgtcctactcgctggtggaacggcgggtgggggagcgcgcgctgtcgagctacgtgtcggtacacgcggagagcggcaaggtgtacgcgctgcagccgctggaccacgaggagctagagctgctgcagttccaggtgagtgcgcgcgatgcgggcgtgccgcctctgggcagcaacgtgacgctgcaggtgttcgtgctggacgagaacgacaacgcgccggcactgctgatgcctcgggtgggtggcatcggtggcgcagtgagcgagctggtgccgcggtcagtgggtgcgggccacgtggtagcgaaggtgcgcgcagtggatgcagactcaggctacaacgcgtggctttcgtatgagctgcagcctgggaccggcggtgcgcgcatcccgtttcgcgtggggctgtacacgggagagatcagcacgacccgtgccctggacgaggtggacgccccgcgccatcgcctactggtgctggtgaaggaccacggtgaaccctcattgaccgccacggccactgtgctggtgtcgctggtggagagtggccaggcacccaaggcctcgtcccaggcgtccgctggcgccacgggcccggaagctgcactggtggatgtcaacgtgtacttgatcgtcgccatctgcgcggtgtccagtctgttggtgctcacactgctgctatatactgctctgcggtgctccgcgccgccaaccgaaggcgactgtgggccgggcaagcccacgctggtgtgctccagcgcggtggggagctggtcatactcgcagcagaggcagcagagggtgtgctctggagaggggttgcccaagaccgacctcatggcttttagccctagccttcctccttgtccaattagccgggatagagaggagaaacaggatgtggacgttgatctctcagccaaagtgagtaatttttatttattctttccaaaatgtctttgtttttcattcctcaatgtttccactcctctggaaatacattaatagttaagtatgaattatgtgattcataattagacttttccagttttgtggttttgtggttaaaacggtaagatttttgttgctaatttttgaaccaaatcagcagtaagttatgatatccacacttgtaattttgttttgttattaggtgcagtagtagaattattttattgctaaatgcctgggtataagacaaatattttttcttagatgaattgcattatttagagaatctgacttcgacttgttttatacttatccctatacaatgcttcttcaatatcttttgccacttttcatttggacttcctactacctgttagtacaaatgttacttgctcattttatgagttcacctaatgcttataactccctattgattatgcttttccaccttcagtttcaaaaattagatcattacacctgttgtcttttatggaacctcttttattctcttattcacttgtttggagtctcaatccttattttttacttgaatatgattcattttaggccttgtgctctaatttggcaataccgtttattgtttcttgatttcccagttgggaaaaaaatcgagaataacaattgcatttagaattgcatctttgttcatctttagtttatcactactttatttaatactactttaataatactactgtattatatgttaaaatttattactaataactaaaatatcaatatgaagtgaaaatttaatagttgtatagtatatttatatattcattttaaaagaatgttttaaatcttgttaaaaataattttcaatctgaacaatatcttgaaaataattatggtatctaattttaaaactatccctactagcaaaactttttattcattagtgtcttttgcataccatactaaggatgctaatatgaaataagtttgataagccaatgttataatgttattactggttaacttctctgaatagcatcctgcctattaatgtgtgccatgcaataagtagaaaactccaaataaccagaaccaaatgaaattgaaggtagacttttttctaatcactacccctacatatttggttatctcctctagcaattagttggactcccatttaagtttccctaccactggagagaaatagtaaccaactgaaacctggttaatactcattgacagtgtgggaggtctaacacgtaaaatagatatttttcttgactcctctccttcccctcacttccattttctttatttccttttttggcactatcctttgttgctcccttgtccatgaagtagtagccatagtgtgtccatctcaggtcagtattttaaaaatttagttctgttatcagcttcttgaatataatagagtcagccaaagtacttgtcttcccagatatggaacttcaatcttcaaatccagcttgcctcttgaaactattgtctaacaagactcttggcaaagacattttgaagactttggaattttcacttcacagatgtactgatgctatgccaaataaatattgaatagctaccaaataaacattgttttctattctgctgcattccccatctgtacattaaaatacctggtaaatgaaaatattacaaatgaaatgggtgaaaatggaattcttcctccttttttccaatgtgcttgatgtcaatgatcattttgtaaaaatatagtttgggtccccacatagtgaaagtactctggtttctgtttgattcagaaatttggtgggttttttgttgttgttttggtttttgtgtgtgtgtgtttgtgtgagtgtagttcttcaatagagagggagcgtaaagctattttcactagattgattttttgtttagacaaacaggatgaaaataactttatggatataggaggcaaggaaagtttttaaatggctaccattatgtctttatatattaaatttctttatgtaagaaaa

SEQ ID NO: 15051 - DNA, 811 bp, Homo sapiens
  source 1..811: mol_type = unassigned DNA
gtcaacgaccatgatctctggacccacactacagtaacaagtttgtcagtcattttcagataaggtgcaaatcaagggatggctttgtccccacttcggcgcagggaaaatatgccagtcattgttatgatgtaaacaaccgaaggggtggacggtgaggataagaagaaccgagataatatttggccagagctacgtgtagcacagggagccagggcggcagctgcacctgcgagcagcgcaggcggcaggcgcggcctccgggcgtggtggtgggcgtggccgggcggcgggggcgtggccgggcggcggggcgggcggtgccgccggttggaagtgggtggagttgcccttggaggcggcaccggacctgggccccgaggcccgccgcgccctgtcgggcctgagccgagtggccccacagagccggcgcgctcccgcctgcagggggagagcagacggggcgcggggaccggccaggccgcggcgggtgctgtttctgtttcactttccttcactctgaggccggcgcgctggcgggcgaggagcggcggcggtggcggccgctggacatgggaaagcggaaccaccaaaaggagtgatgatcaacgatctcatgataaatctggatgctagttctcatgcctcaggacatcctactgggaacgacacaccagctcctgggatcagactttcatctacttaggacccctctttgcccagactactaaagccagtcttcactagccacgaatggctacccaaaggaaacacttggtgaaagattttaatccttacattacctgctata

SEQ ID NO: 15052 - DNA, 973 bp, Homo sapiens
  source 1..973: mol_type = unassigned DNA
actctgaggccggcgcgctggcgggcgaggagcggcggcggtggcggccgctggacatgggaaagcggaaccaccaaaaggagtgatgatcaacgatctcatgataaatctggatgctagttctcatgcctcaggacatcctactgggaacgacacaccagctcctgggatcagactttcatctacttaggacccctctttgcccagactactaaagccagtcttcactagccacgaatggctacccaaaggaaacacttggtgaaagattttaatccttacattacctgctatatctgtaaagggtatctgatcaagccaacaacagtgacggaatgcctccatacatctgcagaatcctactggatgtccacttggatgtcctgaagccacctgaaactcagcatatctacgaatgatcaaatgggatgccagcactcagttatccaagcaagaaatatgctccatgcttgactctttaccctcactaacaaaactgggcaaagtcctgctggtctctctctttaatacttctcaaatctgtccctttagtttcatccctctgttactgttctcattcagattcttattacatctcaccaaagccactgcagcacattcttaactgtgtccaagtggtaataattaaaaacagcttactgtctttatcattatcactcttaacccaccctaaaatttcctaaaggtatcccgttgacctcaggatacattaaagctacttagtggtgactggtttctgcctaccacttcctcccctaccacctaacactcacacatacaaatacttggttcaactgtttgctctccttgaaatgaatgcctcctctgtgcccagctagcagttacccatcctttaaaactcatcccctctaagatgtgccctaccacctgcagatttgggttaagtgtctcaataaaatcttaaatgaataaatgcatggctaataagtta

SEQ ID NO: 15053 - DNA, 7018 bp, Homo sapiens
  source 1..7018: mol_type = unassigned DNA
gaggccggcgcgctggcgggcgaggagcggcggcggtggcggccgctggacatgggaaagcggaaccaccaaaaggagtgatgatcaacgatctcatgataaatctggatgctagttctcatgcctcaggacatcctactgggaacgacacaccagctcctgggatcagactttcatctacttaggacccctctttgcccagactactaaagccagtcttcactagccacgaatggctacccaaaggaaacacttggtgaaagattttaatccttacattacctgctatatctgtaaagggtatctgatcaagccaacaacagtgacggaatgcctccatacattctgtaagacttgtattgttcagcactttgaagatagcaatgattgcccaaggtgtggcaaccaagttcatgagacaaatccattagaaatgttgaggttggacaatacattagaggaaattatatttaagctggtccctggactacgagaacaagaacttgagcgtgaatctgaattttggaagaaaaataagcctcaagaaaatggacaagatgatacttcaaaagctgacaaaccgaaagtagatgaagaaggtgatgaaaatgaagatgataaagattatcacagaagtgacccacaaattgctatctgtctagattgtttacgaaataatgggcaatcaggggacaatgtagtaaagggtttaatgaagaaattcattcgatgttctacacgtgtaactgtgggaactattaaaaaatttctaagtttaaaactaaaacttccaagttcttatgagttggatgtgctgtgcaatggtgaaattatggggaaggatcatactatggaattcatctacatgacaagatggcgactaagaggcgaaaactttcggtgtctgaactgctcagcttcgcaagtctgctctcaggatggccctttgtatcagtcataccctatggtactgcagtatcgaccaagaattgatttcggttagaccaaggggcccagacctcactgagatgaatcctgcactatttgtttactcgtcaacagattgcacagttaacggtgtgtggactagaggaacacaaccagattttcagcatgcaaataaggccattgtctatctctaaattgtcagttgcattcatgttgtttctattaggagcaaaccaagtgccattctgctactgaaccatctgcataaggtatttgtgttgtctcaaagtgtgcaagtcatggtaaaaatcagttagctgtgccgccatgattcacccttctgaatattttgcttgcctgttccaagattgttctaatgtttaattacactagtaaaatggctcaatttttgtggtgttgcagttttcacatacttactcttttattcttgtttaaatagcgtactctacaagaaactaataattatatcttgaaattattttgtatggaagtatatttagaaaagtggtttttgagccactgtcttgttcttgataagctttttgtgtgaaaaaaagttcattcttgagtgtgcaagtccttttgccaagaattccaattattctgtaacattagagcacaatataattgtagacattctaagcatctgtccgtgtagtctaccaattgcacaaggaaggcatgttagccctccagattgaaaatgtatgtgacctcttgaactgaagttagattcccaaccattcaaaatgttggcagctgatcacatttacttctgataaaagtaatgtgtaagtaaggttaatcttctttcataatgccttatgacaagcaggtgctgcttcatgaaacgtcattgtatagcccatttcatgtatcattacattgttgctgttatttaatgagtgcattatttctctttttaagttggccttaggtatatgtcattgtggcatgcagagggttatgacgattttaaatattaggatttttagagcacataacattagctattttatggatttcaaaagtctcaaaacagttgtagattaaaactgttagttacctttcacatttccaaactatgtgcataaaatagaataaatgcagtatagaactatgctaaccaaaattaataggttaagggtattttattttaaatcctgtagtaattggggaaatgagaagattattattttatacatgagttcattaagatcagaaatacaaaatgtcctgtattttgcagttttgttaagtcttccattcgttttaggattagtctgcaagtcaaagaaagtcttgttaccttaaattatatgaaaactgtcattttaaatcttttaatatttacagttttcaaaaaccttacttggaaattgctttgaaacaaacaagctaacctttgaaacttaggaaaaaatcttgaaagttaggaaaaatatttgagaaatatgacgagcacaatctgtgtgttacacacatttagtttttatactgcatatgtggtaaatgtgtcacattttccagtaaaatgtatcagaaatcaatgccttctgaatttcaaaatgattcttagaaataagatattgtacaactctagcaaacatacaaagtacagctaaatcttaatatatttcactatgtaaaaggctgaaacttcataattatctgttccttctatctttttttgagtcaaaaagtctattaaatttttctgttgttgttccaactttggtgaaaaaggttatggcaatactttaactttgttttgttacattgtttttgttcttggaatggctcacaagcagaatttaaaaggcagattttcattaactataaatggctgaaaaaactgaatttactatctagctacagaaattatttttctatggtgtgaaactgttcccagacatccctaagaacttttacaaattattataaatttgtcacacctaggtcagcgattaaaatagtgttttgcaaatggaattttaattaactcaaaatgaattaagagtgcattttaaaaatcacaagtgagactttgatgttttggccccccagccaaaacttaatggtcataaatgaattttatctacaaaatctctttaaatttggctggttgccttgtcatatgtaatttcactattttccaaggaaatatataggaagcaattatgaaactgagaatagttttatatagaattcttttatttactgataatgcattaacatttttattgaaatgcaatggaatatgtgccaaaacacgtgaaaagcttacataaagaaaggcatcagttgtcgtttggagaaaggtacacatttttttgatggtcctaagtgatatggtattactactagaatcacagatttcttcaactgacttattttggtatattcaactacagctttctaaggataggactactttcatgtctagtaatacactgtattccccgttaattatcccttaagtcagattgtagaatttgcaagaaactaggtatagaaaaaatgtacaggcaacttttgtggttagctttataaatttagggtgcttataaaatgataaaatgaattctttaaataacctataggaatcatctgaatctgtaacatcagagactaaaactaaaagttttctttaatctgttgtttcttaagcaataaactgaaagacctttacttccataaaagattttgttatctcttttatctgccttagaaattataagtataaaagggtcaagggaacttagatataaagaatgactgtggtttataaacattactttaattgaagtaatcacatcagttaatagagaaatcaaaatatgtatggccttttctctagattagcaaaacagctttacaaagtatgaaaaaataaactaaaatgctcattgatgaggtaatactcagtctggagtacaggtaacttgggtaatgccttttaactactcttagaggagtatattatttctttatacattaaacatctatcccatagtaatgtgccacattttataaacgtaatgactttgctcaactacattacacactcaaatgtaatctaaatttaaactgattatttaaggaaaaaaagtgtgttatataatattgtgaactgtttagctttactgaaatatttaagagaaagtgcctcattactaaagtgcatttctgttttaaatttactgcataaagtttgagttatctgtacctgtctcttatgaatggtttcatatctaaataggctcttgtaagttaatttttttggaagattttcataagaatatagatatcaccaaagacattttacagtaaattaataaccatgttggagagacggttttaacagtttggaggttggaaatttttagattgcaatttaattttatatagttaggcaataaccttgattaattgctaaaatatcaccaaagaaaggctttaaactgaattttcttggtgagatcagtcaaatgcaggcttttcttgcaataatcagaacacacttcctttcaaatatgttcattgtttttcagcatcatctaacagatcttagtaaatctaaatcctcaaagatgagaaagaggtaaacacaacaaatagccttcctctgcatgaaaagtgagagaaatacatactttgaaaagaaagttcagatttttaatttgagagggtttttatttcatggaggcagtgttaactaaaattaagcttagatttagctcctgtattattcataatatgagaaattttattaaaggcagactttggtaaaagtgccaacacacttacttgtatagaaaagacttcattctatgggatttatataagtaagtgctttctctatattcaaaatatttcataaggacctgtggtttttttccccttaaaaagcaactctaggccgggcacagtggctcatgcctgtaatcccagcactttgggaggccaaggcaggtggatcacttgaggtcaggagttcgagaccagctggttaacatggtgaaaccccatctctactaaaaatacaaaaattagccaggtgtggtggcacgcgcctgtaatcccagctacatgggaggttgaggcaggagaatctcttgaacccaggaggtggaggttgcagtgagccgcaattacaccactgcactccagcctgggtgacacagcgagtctccatctccaaaaaaaattcaactcttggtcttgtttctcagcacttagtttattgttattagaatttagccatacagccaactttgacaaaatgggtcacagaacaagcatgtacatcaagaggaagttccatatcccccttgtaccatttctccttgggaactcatgctatgggctaccttaaaggtaaaactcatcttatggagtctttctgataggtcactaggtaaaactccttggatagggtgaaaatggatgcacactctattacatactctggtttatcataaggaattttccagaaagctaagctttatactaataagatattggttggtagtaggaacttcaaaaatgaatgagtttgccataactttaattttctggattagaaacacaaaacttgaaatgcaattatcaatattttgtaatatatattcctacagtttgggtagaaataaggaacatgtctgctagatctggtttatgaaaaagtgaaaaatattaaatacaccagagactcaaaccctttcaaggcacacaataactgttctggatttacctgacaaacctagttgagtagcattttgacagaaaatatcagactgaaagttcattcaaatgtacttaaatgtacaatacagtgttcaatagtttttattgcagtgatgtttttccaataatttaagtaattctcttcctagtataatacagttttcataaataatgtttacttgctttctttatattttcaaataaaattaaaatgctcgagcacttcctttcagaaagttataaaattaaaaataattattttaaatgctcattcaaatgtgtctgtatacttgctatgcccctttttctataattccaaactgagactgatttttcagagatttttaactttaataattttaaatctagaatcaagtgaaacagatatgttaaatactgagtctagttttcttccatcttatggagcttcatggaataagaaactaatctagtgcaaatgaagattaaatatttctgggtgatggagagatagtcaacaaatttatttatccatcctctgcacatcagtccactggagcaggagttctacacattaaaaatgtaatgggatcagcctagcattgtttggtgttcttttgttgtattttttagaatgggggtgggggcctaagtgtccttatgaagctgtggtccacgacaggagcttgttgggggagtaccagggttctgctgctttcctgcatctgagcaacacaacagagatcatcagttttaaatagagtagccctcacaatcaaaatatcatagaatatattgtaaagttatgttgctaattttcctttgaaatataaaatattttaagctttttgtcaaaagtggtaacatcttaatacaaataaaaacctttttgtggttgtaagatttagcttataaatcattcaaattgaagtgaaagaattaccaggtcattgttaatgacttagtctattaagaatatatgtatttttgtaaaggaaaagcacttgtagatatttaatcagtacaagatatgtcttttgcagaaataaaatgctgcttagagattctccttaaatattttttatttttgtgctcaaatgtattttctgttgatctatggaatgttctgtacaaagctgtataattgtactgttgggctagatactttttttttttaatctggacttagccaagtatatttcaccatgttaaaatacagtatctttgttattaaaaattaaattgcataatttattattgtttgtcatctttaatattagtcactgtagattgcagccttcattaaaaatatctcctttaa

SEQ ID NO: 15054 - DNA, 7144 bp, Homo sapiens
  source 1..7144: mol_type = unassigned DNA
cacaacgttcccgtttgcttatagttgtcaacgaccatgatctctggacccacactacagtaacaagtttgtcagtcattttcagataaggtgcaaatcaagggatggctttgtccccacttcggcgcaggtgggacagacttggggaagacgcagctgaagagacaaattctcaggacatgggaaagcggaaccaccaaaaggagtgatgatcaacgatctcatgataaatctggatgctagttctcatgcctcaggacatcctactgggaacgacacaccagctcctgggatcagactttcatctacttaggacccctctttgcccagactactaaagccagtcttcactagccacgaatggctacccaaaggaaacacttggtgaaagattttaatccttacattacctgctatatctgtaaagggtatctgatcaagccaacaacagtgacggaatgcctccatacattctgtaagacttgtattgttcagcactttgaagatagcaatgattgcccaaggtgtggcaaccaagttcatgagacaaatccattagaaatgttgaggttggacaatacattagaggaaattatatttaagctggtccctggactacgagaacaagaacttgagcgtgaatctgaattttggaagaaaaataagcctcaagaaaatggacaagatgatacttcaaaagctgacaaaccgaaagtagatgaagaaggtgatgaaaatgaagatgataaagattatcacagaagtgacccacaaattgctatctgtctagattgtttacgaaataatgggcaatcaggggacaatgtagtaaagggtttaatgaagaaattcattcgatgttctacacgtgtaactgtgggaactattaaaaaatttctaagtttaaaactaaaacttccaagttcttatgagttggatgtgctgtgcaatggtgaaattatggggaaggatcatactatggaattcatctacatgacaagatggcgactaagaggcgaaaactttcggtgtctgaactgctcagcttcgcaagtctgctctcaggatggccctttgtatcagtcataccctatggtactgcagtatcgaccaagaattgatttcggttagaccaaggggcccagacctcactgagatgaatcctgcactatttgtttactcgtcaacagattgcacagttaacggtgtgtggactagaggaacacaaccagattttcagcatgcaaataaggccattgtctatctctaaattgtcagttgcattcatgttgtttctattaggagcaaaccaagtgccattctgctactgaaccatctgcataaggtatttgtgttgtctcaaagtgtgcaagtcatggtaaaaatcagttagctgtgccgccatgattcacccttctgaatattttgcttgcctgttccaagattgttctaatgtttaattacactagtaaaatggctcaatttttgtggtgttgcagttttcacatacttactcttttattcttgtttaaatagcgtactctacaagaaactaataattatatcttgaaattattttgtatggaagtatatttagaaaagtggtttttgagccactgtcttgttcttgataagctttttgtgtgaaaaaaagttcattcttgagtgtgcaagtccttttgccaagaattccaattattctgtaacattagagcacaatataattgtagacattctaagcatctgtccgtgtagtctaccaattgcacaaggaaggcatgttagccctccagattgaaaatgtatgtgacctcttgaactgaagttagattcccaaccattcaaaatgttggcagctgatcacatttacttctgataaaagtaatgtgtaagtaaggttaatcttctttcataatgccttatgacaagcaggtgctgcttcatgaaacgtcattgtatagcccatttcatgtatcattacattgttgctgttatttaatgagtgcattatttctctttttaagttggccttaggtatatgtcattgtggcatgcagagggttatgacgattttaaatattaggatttttagagcacataacattagctattttatggatttcaaaagtctcaaaacagttgtagattaaaactgttagttacctttcacatttccaaactatgtgcataaaatagaataaatgcagtatagaactatgctaaccaaaattaataggttaagggtattttattttaaatcctgtagtaattggggaaatgagaagattattattttatacatgagttcattaagatcagaaatacaaaatgtcctgtattttgcagttttgttaagtcttccattcgttttaggattagtctgcaagtcaaagaaagtcttgttaccttaaattatatgaaaactgtcattttaaatcttttaatatttacagttttcaaaaaccttacttggaaattgctttgaaacaaacaagctaacctttgaaacttaggaaaaaatcttgaaagttaggaaaaatatttgagaaatatgacgagcacaatctgtgtgttacacacatttagtttttatactgcatatgtggtaaatgtgtcacattttccagtaaaatgtatcagaaatcaatgccttctgaatttcaaaatgattcttagaaataagatattgtacaactctagcaaacatacaaagtacagctaaatcttaatatatttcactatgtaaaaggctgaaacttcataattatctgttccttctatctttttttgagtcaaaaagtctattaaatttttctgttgttgttccaactttggtgaaaaaggttatggcaatactttaactttgttttgttacattgtttttgttcttggaatggctcacaagcagaatttaaaaggcagattttcattaactataaatggctgaaaaaactgaatttactatctagctacagaaattatttttctatggtgtgaaactgttcccagacatccctaagaacttttacaaattattataaatttgtcacacctaggtcagcgattaaaatagtgttttgcaaatggaattttaattaactcaaaatgaattaagagtgcattttaaaaatcacaagtgagactttgatgttttggccccccagccaaaacttaatggtcataaatgaattttatctacaaaatctctttaaatttggctggttgccttgtcatatgtaatttcactattttccaaggaaatatataggaagcaattatgaaactgagaatagttttatatagaattcttttatttactgataatgcattaacatttttattgaaatgcaatggaatatgtgccaaaacacgtgaaaagcttacataaagaaaggcatcagttgtcgtttggagaaaggtacacatttttttgatggtcctaagtgatatggtattactactagaatcacagatttcttcaactgacttattttggtatattcaactacagctttctaaggataggactactttcatgtctagtaatacactgtattccccgttaattatcccttaagtcagattgtagaatttgcaagaaactaggtatagaaaaaatgtacaggcaacttttgtggttagctttataaatttagggtgcttataaaatgataaaatgaattctttaaataacctataggaatcatctgaatctgtaacatcagagactaaaactaaaagttttctttaatctgttgtttcttaagcaataaactgaaagacctttacttccataaaagattttgttatctcttttatctgccttagaaattataagtataaaagggtcaagggaacttagatataaagaatgactgtggtttataaacattactttaattgaagtaatcacatcagttaatagagaaatcaaaatatgtatggccttttctctagattagcaaaacagctttacaaagtatgaaaaaataaactaaaatgctcattgatgaggtaatactcagtctggagtacaggtaacttgggtaatgccttttaactactcttagaggagtatattatttctttatacattaaacatctatcccatagtaatgtgccacattttataaacgtaatgactttgctcaactacattacacactcaaatgtaatctaaatttaaactgattatttaaggaaaaaaagtgtgttatataatattgtgaactgtttagctttactgaaatatttaagagaaagtgcctcattactaaagtgcatttctgttttaaatttactgcataaagtttgagttatctgtacctgtctcttatgaatggtttcatatctaaataggctcttgtaagttaatttttttggaagattttcataagaatatagatatcaccaaagacattttacagtaaattaataaccatgttggagagacggttttaacagtttggaggttggaaatttttagattgcaatttaattttatatagttaggcaataaccttgattaattgctaaaatatcaccaaagaaaggctttaaactgaattttcttggtgagatcagtcaaatgcaggcttttcttgcaataatcagaacacacttcctttcaaatatgttcattgtttttcagcatcatctaacagatcttagtaaatctaaatcctcaaagatgagaaagaggtaaacacaacaaatagccttcctctgcatgaaaagtgagagaaatacatactttgaaaagaaagttcagatttttaatttgagagggtttttatttcatggaggcagtgttaactaaaattaagcttagatttagctcctgtattattcataatatgagaaattttattaaaggcagactttggtaaaagtgccaacacacttacttgtatagaaaagacttcattctatgggatttatataagtaagtgctttctctatattcaaaatatttcataaggacctgtggtttttttccccttaaaaagcaactctaggccgggcacagtggctcatgcctgtaatcccagcactttgggaggccaaggcaggtggatcacttgaggtcaggagttcgagaccagctggttaacatggtgaaaccccatctctactaaaaatacaaaaattagccaggtgtggtggcacgcgcctgtaatcccagctacatgggaggttgaggcaggagaatctcttgaacccaggaggtggaggttgcagtgagccgcaattacaccactgcactccagcctgggtgacacagcgagtctccatctccaaaaaaaattcaactcttggtcttgtttctcagcacttagtttattgttattagaatttagccatacagccaactttgacaaaatgggtcacagaacaagcatgtacatcaagaggaagttccatatcccccttgtaccatttctccttgggaactcatgctatgggctaccttaaaggtaaaactcatcttatggagtctttctgataggtcactaggtaaaactccttggatagggtgaaaatggatgcacactctattacatactctggtttatcataaggaattttccagaaagctaagctttatactaataagatattggttggtagtaggaacttcaaaaatgaatgagtttgccataactttaattttctggattagaaacacaaaacttgaaatgcaattatcaatattttgtaatatatattcctacagtttgggtagaaataaggaacatgtctgctagatctggtttatgaaaaagtgaaaaatattaaatacaccagagactcaaaccctttcaaggcacacaataactgttctggatttacctgacaaacctagttgagtagcattttgacagaaaatatcagactgaaagttcattcaaatgtacttaaatgtacaatacagtgttcaatagtttttattgcagtgatgtttttccaataatttaagtaattctcttcctagtataatacagttttcataaataatgtttacttgctttctttatattttcaaataaaattaaaatgctcgagcacttcctttcagaaagttataaaattaaaaataattattttaaatgctcattcaaatgtgtctgtatacttgctatgcccctttttctataattccaaactgagactgatttttcagagatttttaactttaataattttaaatctagaatcaagtgaaacagatatgttaaatactgagtctagttttcttccatcttatggagcttcatggaataagaaactaatctagtgcaaatgaagattaaatatttctgggtgatggagagatagtcaacaaatttatttatccatcctctgcacatcagtccactggagcaggagttctacacattaaaaatgtaatgggatcagcctagcattgtttggtgttcttttgttgtattttttagaatgggggtgggggcctaagtgtccttatgaagctgtggtccacgacaggagcttgttgggggagtaccagggttctgctgctttcctgcatctgagcaacacaacagagatcatcagttttaaatagagtagccctcacaatcaaaatatcatagaatatattgtaaagttatgttgctaattttcctttgaaatataaaatattttaagctttttgtcaaaagtggtaacatcttaatacaaataaaaacctttttgtggttgtaagatttagcttataaatcattcaaattgaagtgaaagaattaccaggtcattgttaatgacttagtctattaagaatatatgtatttttgtaaaggaaaagcacttgtagatatttaatcagtacaagatatgtcttttgcagaaataaaatgctgcttagagattctccttaaatattttttatttttgtgctcaaatgtattttctgttgatctatggaatgttctgtacaaagctgtataattgtactgttgggctagatactttttttttttaatctggacttagccaagtatatttcaccatgttaaaatacagtatctttgttattaaaaattaaattgcataatttattattgtttgtcatctttaatattagtcactgtagattgcagccttcattaaaaatatctccttt
